(19) United States
(12) Patent Application Publication
(10) Pub. No.: US 2004/0029123 A1
(43) Pub. Date: Feb. 12, 2004

(54) Diagnosis of diseases associated with the cell cycle

(76) Inventors: Alexander Olek, Berlin (DE); Kurt Berlin, Stahnsdorf (DE); Christian Piepenbrock, Berlin (DE)

Correspondence Address: DAVIDSON, DAVIDSON & KAPPEL, LLC, 485 SEVENTH AVENUE, 14TH FLOOR, NEW YORK, NY, 10018, US

(21) Appl. No.: 10/221,613

(22) PCT Filed: Mar. 15, 2001
(86) PCT No.: PCT/EP01/02945

(30) Foreign Application Priority Data
Mar. 15, 2000 (DE) 10013847.0
Apr. 6, 2000 (DE) 10019058.8
Apr. 7, 2000 (DE) 10019173.8
Jun. 30, 2000 (DE) 10032529.7
Sep. 1, 2000 (DE) 10043826.1

(51) Int. Cl. C12Q 1/68

(52) U.S. Cl. 435/6

(57) ABSTRACT

The present invention relates to the chemically modified genomic sequences of genes associated with cell cycle, to oligonucleotides and/or PNA-oligomers for detecting the cytosine methylation state of genes associated with cell cycle which are directed against the sequence, as well as to a method for ascertaining genetic and/or epigenetic parameters of genes associated with cell cycle.

### FIELD OF THE INVENTION

[0001] The levels of observation that have been well studied by the methodological developments of recent years in molecular biology, are the genes themselves, the translation of these genes into RNA, and the resulting proteins. The question of which gene is switched on at which point in the course of the development of an individual, and how the activation and inhibition of specific genes in specific cells and tissues are controlled is correlatable to the degree and character of the methylation of the genes or of the genome. In this respect, pathogenic conditions may manifest themselves in a changed methylation pattern of individual genes or of the genome.

[0002] The present invention relates to nucleic acids, oligonucleotides, PNA-oligomers and to a method for the diagnosis and/or therapy of diseases which have a connection with the genetic and/or epigenetic parameters of genes associated with cell cycle and, in particular, with the methylation status thereof.

[0003] Prior Art

[0004] The cell cycle is the series of events between each meitotic division, culminating in the division of a cell into two daughter cells. The cycle consists of 4 discrete phases, the G1, S, G2 and M phases. Nuclear and cytoplasmic division occur during the M (mitotic) phase and DNA replication takes place during the S phase. The period between the end of the M phase and the start of the S phase is termed G1, and the phase between the end of the S phase and the start of the M phase is termed G2.

[0005] The regulation of these phases and the progression from one phase to the next is a key factor in the regulation of ordered cell division. The unidirectional progression from one phase to the next is controlled at various biochemical ‘checkpoints’. These ‘checkpoints’, or biochemical pathways are of considerable interest, as alterations within them may result in decreased fidelity of events associated with cell cycle, such as chromosome duplication and segregation.

[0006] In mammalian cells G1 represents the most important checkpoint. At this point, the cell commits itself to DNA replication and regulates proliferation. Other checkpoints are present during the S phase when the integrity of the replicated chromosomes is checked and G2 when commitment to meitotic division is made. If the cell does not divide at this point, it remains in the condition of having twice the normal complement of chromosomes.

[0007] The regulatory system consists of a series of enzymes that respond to external signals and checkpoints by phosphorylating or dephosphorylating the next member of the pathway. Phosphorylation is catalysed by cyclin dependant kinases. These holoenzymes consist of two protein subunits; a regulatory subunit (the cyclin), and an associated catalytic subunit (the cyclin-dependent kinase or CDK). They are subject to many levels of regulation, and are used both to control the activities of the regulatory circuit itself and to control the activities of the substrates that execute the decisions of the regulatory circuit. In general, different types of cyclins are designated by letters (e.g., cyclin A, cyclin B, etc.) and CDKs are distinguished by numbers (CDK1, CDK2, etc.;). The role of cell cycle regulators has been reviewed by Stephen Elledge, “J. Cell Cycle Checkpoints: Preventing an Identity Crisis” Science, 274; 1664-1672 (1996).

[0008] Misregulation of the the cell cycle can lead to proliferation, and cell cycle regulators have been implicated in a number of diseases, in particular tumor formation. Examples of diseases involving disruptions in cell cycle pathways include:

[0009] 1. HIV infection; Zhou and Ratner “Phosphorylation of Human Immunodeficiency Virus Type 1 Vpr Regulates Cell Cycle Arrest” Journal of Virology, Vol. 74; 6520-6527. (2000).

[0010] 2. Alzheimers; Bruckner et al. “Aberrancies in signal transduction and cell cycle related events in Alzheimer's disease.” J Neural Transm Suppl;54:147-58 (1998)

[0011] 3. Graft-versus-host disease; Boussiotis et. al. “Altered T-cell receptor+CD28-mediated signaling and blocked cell cycle progression in interleukin 10 and transforming growth factor-beta-treated alloreactive T cells that do not induce graft-versus-host disease.” Blood.;97(2):565-571 (2001)

[0012] 4. Aging; Zhu et. al. “Neuronal CDK7 in hippocampus is related to aging and alzheimer disease” Neurobiol Aging.;21(6):807-13 (2000)

[0013] 5. Glomerular disease; Shankland et. al. “Differential expression of cyclin-dependent kinase inhibitors in human glomerular disease: role in podocyte proliferation and maturation.” Kidney Int.; 58(2):674-83 (2000)

[0014] 6. Lewy body disease; Takahashi et. al. “Cyclin-dependent kinase 5 (Cdk5) associated with Lewy bodies in diffuse Lewy body disease.” Brain Res. 17;862(1-2):253-6 (2000)

[0015] 7. Arthirits; Kohsaka et. al. “Treatment of arthritis with cyclin-dependent kinase inhibitor p 161NK4a gene” Nihon Rinsho Meneki Gakkai Kaishi.;22(6):397-9 (1999)

[0016] 8. Neurodegenerative disorders; Patrick et. al. “Conversion of p35 to p25 deregulates Cdk5 activity and promotes neurodegeneration” Nature 9;402(6762):615-22 (1999)

[0017] 9. Arterosclerosis; Ihling et. al. “Co-expression of p53 and MDM2 in human atherosclerosis: implications for the regulation of cellularity of atherosclerotic lesions.” J Pathol;185(3):303-12 (1998)

[0018] 10. Ataxia telangiectasia; Matsuoka et. al. “Linkage of ATM to Cell Cycle Regulation by the Chk2 Protein Kinase” Science, Vol.282; 1893-1897 (1998).

[0019] 11. Bladder cancer; Del Pizzo et al. “Loss of Cell Cycle Regulators p27Kip1 and Cyclin E in Transitional Cell Carcinoma of the Bladder Correlates with Tumor Grade and Patient Survival” American Journal of Pathology, Vol. 155;1129-1136 (1999).

[0020] 12. Leukemia; Vrhovac et al. “Prognostic Significance of the Cell Cycle Inhibitor p27Kip1 in Chronic B-Cell Lymphocytic Leukemia” Blood Vol. 91; 4694-4700 (1998).

[0021] 13. Colorectal cancer; Thomas G. V. “Down-Regulation of p27 Is Associated with Development of Colorectal Adenocarcinoma Metastases” American Journal of Pathology;153; 681-687 (1998).

[0022] 14. Gastric cancer; Takani Y “Cyclin D2 Overexpression and Lack of p27 Correlate Positively and Cyclin E Inversely with a Poor Prognosis in Gastric Cancer Cases” American Journal of Pathology;156; 585-594 (2000).

[0023] 15. Liver cancer; Albrecht J “Regulation of GI cyclin-dependent kinases in the liver: role of nuclear localisation and p27 sequestration” Vol. 277;1207-G1216, (1999).

[0024] 16. Lung cancer; Nabeyrat E “Retinoic acid-induced proliferation of lung alveolar epithelial cells is linked to p21CIP1 downregulation” Vol. 278;42-L50, (2000).

[0025] 17. Prostate cancer; De Marzo A “Expression of the Cell Cycle Inhibitor p27Kip1 in, normal, Hyperplastic, and Neoplastic Cells” American Journal of Pathology; 153;911-919 (1998).

[0026] The methylation of DNA is a necessary factor in the correct regulation of gene expression. For example, the p16 protein halts cell cycle progression at the G1/S boundary, and the loss of p16 function may lead to cancer progression by allowing unregulated cellular proliferation. Hypermethylation mediated inactivation of the p16 gene has been demonstrated in brain, breast, colon, head and neck, and non-small-cell lung cancer and in high grade non-Hodgkin's lymphoma. Other studies establishing a link between methylation and gene regulation include, Jackson et. al. “Loss of genomic methylation causes p53 dependant apoptosis and epigenetic deregulation” Nature Genetics 27;31-39 (2001), which showed aberrant expression patterns of several key cell cycle genes.

[0027] The identification of the methylation dependant regulation of cell cycle genes opens up the possibility of developing alternative methods of cancer treatment and diagnosis. Treatment with DNA methylation inhibitors has been shown to restore gene expression of the key cell cycle gene p16, Bender et. al. “Inhibition of DNA methylation by 5-aza-2′-deoxycytidine suppresses the growth of human tumor cell lines.” Cancer research 58; 95-101 (1998). This resulted in heritable levels of gene expression leading to suppression of growth in tumor cell lines.

[0028] Methylation based therapies could have considerable advantages over current methods of treatment, such as chemotherapy, surgery and radiotherapy. They may even provide a means of treating tumors which are resistant to conventional methods of therapy, as demonstrated by Soengas et al “Inactivation of the apoptosis effector Apaf-1 in malignant melanoma” Nature 409; 207-211(2001). In addition to the development of methylation specific therapies, experiments with Min mice have shown that inhibition of DNA methylation can suppress tumor initiation, Laird et. al. ‘Suppression of intestinal neoplasia by DNA hypomethylation’ Cell 81; 197-205 (1995). Furthermore, DNA methylation analysis may provide novel means for cancer diagnosis.

[0029] 5-methylcytosine is the most frequent covalent base modification in the DNA of eukaryotic cells. It plays a role, for example, in the regulation of the transcription, in genetic imprinting, and in tumorigenesis. Therefore, the identification of 5-methylcytosine as a component of genetic information is of considerable interest. However, 5-methylcytosine positions cannot be identified by sequencing since 5-methylcytosine has the same base pairing behavior as cytosine. Moreover, the epigenetic information carried by 5-methylcytosine is completely lost during PCR amplification.

[0030] A relatively new and currently the most frequently used method for analyzing DNA for 5-methylcytosine is based upon the specific reaction of bisulfite with cytosine which, upon subsequent alkaline hydrolysis, is converted to uracil which corresponds to thymidine in its base pairing behavior. However, 5-methylcytosine remains unmodified under these conditions. Consequently, the original DNA is converted in such a manner that methylcytosine, which originally could not be distinguished from cytosine by its hybridization behavior, can now be detected as the only remaining cytosine using “normal” molecular biological techniques, for example, by amplification and hybridization or sequencing. All of these techniques are based on base pairing which can now be fully exploited. In terms of sensitivity, the prior art is defined by a method which encloses the DNA to be analyzed in an agarose matrix, thus preventing the diffusion and renaturation of the DNA (bisulfite only reacts with single-stranded DNA), and which replaces all precipitation and purification steps with fast dialysis (Olek A, Oswald J, Walter J. A modified and improved method for bisulphite based cytosine methylation analysis. Nucleic Acids Res. Dec. 15, 1996;24(24):5064-6). Using this method, it is possible to analyze individual cells, which illustrates the potential of the method. However, currently only individual regions of a length of up to approximately 3000 base pairs are analyzed, a global analysis of cells for thousands of possible methylation events is not possible. However, this method cannot reliably analyze very small fragments from small sample quantities either. These are lost through the matrix in spite of the diffusion protection.

[0031] An overview of the further known methods of detecting 5-methylcytosine may be gathered from the following review article: Rein, T., DePamphilis, M. L., Zorbas, H., Nucleic Acids Res. 1998, 26, 2255.

[0032] To date, barring few exceptions (e.g., Zeschnigk M, Lich C, Buiting K, Doerfier W, Horsthemke B. A single-tube PCR test for the diagnosis of Angelman and Prader-Willi syndrome based on allelic methylation differences at the SNRPN locus. Eur J Hum Genet. 1997 March-April;5(2):94-8) the bisulfite technique is only used in research. Always, however, short, specific fragments of a known gene are amplified subsequent to a bisulfite treatment and either completely sequenced (Olek A, Walter J. The pre-implantation ontogeny of the H19 methylation imprint. Nat Genet. 1997 November;17(3):275-6) or individual cytosine positions are detected by a primer extension reaction (Gonzalgo M L, Jones P A. Rapid quantitation of methylation differences at specific sites using methylation-sensitive single nucleotide primer extension (Ms-SNuPE). Nucleic Acids Res. Jun. 15, 1997;25(12):2529-31, WO Application 95/00669) or by enzymatic digestion (Xiong Z, Laird P W. COBRA: a sensitive and quantitative DNA methylation assay. Nucleic Acids Res. Jun. 15, 1997;25(12):2532-4). In addition, detection by hybridization has also been described (Olek et al., WO 99/28498).

[0033] Further publications dealing with the use of the bisulfite technique for methylation detection in individual genes are: Grigg G, Clark S. Sequencing 5-methylcytosine residues in genomic DNA. Bioessays. 1994 June;16(6):431-6, 431; Zeschnigk M, Schmitz B, Dittrich B, Buiting K, Horsthemke B, Doerfier W. Imprinted segments in the human genome: different DNA methylation patterns in the Prader-Willi/Angelman syndrome region as determined by the genomic sequencing method. Hum Mol Genet. 1997 March;6(3):387-95; Feil R, Charlton J, Bird A P, Walter J, Reik W. Methylation analysis on individual chromosomes: improved protocol for bisulphite genomic sequencing. Nucleic Acids Res. Feb. 25, 1994;22(4):695-6; Martin V, Ribieras S, Song-Wang X, Rio M C, Dante R. Genomic sequencing indicates a correlation between DNA hypomethylation in the 5′ region of the pS2 gene and its expression in human breast cancer cell lines. Gene. May 19, 1995;157(1-2):261-4; WO 97 46705, WO 95 15373 and WO 45560.

[0034] An overview of the Prior Art in oligomer array manufacturing can be gathered from a special edition of Nature Genetics (Nature Genetics Supplement, Volume 21, January 1999), published in January 1999, and from the literature cited therein.

[0035] Fluorescently labeled probes are often used for the scanning of immobilized DNA arrays. The simple attachment of Cy3 and Cy5 dyes to the 5′-OH of the specific probe are particularly suitable for fluorescence labels. The detection of the fluorescence of the hybridized probes may be carried out, for example via a confocal microscope. Cy3 and Cy5 dyes, besides many others, are commercially available.

[0036] Matrix Assisted Laser Desorption Ionization Mass Spectrometry (MALDI-TOF) is a very efficient development for the analysis of biomolecules (Karas M, Hillenkamp F. Laser desorption ionization of proteins with molecular masses exceeding 10,000 daltons. Anal Chem. Oct. 15, 1988;60(20):2299-301). An analyte is embedded in a light-absorbing matrix. The matrix is evaporated by a short laser pulse thus transporting the analyte molecule into the vapor phase in an unfragmented manner. The analyte is ionized by collisions with matrix molecules. An applied voltage accelerates the ions into a field-free flight tube. Due to their different masses, the ions are accelerated at different rates. Smaller ions reach the detector sooner than bigger ones.

[0037] MALDI-TOF spectrometry is excellently suited to the analysis of peptides and proteins. The analysis of nucleic acids is somewhat more difficult (Gut I G, Beck S. DNA and Matrix Assisted Laser Desorption Ionization Mass Spectrometry. Current Innovations and Future Trends. 1995, 1; 147-57). The sensitivity to nucleic acids is approximately 100 times worse than to peptides and decreases disproportionally with increasing fragment size. For nucleic acids having a multiply negatively charged backbone, the ionization process via the matrix is considerably less efficient. In MALDI-TOF spectrometry, the selection of the matrix plays an eminently important role. For the desorption of peptides, several very efficient matrixes have been found which produce a very fine crystallization. There are now several responsive matrixes for DNA, however, the difference in sensitivity has not been reduced. The difference in sensitivity can be reduced by chemically modifying the DNA in such a manner that it becomes more similar to a peptide. Phosphorothioate nucleic acids in which the usual phosphates of the backbone are substituted with thiophosphates can be converted into a charge-neutral DNA using simple alkylation chemistry (Gut I G, Beck S. A procedure for selective DNA alkylation and detection by mass spectrometry. Nucleic Acids Res. Apr. 25, 1995;23(8):1367-73). The coupling of a charge tag to this modified DNA results in an increase in sensitivity to the same level as that found for peptides. A further advantage of charge tagging is the increased stability of the analysis against impurities which make the detection of unmodified substrates considerably more difficult.

[0038] Genomic DNA is obtained from DNA of cell, tissue or other test samples using standard methods. This standard methodology is found in references such as Fritsch and Maniatis eds., Molecular Cloning: A Laboratory Manual, 1989.

### OBJECT OF THE INVENTION

[0039] In view of the above, it is the object of the present invention to provide the chemically modified DNA of genes associated with the cell cycle, as well as oligonucleotides and/or PNA-oligomers for detecting cytosine methylations, as well as a method which is particularly suitable for the diagnosis and/or therapy of genetic and epigenetic parameters of genes associated with the cell cycle. The present invention is based on the discovery that genetic and epigenetic parameters and, in particular, the cytosine methylation pattern of genes associated with cell cycle are particularly suitable for the diagnosis and/or therapy of diseases associated with the cell cycle.

[0040] This objective is achieved according to the present invention by providing a nucleic acid containing a sequence of at least 18 bases in length of the chemically pretreated DNA of genes associated with cell cycle according to one of Seq. ID No.1 through Seq. ID No.424 and sequences complementary thereto and/or of the chemically pretreated DNA of genes associated with cell cycle according to one of the sequences of the genes listed in table 1. In the table, after the listed gene designations, the respective data bank numbers (accession numbers) are specified which define the appertaining gene sequences as unique. GenBank at the National Institute of Health was used as the underlying data bank at the Internet-address www.ncbi.nlm.nih.gov.

[0041] The chemically modified nucleic acid could heretofore not be connected with the ascertainment of genetic and epigenetic parameters.

[0042] The object of the present invention is further achieved by an oligonucleotide or oligomer for detecting the cytosine methylation state in chemically pretreated DNA, containing at least one base sequence having a length of at least 13 nucleotides which hybridizes to a chemically pretreated DNA of genes associated with the cell cycle according to Seq. ID No.1 through Seq. ID No.424 and sequences complementary thereto and/or of the chemically pretreated DNA of genes associated with cell cycle according to one of the sequences of the genes listed in table 1. The oligomer probes according to the present invention constitute important and effective tools which, for the first time, make it possible to ascertain the genetic and epigenetic parameters of genes associated with the cell cycle. The base sequence of the oligomers preferably contains at least one CpG dinucleotide. The probes may also exist in the form of a PNA (peptide nucleic acid) which has particularly preferred pairing properties. Particularly preferred are oligonucleotides according to the present invention in which the cytosine of the CpG dinucleotide is the 5^{th}-9^{th} nucleotide from the 5′-end of the 13-mer; in the case of PNA-oligomers, it is preferred for the cytosine of the CpG dinucleotide to be the 4^{th} ₆th nucleotide from the 5′-end of the 9-mer.

[0043] The oligomers according to the present invention are normally used in so called “sets” which contain at least one oligomer for each of the CpG dinucleotides of the sequences of Seq. ID No.1 through Seq. ID No.424 and sequences complementary thereto and/or of the chemically pretreated DNA of genes associated with cell cycle according to one of the sequences of the genes listed in table 1. Preferred is a set which contains at least one oligomer for each of the CpG dinucleotides from one of Seq. ID No.1 through Seq. ID No.424 and sequences complementary thereto and/or of the chemically pretreated DNA of genes associated with cell cycle according to one of the sequences of the genes listed in table 1.

[0044] Moreover, the present invention makes available a set of at least two oligonucleotides which can be used as so-called “primer oligonucleotides” for amplifying DNA sequences of one of Seq. ID No.1 through Seq. ID No.424 and sequences complementary thereto and/or of the chemically pretreated DNA of genes associated with cell cycle according to one of the sequences of the genes listed in table 1, or segments thereof.

[0045] In the case of the sets of oligonucleotides according to the present invention, it is preferred that at least one oligonucleotide is bound to a solid phase.

[0046] The present invention moreover relates to a set of at least 10 n (oligonucleotides and/or PNA-oligomers) used for detecting the cytosine methylation state in chemically pretreated genomic DNA (Seq. ID No.1 through Seq. ID No.424 and sequences complementary thereto and/or of the chemically pretreated DNA of genes associated with cell cycle according to one of the sequences of the genes listed in table 1). These probes enable diagnosis and/or therapy of genetic and epigenetic parameters of genes associated with the cell cycle. The set of oligomers may also be used for detecting single nucleotide polymorphisms (SNPs) in the chemically pretreated DNA of genes associated with the cell cycle according to one of Seq. ID No.1 through Seq. ID No.424 and sequences complementary thereto and/or of the chemically pretreated DNA of genes associated with cell cycle according to one of the sequences of the genes listed in table 1.

[0047] According to the present invention, it is preferred that an arrangement of different oligonucleotides and/or PNA-oligomers (a so-called “array”) made available by the present invention is present in a manner that it is likewise bound to a solid phase. This array of different oligonucleotide-and/or PNA-oligomer sequences can be characterized in that it is arranged on the solid phase in the form of a rectangular or hexagonal lattice. The solid phase surface is preferably composed of silicon, glass, polystyrene, aluminum, steel, iron, copper, nickel, silver, or gold. However, nitrocellulose as well as plastics such as nylon which can exist in the form of pellets or also as resin matrices are possible as well.

[0048] Therefore, a further subject matter of the present invention is a method for manufacturing an array fixed to a carrier material for analysis in connection with diseases associated with the cell cycle in which method at least one oligomer according to the present invention is coupled to a solid phase. Methods for manufacturing such arrays are known, for example, from U.S. Pat. No. 5,744,305 by means of solid-phase chemistry and photolabile protecting groups.

[0049] A further subject matter of the present invention relates to a DNA chip for the analysis of diseases associated with the cell cycle which contains at least one nucleic acid according to the present invention. DNA chips are known, for example, from U.S. Pat. No. 5,837,832.

[0050] Moreover, a subject matter of the present invention is a kit which may be composed, for example, of a bisulfite-containing reagent, a set of primer oligonucleotides containing at least two oligonucleotides whose sequences in each case correspond or are complementary to an 18 base long segment of the base sequences specified in the appendix (Seq. ID No.1 through Seq. ID No.424 and sequences complementary thereto and/or of the chemically pretreated DNA of genes associated with cell cycle according to one of the sequences of the genes listed in table 1), oligonucleotides and/or PNA-oligomers as well as instructions for carrying out and evaluating the described method. However, a kit along the lines of the present invention can also contain only part of the aforementioned components.

[0051] The present invention also makes available a method for ascertaining genetic and/or epigenetic parameters of genes associated with the cycle cell by analyzing cytosine methylations and single nucleotide polymorphisms, including the following steps:

[0052] In the first step of the method, a genomic DNA sample is chemically treated in such a manner that cytosine bases which are unmethylated at the 5′-position are converted to uracil, thymine, or another base which is dissimilar to cytosine in terms of hybridization behavior. This will be understood as ‘chemical pretreatment’ hereinafter.

[0053] The genomic DNA to be analyzed is preferably obtained form usual sources of DNA such as cells or cell components, for example, cell lines, biopsies, blood, sputum, stool, urine, cerebral-spinal fluid, tissue embedded in paraffin such as tissue from eyes, intestine, kidney, brain, heart, prostate, lung, breast or liver, histologic object slides, or combinations thereof.

[0054] The above described treatment of genomic DNA is preferably carried out with bisulfite (hydrogen sulfite, disulfite) and subsequent alkaline hydrolysis which results in a conversion of non-methylated cytosine nucleobases to uracil or to another base which is dissimilar to cytosine in terms of base pairing behavior.

[0055] Fragments of the chemically pretreated DNA are amplified, using sets of primer oligonucleotides according to the present invention, and a, preferably heat-stable polymerase. Because of statistical and practical considerations, preferably more than ten different fragments having a length of 100-2000 base pairs are amplified. The amplification of several DNA segments can be carried out simultaneously in one and the same reaction vessel. Usually, the amplification is carried out by means of a polymerase chain reaction (PCR).

[0056] In a preferred embodiment of the method, the set of primer oligonucleotides includes at least two olignonucleotides whose sequences are each reverse complementary or identical to an at least 18 base-pair long segment of the base sequences specified in the appendix (Seq. ID No. 1 through Seq. ID No.424 and sequences complementary thereto and/or of the chemically pretreated DNA of genes associated with cell cycle according to one of the sequences of the genes listed in table 1). The primer oligonucleotides are preferably characterized in that they do not contain any CpG dinucleotides.

[0057] According to the present invention, it is preferred that at least one primer oligonucleotide is bonded to a solid phase during amplification. The different oligonucleotide and/or PNA-oligomer sequences can be arranged on a plane solid phase in the form of a rectangular or hexagonal lattice, the solid phase surface preferably being composed of silicon, glass, polystyrene, aluminum, steel, iron, copper, nickel, silver, or gold, it being possible for other materials such as nitrocellulose or plastics to be used as well.

[0058] The fragments obtained by means of the amplification can carry a directly or indirectly detectable label. Preferred are labels in the form of fluorescence labels, radionuclides, or detachable molecule fragments having a typical mass which can be detected in a mass spectrometer, it being preferred that the fragments that are produced have a single positive or negative net charge for better detectability in the mass spectrometer. The detection may be carried out and visualized by means of matrix assisted laser desorption/ionization mass spectrometry (MALDI) or using electron spray mass spectrometry (ESI).

[0059] The amplificates obtained in the second step of the method are subsequently hybridized to an array or a set of oligonucleotides and/or PNA probes. In this context, the hybridization takes place in the manner described in the following. The set of probes used during the hybridization is preferably composed of at least 10 oligonucleotides or PNA-oligomers. In the process, the amplificates serve as probes which hybridize to oligonucleotides previously bonded to a solid phase. The non-hybridized fragments are subsequently removed. Said oligonucleotides contain at least one base sequence having a length of 13 nucleotides which is reverse complementary or identical to a segment of the base sequences specified in the appendix, the segment containing at least one CpG dinucleotide. The cytosine of the CpG dinucleotide is the 5^{th} to 9^{th} nucleotide from the 5′-end of the 13-mer. One oligonucleotide exists for each CpG dinucleotide. Said PNA-oligomers contain at least one base sequence having a length of 9 nucleotides which is reverse complementary or identical to a segment of the base sequences specified in the appendix, the segment containing at least one CpG dinucleotide. The cytosine of the CpG dinucleotide is the 4^{th} to 6^{th} nucleotide seen from the 5′-end of the 9-mer. One oligonucleotide exists for each CpG dinucleotide.

[0060] In the fourth step of the method, the non-hybridized amplificates are removed.

[0061] In the final step of the method, the hybridized amplificates are detected. In this context, it is preferred that labels attached to the amplificates are identifiable at each position of the solid phase at which an oligonucleotide sequence is located.

[0062] According to the present invention, it is preferred that the labels of the amplificates are fluorescence labels, radionuclides, or detachable molecule fragments having a typical mass which can be detected in a mass spectrometer. The mass spectrometer is preferred for the detection of the amplificates, fragments of the amplificates or of probes which are complementary to the amplificates, it being possible for the detection to be carried out and visualized by means of matrix assisted laser desorption/ionization mass spectrometry (MALDI) or using electron spray mass spectrometry (ESI).

[0063] The produced fragments may have a single positive or negative net charge for better detectability in the mass spectrometer. The aforementioned method is preferably used for ascertaining genetic and/or epigenetic parameters of genes associated with the cell cycle.

[0064] The oligomers according to the present invention or arrays thereof as well as a kit according to the present invention are intended to be used for the diagnosis and/or therapy of diseases associated with the cell cycle by analyzing methylation patterns of genes associated with the cell cycle. According to the present invention, the method is preferably used for the diagnosis and/or therapy of important genetic and/or epigenetic parameters within genes associated with cell cycle.

[0065] The method according to the present invention is used, for example, for the diagnosis and/or therapy of HIV infection, neurodegenerative disorders, graft-versus-host disease, aging, glomerular disease, Lewy body disease, arthritis, arteriosclerosis, solid tumors and cancers.

[0066] The nucleic acids according to the present invention of Seq. ID No.1 through Seq. ID No.424 and sequences complementary thereto and/or of the chemically pretreated DNA of genes associated with cell cycle according to one of the sequences of the genes listed in table 1 can be used for the diagnosis and/or therapy of genetic and/or epigenetic parameters of genes associated with the cell cycle.

[0067] The present invention moreover relates to a method for manufacturing a diagnostic agent and/or therapeutic agent for the diagnosis and/or therapy of diseases associated with the cell cycle by analyzing methylation patterns of genes associated with the cell cycle, the diagnostic agent and/or therapeutic agent being characterized in that at least one nucleic acid according to the present invention is used for manufacturing it, possibly together with suitable additives and auxiliary agents.

[0068] A further subject matter of the present invention relates to a diagnostic agent and/or therapeutic agent for diseases associated with the cell cycle by analyzing methylation patterns of genes associated with the cell cycle, the diagnostic agent and/or therapeutic agent containing at least one nucleic acid according to the present invention, possibly together with suitable additives and auxiliary agents.

[0069] The present invention moreover relates to the diagnosis and/or prognosis of events which are disadvantageous to patients or individuals in which important genetic and/or epigenetic parameters within genes associated with the cell cycle said parameters obtained by means of the present invention may be compared to another set of genetic and/or epigenetic parameters, the differences serving as the basis for a diagnosis and/or prognosis of events which are disadvantageous to patients or individuals.

[0070] In the context of the present invention the term “hybridization” is to be understood as a bond of an oligonucleotide to a completely complementary sequence along the lines of the Watson-Crick base pairings in the sample DNA, forming a duplex structure. To be understood by “stringent hybridization conditions” are those conditions in which a hybridization is carried out at 60° C. in 2.5×SSC buffer, followed by several washing steps at 37° C. in a low buffer concentration, and remains stable.

[0071] The term “functional variants” denotes all DNA sequences which are complementary to a DNA sequence, and which hybridize to the reference sequence under stringent conditions and have an activity similar to the corresponding polypeptide according to the present invention.

[0072] In the context of the present invention, “genetic parameters” are mutations and polymorphisms of genes associated with cell cycle and sequences further required for their regulation. To be designated as mutations are, in particular, insertions, deletions, point mutations, inversions and polymorphisms and, particularly preferred, SNPs (single nucleotide polymorphisms).

[0073] In the context of the present invention, “epigenetic parameters” are, in particular, cytosine methylations and further chemical modifications of DNA bases of genes associated with the cell cycle and sequences further required for their regulation. Further epigenetic parameters include, for example, the acetylation of histones which, however, cannot be directly analyzed using the described method but which, in turn, correlates with the DNA methylation.

[0074] In the following, the present invention will be explained in greater detail on the basis of the sequences and examples and the accompanying figure without being limited thereto.

[0075] FIG. 1

[0076] FIG. 1 shows the hybridisation of fluorescent labelled amplificates to a surface bound olignonucleotide. Sample I being from healthy brain tissue and sample 11 being from pilocytic astrocytoma grade II (brain tumor) tissue. Flourescence at a spot shows hybridisation of the amplificate to the olignonucleotide. Hybridisation to a CG olignonucleotide denotes methylation at the cytosine position being analysed, hybridisation to a TG olignonucleotide denotes no methylation at the cytosine position being analysed. It can be seen that Sample I was unmethylated at position 156 of the amplificate whereas in comparison Sample II had a higher degree of methylation at the same position.

[0077] Sequence ID Nos. 1 to 424

[0078] Sequence ID Nos. 1 to 424 show sequences of the chemically pretreated genomic DNAs of different genes associated with cell cycle. In particular, sequences having odd sequence numbers (e.g., Seq. ID No. 1, 3, 5, . . . ) exhibit in each case sequences of the chemically pretreated genomic DNAs of different genes associated with cell cycle. Sequences having even sequence numbers (e.g., Seq. ID No. 2, 4, 6, . . . ) exhibit in each case the sequences of the chemically pretreated genomic DNAs of genes associated with cell cycle which are complementary to the proceeding sequences (e.g., the complementary sequence to Seq. ID No.1 is Seq. ID No.2, the complementary sequence to Seq. ID No.3 is Seq. ID No.4, etc.)

[0079] Seq. ID No. 425 to Seq. ID No. 428 show specific oligonucleotide sequences as used in Example 1.

[0080] The following example relates to a fragment of a gene associated with cell cycle, in this case, CDK4 in which a specific CG-position is analyzed for its methylation status.

### EXAMPLE 1

### Methylation Analysis in the Gene CDK4 Associated with the Cell Cycle.

[0081] The following example relates to a fragment of the gene cytosine dependant kinase 4 (CDK4) in which a specific CG-position is to be analyzed for methylation.

[0082] In the first step, a genomic sequence is treated using bisulfite (hydrogen sulfite, disulfite) in such a manner that all cytosines which are not methylated at the 5-position of the base are modified in such a manner that a different base is substituted with regard to the base pairing behavior while the cytosines methylated at the 5-position remain unchanged.

[0083] If bisulfite solution is used for the reaction, then an addition takes place at the non-methylated cytosine bases. Moreover, a denaturating reagent or solvent as well as a radical interceptor is present. A subsequent alkaline hydrolysis then gives rise to the conversion of non-methylated cytosine nucleobases to uracil. Chemically converted DNA is then used for the detection of methylated cytosines. In the second method step, the treated DNA sample is diluted with water or an aqueous solution. Preferably, the DNA is subsequently desulfonated (10-30 min, 90-100° C.) at an alkaline pH value. In the third step of the method, the DNA sample is amplified in a polymerase chain reaction, preferably using a heat-resistant DNA polymerase. In the present case, cytosines of the gene CDK4 are analyzed. To this end, a defined fragment having a length of 474 bp is amplified with the specific primer oligonucleotides AAAAATAACACAATAACTCA (Seq. ID No. 425) and TTTTGGTAGTTGGTTATATG (Seq. ID No. 426). This amplificate serves as a sample which hybridizes to an oligonucleotide previously bonded to a solid phase, forming a duplex structure, for example GGGTTGGCGTGAGGTA (Seq. ID No. 427), the cytosine to be detected being located at position 179 of the amplificate. The detection of the hybridization product is based on Cy3 and Cy5 flourescently labeled primer oligonucleotides which have been used for the amplification. The hybridization reaction of the amplified DNA with the oligonucleotide takes place only if a methylated cytosine was present at this location in the bisulfite treated DNA. Thus, the methylation status of the specific cytosine to be analyzed may be inferred from the hybridization product.

[0084] In order to verify the methylation status of the position, a sample of the amplificate is further hybridized to another oligonucleotide previously bonded to a solid phase. Said olignonucleotide is identical to the oligonucleotide previously used to analyze the methylation status of the sample, with the exception of the position in question. At the position to be analysed said oligonucleotide comprises a thymine base as opposed to a cytosine base i.e. sequence GGGTTGGTGTGAGGTA (Seq. ID No. 428). Therefore, the hybridisation reaction only takes place if an unmethylated cytosine is present at the position to be analysed. The analysis was carried out on two tissue samples, Sample 1 from healthy brain tissue, and Sample 2 from pilocytic astrocytoma (brain tumor) tissue. From the results (FIG. 1) it can be seen that Sample I was unmethylated at position 156 of the amplificate whereas in comparison Sample 2 had a higher degree of methylation at the same position.

### EXAMPLE 2

### Diagnosis of Diseases Associated with the Cell Cycle

[0085] In order to relate the methylation patterns to one of the diseases associated with the cell cycle, it is initially required to analyze the DNA methylation patterns of a group of diseased and of a group of healthy patients. These analyses are carried out, for example, analogously to example 1. The results obtained in this manner are stored in a database and the CpG dinucleotides which are methylated differently between the two groups are identified. This can be carried out by determining individual CpG methylation rates as can be done, for example, in a relatively imprecise manner, by sequencing or else, in a very precise manner, by a methylation-sensitive “primer extension reaction”. It is also possible for the entire methylation status to be analyzed simultaneously, and for the patterns to be compared, for example, by clustering analyses which can be carried out, for example, by a computer.

[0086] Subsequently, it is possible to allocate the examined patients to a specific therapy group and to treat these patients selectively with an individualized therapy.

[0087] Example 2 can be carried out, for example, for the following diseases: HIV infection, neurodegenerative disorders, graft-versus-host disease, aging, glomerular disease, Lewy body disease, arthirits, arteroscierosis, solid tumors and cancers.

TABLE 1
Listing of particularly preferred genes of the present invention
associated with the cell cycle.

| | Database Entry No. |
|---|---|
| Gene | (GenBank at www.ncbi.nlm.nih.gov) |
| CCNB1 | (M25753) |
| CCNE1 | (M73812); (M74093) |
| DENR | (O43583) |
| EPHA5 | (L36644) |
| MCM4 | (X74794) |
| NEK3 | (Z29067) |
| PCTK3 | (X66362) |
| PRKAR1B | (M65066) |
| PRKCG | (M13977); (Z15114) |
| PRKM3 | (M84490); (Z11696) |
| PRKMK2 | (L11285) |
| ZAP70 | (L05148) |
| ACP1 | (NM_004300) |
| AKT1 | (NM_005163) |
| BMPR2 | (NM_001204) |
| DDR1 | (NM_013993) |
| CCND3 | (NM_001760) |
| CHES1 | (NM_005197) |
| CLK3 | (NM_003992) |
| DYRK1 | (NM_001396) |
| EFNA1 | (NM_004428) |
| IFIT1 | (NM_001548) |
| SCYB10 | (NM_001565) |
| INPP5D | (NM_005541) |
| ISG20 | (NM_002201) |
| LY6E | (NM_002346) |
| PCNA | (NM_002592) |
| PIK3CA | (NM_006218) |
| PPP1R3 | (NM_002711) |
| PTPN7 | (NM_002832) |
| PTPN9 | (NM_002833) |
| RHOK | (NM_002929) |
| RYK | (NM_002958) |
| EPHB3 | (NM_004443) |
| PPP3CA | (NM_000944) |
| PRKCA | (NM_002737) |
| PRKG1 | (NM_006258) |
| MAPK10 | (NM_002753) |
| MAPK6 | (NM_002748) |
| PTPRC | (NM_002838) |
| PTPRD | (NM_002839) |
| PTPRG | (NM_002841) |
| RBL1 | (NM_002895) |
| STK3 | (NM_006281) |
| TGFB1 | (NM_000358) |

The application's sequence listing, which the Patent Office published only in electronic form, follows.

SEQUENCE LISTING (428 sequences)

SEQ ID NO: 1 - DNA, 6261 bp, Artificial Sequence
  chemically treated genomic DNA (Homo sapiens)
aatggaaaattaaggtggatattgaaaagtatattataaatggtaatggggtcgggcgtggtggtttataatagtaattttagtattttgtgggggtaggtggattatttgtagttaggagttcgagattagtttggttaatatgatataatttcgtgtttattaaaaatataaaaattagttaagtatggtggtatgtatttgtggttttagttatttgggaggttgaggtttaagaattgtttgaatttgggaggtggaggttgtaatgagtataggttgtattattgtattttagtttgagtgatagaacgagattttgtaaataaataaatagtattggaagtagaagagaaatgggaaatgaaagttaaatggaaagttcggtatattgataaaattttaaataaatatttgttggatttagttaggtttaagaaagaagttgaggtcgggtatagtgtttgaagttaggagtttgagattagtttggttaatatggtgaaatttcgtttttattaaaaatataaaaaaattagttgggtatggtggtgggcgtttgtaattttagttatttgggaggttgaggaaggagaatcgtttgaatttaggaggcggagattttagtgagttaagattacgttattgtattttagtttgggtaagaagagcgaaatttttttttaaaataataataataataaaaaagaagttgaaatgtatatgaatttagttttattgagtagttgggatgataggtagtattgtatattacgttcggttaattttttgtatttttggtagagatggggttttattatgttagttaggatggtttcgattttttgattttgtgattcgtttattttggttttttaaagtgttgggattataggcgtgagttattgcgtttggtttaggaagtatgttttaatatattagaattttttgaaagaaatggatatttttattggaattattgtagagaggattttagattagtttatatgatttttaagtttttttttaattttatgatatttgagttatgtgttaaaataaaatagttcgggtgcggtggtttacgtttgtaattttagtattttgggaggttaaggtagatggattataaggtgaggagtttaagattagtttggttaatacggtgaaattttattttttttaaaaaataaaaaattagtcgggtgtagtggtggtcgtttgtagttttagttattcgggaggttgaggtaggagaatggtgtgaattcgggaggcggagtttgtagtgagtcgagatcgcgttattgtattttagtttgggggatagagcgagattttatattaaaaataaaaaataaaaaataaaaaattatatttgagggatgtagaggaaggtaagtaaattttataacgaaagaattattattagttgtggttaaggtttgtattgaatagagttcgaggaaattgttaggtttgtattaataagtttgaggtttttttattaaggaggtaggatttgaatagaatattgaagaggatagtagaattttgtaagggagttattcgagatttatattagggagaatataattattgtaaaatttatagttaaaagggatatattttagaaataggttaattggataaagtatgtatgtttgttataggaaaggtggaggttggaggaataggagatggaagaatattaggtaattataatttagttattttggaaaataatttcgaaatattaggtgaaacgtttattttgtttatttatttatttatttatttatttatttatttatttttgagatagagattttttttgttatttaggttggggtgtagtggcgtaattttttgttattgtaattttcgttttttgggtttaagtaattcgtttgttttaggttttttagtagttgggattataggtacgcgtttttacgattggttagtttttgtatttttagtagagacggggttttattatgttggtttgattggttttaaatttttgattttaagtgattcgtttattttggttttttaaagtgttgggattataaatatgagttattgtgttcggtttattaggtgaaaattttagatttaagattttgtatataatgaatgagagggagagtgtggttaaagtaatgagagaagtagtttttgtgagtgagttgtttggtgttaaaggtgaggaatttttatgaagaaagggttagtagcgggagaaattagcgtagagatgtttaagttaatattgtgttttatataacgttgtttatatagatgaagggaagaggtagatatgagagatattgtaaaattgtaaaaagtatggtaatagtttagaaatgtagattggtgaagttagggattggtgaggtattatttataagttttttttttttggagagagtggtgttgtttttgtgataaggatgatgaggatgaagagtatttgtgtttttagtacgttttattgttgttggtgatgtgtttgattttttatgttggtttttggttattgtttaaatttatatatatatatatatatatataaaatttgaaaaagttaggtttgtaaaatttaaaattattatgttttttatattaatagtatatgtatatatgatattagttatatgttaaatattgttttaagtattatatatatatattgattaatttaatttttataatatttttataaggtagatattatttgttattattattagtttatagataatgtattgagatataaaaaggttatgtattttgtttagattaaatagtttataagtattagggttaagttatgaatttaagtagtttggttttagagtttttgtttttagttattgtattttattgtaggttgagtagtttttattagaaatgttcggattataagtgttttagatttgggaatatttatatatatataatgcgatattttgggtatgcgatttaagtttaaatataaaatttatttatgttttatatatatttttatatatatagtttgaatgtaatttaatataatattttaaaaattttgtgtatgaaataaagtttatgttaagtatttacgtgaaatgttttatttttggtattatattggtgtttaaaaaatttcgaattttgtagtattttggatttttagatttgagatgtttaatttatatatttatttatttttatatagtatgtatgaattagtagagaaattaaattattatttttaaattaaaatttttttttataataaaaattaaatagtaaattaaatttcggttttgtgatatttttatttttttcgaatgaattttttttagtagttgtaaatattgggaattagaagaaaagataggtattttaaatatagggaaattttaatttaaatggaaagtttatattttatttagtgtttatatatagtgttttcgtttttattttggagttaattttagttatttttggttatattttagatggtaatggaataattttatagtgtttttataataggtaatatttacgttagtggatggtttatttaaggttaatttggtttaggaaagatatgtaaaggagagttttatttatttttttttttaattttatatttttagtggttgttttgttttttttttgtagtggttttcgttttgtttaatttaagtaaaattttagtgtagtatttttattaattgatattttttataaagtaaattgggaagttaaaagaataataggagaatgattaagatttttgagaattaaaaaaaattgaattaagatgtaagtaaatatagtgggagagggggatggcgagttaattgtatatagtatatgtgtatgtataaaacgttttttttttgttttatttattttttttagattgtataagttaaaatgagtaagttttgatttagaaatagggttaaagatatatatttttttttttttgttattaaaagaagatttgattacgtgtatagtgtataaaggatgttagtgggaagattaattttattgttaggtattgtaaggaaatagaaatttatatatggtgagatggtaaaggagtttaagaggaatttatggtaatataatatgaggaatggggttataattgcgtttttaatgagattatagaaggtatataatttaggttagtgcgatttaatattatgaaataatttttaaaaattaaaattaaataaggtagtattttattttttttttgtaaattttatattattttaatttttattggaggtttgttgttgataagggtgtttaaaagagatttttttgggtattttagagttttttaattggatggtaaggattaaataaatgttttgtgtttttttgttttatttgtgtttgtatttgagttgcgtacgcggtggtattgagttttcgatttatttatttgataggtggaggtgggatggggaaggtcggagatcgattaattttaaaggcggtagcgtgtggagtcgaacgcgggagggggtcggtcgaggcggattgaggggggggacgtcgaggtgcggcgataggacgcggaggacgaaagattttaagtagcggtggtcggtaaatgaggtgggtattgggggatttattttgcgaggaggcgggggcggggacggggggcgcggcgcggtagggcggggcggtagtcgggaagtttttttttttcgcggcggaggtgattgtcgggcggggggcggggggcggggggcgggagacgttttgttttacgtttttttagcgttcggtggtttaaagatggcggcggcggtggcggcggcggcggcggcggcggcggcgttgggggcgcggagtcgcgataggaggagggaaaagtagaatttgtgagtcgtttggaggtagcgcggcggttgtcgtgaggaggtcgggtgcggagtcgtcggtggtttagtcgtttagggttagggtttgggttgggagggagagatcggagtagcgttaggagttcgaggtcggagtcgaggaggaatgtgattaggggtcggcgggggcgcgggagtacgcgagagtagggatggggtagtaggtgggtcgcgtcggggaagtttcggggttttagtagttttagtttcgcgggattcggggtagtagtgtagttaggtttttcggtcgtaggcgggattcggcggggcgtattatagagatcggttttaatatttttatttagtatggtgagtgtgtttgggagtcggtatgagagcgtgggggaggtcgggggtggggtcggggcggggtgggtggcggacgggttgttcgaggggtcggagggtggaaggtgtttgagagtgggggcggaattcgttgttatttggtttagttttgggaggcgagttatattttttttttttcgcgtttttagtttggttggtagatttcgggggcggagaaggaaagagaagtgggtttggggattttggatggtttgttttttattttgggacgggattatgcggttgtagaaagaaagtgaatggtagttttaggagagggaaggatgaagggtagtattagtttagttttagaggtgggagtataaattcgtcgttagtgaaggggaaatgggttgtattttaagggattgggaaatgggaattgaattttaggagattgtggagtataaggtatgtgtttacgttaggtgatgagtagtgttaggatagtgaattgtggatagtgttaaatgtttttttgtagggaagatgaagttagtattattttattatttttgatatgtttttgtggtttattttgttttgtatttcgttttttattagaaatgaaaggttttgttaaagtttttgtattatgttttagagtaggatatataattttgagattgttggtaagggttagaggttggtgggtatggttaggacgttagttaggatatgaataagtttttttttgtagtgtgtgcgtgtgtttatatatatatatatatgtatgtatgttttttgtagtttgaaatttattattttgattttattgttaatgtatttttagaatagttgtttttaaattttttttgttttgtttttttgttttgtttttgtttttgttttttttgagatagagtttcgttttggtttttatgatggagtgtaatggcgggatgtcggtttattgtaatttttgtttttcgggtttaagtgatttttttgttttagtttt

SEQ ID NO: 2 - DNA, 6261 bp, Artificial Sequence
  chemically treated genomic DNA (Homo sapiens)
gaggttgaggtaggagaattatttgaattcgggaggtagagattgtagtgagtcgatatttcgttattgtattttattatggggattaaagcgagattttgttttaaaaaaaataaaaataaaaataaaataaaaaaataagataaaaaaagtttggagataattattttaaaaatatattgataatgagattaaaataataggttttagattatagggagtatatatatatgtatgtatgtatatgggtatacgtatatattataaaggaaaatttgtttatattttgattgacgttttaattatgtttattaatttttagtttttgttagtaattttagaattgtgtgttttattttgaagtatagtatagaggttttggtaaagttttttatttttagtaagaaacgaaatataaaataaaataaattataaaagtatgttaaaagtgataagatgatgttaattttattttttttatagaaaagtatttgatattgtttatagtttattattttgatattgtttattatttaacgtaaatatatattttgtattttataattttttgaaatttagtttttattttttaattttttaggatataatttattttttttttattaacgacgggtttatgtttttatttttgggattgagttaatattgttttttattttttttttttttgaagttgttatttattttttttttgtagtcgtatagtttcgttttagagtagaggatagattatttagggtttttaaatttattttttttttttttttcgttttcgggatttgttagttaggttagagacgcgaggggggaggggtgtgattcgttttttaggattggattagatggtagcggatttcgtttttatttttaggtattttttatttttcgatttttcgggtagttcgttcgttatttatttcgtttcgattttattttcggttttttttacgtttttatgtcggtttttagatatatttattatgttgggtgaagatattgaagtcggtttttgtggtgcgtttcgtcgggtttcgtttgcggtcggagggtttggttgtattgttgtttcggatttcgcggggttgaggttgttggagtttcggagttttttcgacgcggtttatttgttgttttatttttgttttcgcgtattttcgcgttttcgtcgatttttggttatattttttttcggtttcggtttcgggtttttggcgttgtttcggttttttttttttagtttaggttttggttttgagcggttgggttatcggcggtttcgtattcggtttttttacggtagtcgtcgcgttgtttttaggcgatttatagattttgtttttttttttttttgtcgcggtttcgcgtttttaacgtcgtcgtcgtcgtcgtcgtcgtcgttatcgtcgtcgttatttttaaattatcgagcgttgggaaagcgtgggatagagcgtttttcgtttttcgtttttcgtttttcgttcggtagttattttcgtcgcggggaaggagggtttttcggttgtcgtttcgttttgtcgcgtcgcgtttttcgttttcgttttcgttttttcgtagggtgggttttttagtgtttattttatttgtcggttatcgttgtttgaggtttttcgtttttcgcgttttgtcgtcgtatttcggcgtttttttttttaattcgtttcggtcgattttttttcgcgttcggttttatacgttatcgtttttggggttggtcggttttcggttttttttattttatttttatttgttaaatgagtgagtcgagggtttagtgttatcgcgtgcgtagtttaggtgtaggtataggtggggtagaaaagtataaggtatttatttggtttttgttatttagttaaggagttttaaaatatttagggggattttttttaaatatttttgttagtagtaggtttttagtaaaaattaaaatggtataaaatttataagaagagagtaaaatgttattttatttgattttaatttttggagattattttatgatgttaaatcgtattggtttggattgtgtgttttttatagttttattggggacgtaattgtagttttattttttatattatattattatgaattttttttgaatttttttattattttattatatgtgagtttttgtttttttataatgtttgatagtaaagttaatttttttattggtattttttatatattgtgtacgtggttaggtttttttttgatgataaaggagaaaaaatgtatatttttgattttgtttttgagttagaatttatttattttagtttatgtagtttaaagagagtgaatgaggtagaaaagaagcgttttatatatatatatatattatatataattgattcgttattttttttttttattgtgtttatttgtattttaatttaattttttttaatttttaaaaattttgattatttttttgttatttttttggttttttaatttgttttataaaaagtattagttaatggaggtattatattgaaattttgtttaaattagataggacgggagttattgtaaagaaggaataaaataattattggaaatgtagggttgggagaagaggtggatgaagtttttttttgtatattttttttgaattaggttgattttagatgaattatttattgacgtagatattgtttgttgtaaaagtattatgaaattattttattgttatttagggtgtagttagaaataattgaaattaattttaaaatgggaacggaaatattatgtgtaaatattggataaaatatgaattttttatttggattaaagtttttttgtgtttaaaatatttgtttttttttttaatttttagtgtttgtaattattgaaaaaaatttattcgaaagggataaagatgttatagagtcggaatttggtttattgtttgatttttattatgggagaaaattttaatttggggataatggtttggtttttttgttaatttatgtatattatataaagatagatgaatatatgggttgaatattttaaatttgaaaatttaaaatgttgtaaaattcgaaattttttgagtattaatatgatgttagaggtggaatattttacgtaagtatttaatataaattttgttttatgtataaaatttttaaaatattgtattaaattgtatttaagttatgtgtataaaggtgtatatgaaatataaatgaattttgtgtttagatttgggtcgtatgtttaagatatcgtattatgtgtgtgtaaatatttttaaatttgaaatatttgtggttcgaatatttttgataagggttgtttagtttgtagtagagtgtagtggttaagggtaggggttttgaagttagattgtttgggtttataatttggttttgatatttatggattatttgatttgggtaaagtatataatttttttgtgttttagtatattatttgtaaattgatgatgataataaatagtatttattttataggaatattgtgaaaattaaattagttaatatatatgtatagtatttaaaatagtatttggtatataattggtgttatatatgtatatattattaatataaaaaatataatggttttaggttttataagtttaatttttttaaattttatatatatatatatatatatataaatttgagtaatggttagaggttagtataaaagattagatatattattaatagtagtaaggcgtgttgaagatatagatattttttatttttattatttttattataggagtaatattattttttttagaaggaaggagtttgtgagtaatgttttattaatttttgattttattagtttgtatttttaggttattgttatattttttatagttttatagtattttttatatttattttttttttttatttatataaatagcgttatgtaagatatagtgttagtttaggtatttttgcgttggtttttttcgttattagttttttttttatagagattttttatttttagtattaagtaatttatttatagaaattgttttttttattgttttgattatatttttttttttatttattatgtataaagttttaagtttaaaatttttatttaatgggtcgggtatagtggtttatgtttgtaattttagtattttgggaggttaaggtgggcggattatttgaggttaggagtttgagattagttaggttaatatggtgaaatttcgtttttattaaaaatgtaaaaattagttaatcgtgggggcgcgtgtttgtaattttagttattggggaatttgaggtaggcgaattgtttgagtttaggaggcggaagttgtagtgataggagattgcgttattgtattttagtttaggtgatagagggagtttttgttttaaaaataaataaataaataaataaataaataaataaataaataaaataaacgttttatttagtgtttcgaagttattttttaggataattggattataattgtttaatgtttttttattttttgtttttttaatttttattttttttatggtaggtatatatattttatttaattagtttatttttgagatgtattttttttagttatgagttttgtaataattatattttttttaatataagtttcgagtgatttttttataggattttattgttttttttagtattttatttagattttgtttttttgataagagaattttagatttattaatatagatttaatagttttttcggattttatttagtataggttttaattataattggtaataattttttcgttataaaatttgtttatttttttttatattttttaaatatggttttttgttttttgttttttgtttttgatatggagtttcgttttgttttttaggttggagtgtagtggcgcgatttcggtttattgtaagtttcgtttttcgggtttatattatttttttgttttagtttttcgagtagttgggattataggcgattattattatattcggttaattttttgttttttagaagagatgggattttatcgtgttagttaggttggttttgaattttttattttgtgatttatttgttttggttttttaaagtgttgggattataggcgtgagttatcgtattcgaattgttttgttttgatatatgatttaagtgttatagagttggaaagaaatttagaggttatgtaggttaatttggaattttttttgtagtaattttagtgagggtatttattttttttaaaaggttttaatatattaaaatatattttttgggttaggcgtagtggtttacgtttgtaattttagtattttgggaggttaaagtgggcggattataaggttaggagatcgagattattttggttaatatggtgaaattttatttttattaaaaatataaaaaattagtcgggcgtggtgtgtagtgttgtttgttattttagttatttagtgaggttagatttatgtgtattttaattttttttttgttgttgttgttgttttgagagggagtttcgttttttttgtttaggttagagtgtaatggcgtgattttggtttattgaaattttcgttttttgagtttaagcgattttttttttttagttttttaagtagttgggattataggcgtttattattatgtttagttaatttttttgtatttttagtagagacggggttttattatgttggttaggttggttttaaatttttgattttagatattgtgttcggttttaattttttttttaaatttgattggatttagtaaatatttatttaaagttttgttaatatgtcggattttttatttaatttttattttttattttttttttgtttttaatattatttatttatttatagagtttcgttttgttatttaggttggagtgtaatggtgtaatttatgtttattgtaatttttattttttaggtttaagtaatttttaggttttagttttttaagtagttgggattataggtgtatgttattatgtttggttaatttttgtatttttagtagatacggggttatgttatgttggttaggttggtttcgaatttttgattgtaagtgatttatttgtttttataaagtgttgggattattgttgtgagttattacgttcggttttattattatttatagtgtattttttagtgtttattttggttttttatt

SEQ ID NO: 3 - DNA, 5680 bp, Artificial Sequence
  chemically treated genomic DNA (Homo sapiens)
tttggtttttgtaggaggtaatgtttttgggaatatattcggggatttattaagttatatatttggttttttagaatttttataggtttttttttatagtaaggagaaatttgaagtagaaataggagtatttattagttatggttataggtagtattggttaattgttttgaaagtatttatttttatgaagtaggttatagggtaaggtttgtagggatggattaggagaattgttttttgtttttttttttatcgttttggaagggtggaaagtgtagggattattttgtagattattgcgtatttatttaagtgatttttgtttaattttttaattataatatagagaataatttagaaatttggatttttagatttgagtttagagatgatatagaaggtagaaaggaaagatgtgatatttattttatttttattatatatatttatttttatatgtattattttatttatttttatagtaaattttaggagatagttattagtaaggggtaaatattaaatttgaatataggtataagattgggtgtggtggtttatatttgtaattttagtattttgggaggttaagaagggtagatcgtttgagtttaggagtttgagattagtttaggtaatatggcgaaattttatttttatagaaaatatatatacgtataaaaattagttaggcgtggtggtatttgtttgtagttttagttatttggggggttgaggtaggaggattgttggagtttaggaggtcgaggttgtagtgagttatgattgtattattgtattttagtttgggtgatagagggagattgttttaaaaaaaaaaaaaaaaaaagaatataagtttagttgatttaaaagtttgagtttaagtttaaataaataaaaattataaatatattttattatataaaattgtcggttggggtcgggcgtagtagtttatgtttgtaattttagtattttgggaggtcgagtgggtggattattaggttaggttaatacggcgaaattttgtttttattaaaaatataaaaaaaaaaagttaaaaaaattagttaggtgtggtggtaggtgtttgtagttttagttattcgagaggttgaggtaggagaatggcgtgaatttgggaggtgaagtttgtagtgagtcgagattgtgttattgtattttagtttgggcgatagtgggagattttgttataaaaataaaataaaataaataaaaaaaatagtcgggtgggtgcggtggtttatatttgtaattttagtattttgggaggttaaaatgggtagattatttgaggtcgggagttcgagattagtttgattaatatggagaagttgtttttattaaaaatataaaattagttaggcgtggtggtatatgtttgtaattttagttattcgggaggttgaggtaggagaatcgtttgaattcgggaggcggaggttgttgtgagtcgagataacgttattgtattttagtttgggtaataagagtaaaattttattttaaaaataataataataataataataataataaaataaaataaaaattgtttttttagatggaaaaaaaatggttaatatatttggatttaggtttgtttttgttaatatagaatatggtagtggtttttgtttttatttttagagattttgatttatttgatttgggataggtttatatatttatttatttatatgtgtttttttttttttttttttttttttgtatttgtagttacgaattaaagtgtaagaattatagaattatttggtagaaaatgtaaaagttgaaggtaaaggggtgaagaaattagggtttagttttaggttttattatttatttgcgttgtaatttttattttttttggaatagtttttttttataaaaattgaaatagtatttgttttattaattttttttacgtgggatatttgtatgtataaagaatatagatatatttgagtaagtgggaagaaaagtaaaagttgaatttgagagatagttgaaatttggtgagttaaagatttatattttgaaagtataatggtttggttagtttgtaaggagtaagaggtttattaaaataaaatatttaattgttttttattattattaatatgtagtattttgttaattatttaagttttttttattttatttttttttttgagatagagtttcgttttgttgtttaggttggagtgaagtggtataatttcggtttacggtagtttttgtattttgggtttaagtgatttttttgttttagttttttcggtagttgggattataggtatacgttattacgattggttaatttttgtatttttagtagagatggggttttattatggtggttaggttggttttgaattgttgattttaggtgatttattcgtttcgtttttttaaagtgttgggattataggtgtgagttatgttcggtttaggtttcgtttagtttaattaatttgaaaaggttttttttgatagatatttttttattgaaaggatttcgggattattaattatagtttagtaatgtagtttgagtagtttgtaagaagtagtttattatagattatttaattgaaaattataaaatttgattttttttttttgagacggagttttgttttgtcgtttaggttggggtgtagtggtacgattttcgtttattgtaagtttcgtttgttgggtttacgatatttttttgttttagttttttgagtagttgggattatcggtatttgttattatattcggttaattttttgtatttttagtagagatggggttttattatgttagttaggatggttttgattttttgatttcgtgatttattcgtttcggttttttaaagtgtcgggattataggcgtgagtacgtattcggttaaaatttgatttttaatttatttttaaattgtgtttatgtttaaattgtgaatttgggtaagttattttttttttttaggtttgttttttaagttgtaaagtaagaggattaggttaaattaggtatttagagatgttgatttatgaaatttgtaataaatggtttttgtgaattatttgggattatatgtaaaattttatgtgtgtgtttatatgtgtgaatatttttttggaggagaggtgtaaaatttttatgtgatttataaaggggtttgtgattaaataagaaggttaagaattgtttggttatttaggttttggtttttattttatttgttttttggttttttttatgataattttggaagtaaagtttaaattttgaagtatatataaataattgaatttggagttttaggataaaataaagatagataattttgatttttttttttttttttttttttttgagatatagttttgttttgttatttagattggagtgtagttgtattattatggtttattgtagttttaattttttgggttgaaggtgatttttttattttagtttttcgaggagttaggattataggtgtgtgttattatatttagttaatttttaaatttttttttgtagagaggagatttttttaagttgtttaggttggtttttaatttttgggtttaagtaatttttttattttggttttttaaagtgttgggattagaaacgtgagttattatattaagtttaattaggtttttgttgttgttgttttgagatagttttattttgtcgcgtaggttggagtgtagtggcgtgattttagtttattgtaattttcgtttttcgagtttaagcgatttttttgttttagtttttagagtagttgggattataggagtacgttattgtattcggttaatttttttttttttgtatttttagtagagacggggtttcgttacgttggttaggttggtttcgaatttttgattttaggtgatttgtttgtttcggttttttaaagtgttggtattataggtgagttacggcgtttaggttaagtttgattagttttgttttttaaagatttgaggagatttgtttttagtaggtagatttgaattaaagtatttttaggatttatgatttgatttgtaatcgttataggagttataaagttttgaggttaaattggttgtatttgaattttaatggttaatgttaagagggttattgattttgtggaaattttatttatttttattttatgatatgcgtttgttttttattttaaaatatttttttattggtttgaaattttttttttagggatttagtgttttgggtttgtaaagtttgaatattttgtgtaatttaatttttttgggaagaggtatgatatgacgttttgattttaattaattaaaatttggaagtggaggggagggaggatagggaaaggattggaagggaaagtgagagggttattgaagttttgtgtagggtaggaacggtaggttagattggggtaattttaaggatatacggagtttaaagggttgtttatatattgtgttttgtattttaagtaaaatattttttggagaatagggttagggtttaatttttttataaaggtaggggcgtggagagaagcgatttttatttttttatttttcgttttaattttgtattcgatttagttatggggttaagtttggaggggacgttggttttttagatatggtttcgtttattgtaagtgttattttggtaagggattttttcgagtagaggtaaacgcgaatttgtggtttttttaattaagatgaggttttcgagttttgtttgtcgcgttaggtcgcgttatttttttatgttttttcgttatagttagattacgatttttttgtacgtaattttatcgagattgcgtttttttttcgtattttagtaggtttttaagtaagatggcggcgaacgtattttcggcgtgtgtttttacgggtgcgttcgggcggttgtttgtaggtgttatttagcgggttttagtttgtttgttgtatagattataacggtgatggcgggtaagcggttcggttggagtcgggcggtttttttttagttttttttcggcgtgaatttggtggtgatgtcgtttattcgggttcggagtttgcgtttcgttattttggtaatgagagatgggtttattaaagatttttttgaagttaaaagggtaaaggttagttggtggaggtcgaggatttcgggaaggaatagttggtttaggaggggacgattggtttgggtagttgggaggttggatttaggattgatttggagttttggtttatgggagttaggatgatcgaatacgtcggggtgagtttgttttgagatagggaagtggttgaatggttaagatttatttttaaagaagtttttggttattttttttttttagttgtttttattatatacgttgtttttattttttttttttttttttatttgtattttggttttgtttatggtttttagtagtattgtttagttaagttagaatttttggaatttggaagaagtgattgatttttagttggggttttttgtagttagtaggttttttagagggaatgagatttttttttttaatatggggtaaaaggtaggttttgggtttttattaaggggatgtttttgatttataggtaaattattttatttttttagt

SEQ ID NO: 4 - DNA, 5680 bp, Artificial Sequence
  chemically treated genomic DNA (Homo sapiens)
gttgagagaataaaatggtttgtttataggttagaagtatttttttgatagggatttagagtttattttttgttttatgttagggaaggaagttttattttttttgggaagtttattggttgtaaaagattttagttaggagttagttattttttttagattttagagattttaatttagttaagtaatgttattggagattataggtaaagttaaggtataggtaggaagggaaaagagaagtgaaagtaacgtatgtggtggggataattggggaaaaaagataattaaaggtttttttagggatgagttttaattatttaattatttttttgttttaaggtagatttatttcgacgtattcggttattttgatttttataagttagggttttaggttaattttgaatttagttttttaattatttaggttagtcgtttttttttaaattagttgttttttttcgagattttcgatttttattagttggtttttgtttttttagttttagggaagtttttggtgagtttattttttattattaaggtaacgaagcgtagatttcgggttcgggtgggcggtattattattaggtttacgtcgagaaggagttggaggagagtcgttcggttttagtcggatcgtttgttcgttattatcgttgtaatttatgtagtaaataagttggaattcgttgggtggtatttgtaagtagtcgttcggacgtattcgtaaggatatacgtcggaagtgcgttcgtcgttattttatttagggatttgttggggtgcggggaaaaggcgtagtttcggtgggattgcgtgtaggagggtcgtggtttggttgtggcggaggagtataagaaggtaacgcgatttggcgcggtagatagggttcgaagattttattttgattaagaaggttataaattcgcgtttgtttttgttcggagaaattttttattaaggtggtatttgtagtgggcgggattatgtttggagaattagcgttttttttaggtttgattttatagttagatcgggtgtagaattgaggcgagggatgggaaagtagaggtcgtttttttttacgtttttgtttttgtggggagattgagttttggttttgttttttaggagatgttttgtttggggtgtaggatatagtatgtaaataattttttggatttcgtgtgtttttgaggttgttttagtttggtttatcgtttttgttttgtataaagttttagtagtttttttatttttttttttagttttttttttgtttttttttttttttatttttaagttttagttaattagagttaagacgttatgttatgtttttttttaaaggagttgggttgtataggatgtttagattttataaatttaaagtattgaatttttgggggaggaattttagattagtggggaggtattttgaggtaagggataggcgtatattataaagtgggagtaggtggggtttttatagaattaatggtttttttggtattgattattaggatttaggtgtagttagtttggttttaggattttgtgatttttgtgacggttgtaggttagattataggttttggggatgttttgatttagatttgtttattggaagtaaatttttttagatttttgggaaataaaattgattaggtttggtttgggcgtcgtggtttatttgtaatattagtattttgagaggtcgaagtaggtagattatttgaggttaggagttcgagattagtttggttaacgtggcgaaatttcgtttttattaaaaatataaaaaaaaaaaaattagtcgggtgtagtggcgtgtttttgtaattttagttattttggaggttgaggtaggagaatcgtttgaattcggaaagcggaggttgtagtgagttgagattacgttattgtattttagtttgcgcgatagagtgagattgttttaaaataataataataaaaatttgattaggtttggtgtggtggtttacgtttttaattttagtattttgggaggttagggtgggaagattgtttgagtttaggagttggagattagtttgagtagtttaggaagattttttttttataaaaaaaagtttaaaaattagttgggtgtggtggtatatatttgtggttttagtttttcgggaggttgaggtgggaggattatttttagtttaggaggttgaggttgtagtgagttatgatggtgtaattgtattttagtttagatgatagagtaagattgtgttttaaaaagaagaaaagaaaaaaaaagattaggattatttgtttttattttgttttaggattttagatttaattatttatatatattttaggatttaaattttgtttttagagttgttatggaggaggttaagaagtaaatagagtaagagttaaagtttgggtagttaaatagtttttaatttttttatttaattataagtttttttatgaattatatgaaaattttgtattttttttttagaaaaatgtttatatatataaatatatatatggaattttgtatataattttaaatggtttataaagattatttattataggttttataaattagtatttttgaatatttgatttaatttagtttttttattttatagtttaggaaataaatttaaagagaggaagtgatttgtttaaatttatagtttgggtatgggtatagtttgagaatggattaaaagttaagttttggtcgggtgcgtgtttacgtttgtaatttcggtattttgggaggtcgaggcgggtggattacgaggttaggagattaagattattttggttaatatggtgaaattttatttttattaaaaatataaaaagttagtcgggtgtggtggtaggtgtcggtagttttagttatttaggaggttgaggtaggagaatgtcgtgaatttagtaggcggagtttgtagtgagcggagatcgtgttattgtattttagtttgggcgatagagtaagatttcgttttaaaaaaaaaaagttaggttttgtgatttttagttaaatagtttataatgggttgttttttgtaggttatttaaattgtattattaaattgtaattggtgatttcgaaatttttttaataaagaggtatttgttaaaggaaatttttttaaattagttggattaaacgggatttaggtcggatatggtttatatttgtaattttagtattttgggaggacgaggcgggtggattatttgaggttagtagtttaagattagtttggttattatggtgaaattttatttttattaaaaatataaaaattagttagtcgtggtggcgtgtgtttgtaattttagttatcggggaggttgagataggagaattatttgaatttaggatatagaggttgtcgtgagtcgagattgtgttattttattttagtttgggtaatagagcgagattttgttttaaaaaaaaaaataaaataaagagggtttgggtaattggtaaaatgttgtatattagtggtagtgggaggtagttgagtgttttgttttaatgggttttttattttttgtaaattagttagattattgtatttttagagtgtaaatttttggtttattaaattttagttattttttaaatttagtttttgtttttttttttatttgtttaaatatgtttatattttttgtgtatgtaagtattttacgtaggagggattgatgaagtagatattattttagtttttatagggagaaattattttaggaagggtggggattatagcgtaagtagatagtagagtttgaagttgagttttagtttttttatttttttgtttttagtttttgtattttttgttagatgattttgtggtttttatattttggttcgtaattataggtgtaaaaaaaaaaaagaaaaaaaaaaaatatatgtagatagatggatatgtgggtttattttagattaaataaattagaatttttgaaggtgaggataggaattattattatattttgtgttggtagaagtaaatttaaatttaggtatgttagttattttttttttatttgaagaggtagtttttgttttgttttgttgttgttgttgttgttgttgttgtttttgagatggagttttgtttttgttgtttaggttggagtgtaatggcgttatttcggtttatagtaattttcgtttttcgggtttaagcgatttttttgttttagtttttcgagtagttgggattataggtatgtgttattacgtttggttaattttgtatttttagtagagatagtttttttatgttggttaggttggtttcgaattttcgattttaggtgatttgtttattttggttttttaaagtgttgggattataggtgtgagttatcgtatttattcggttgttttttttgtttgttttgttttgtttttgtgatagagttttttattgtcgtttaggttggagtgtagtggtatagtttcggtttattgtaagttttattttttaggtttacgttatttttttgttttagtttttcgagtagttgggattataggtatttgttattatatttggttaatttttttggttttttttttttgtatttttagtagagatagggtttcgtcgtgttagtttgatttagtgatttatttattcggttttttaaagtgttgggattataggtatgagttattgcgttcggttttagtcggtagttttatataatggagtgtatttgtgatttttgtttgtttgagtttgagtttaaatttttgaattagttaaatttgtattttttttttttttttttttttgagatagtttttttttgttatttaggttggagtgtagtggtgtaattatggtttattgtagtttcgattttttgggttttaatagtttttttattttagttttttaagtggttgggattataggtagatgttattacgtttggttaatttttgtgcgtgtgtgtgttttttgtaaaggtgaggtttcgttatgttgtttaggttagttttaaatttttggatttaagcgatttgttttttttggttttttaaagtgttaggattataagtgtgagttattatatttagttttatatttgtatttaaatttgatatttgttttttgttagtaattattttttagagtttattgtgagaataaatgaaataatgtatgtaaagataaatgtatgtagtagggatgaaataaatgttatattttttttttttgttttttgtattatttttgaatttaggtttgggaatttaggtttttggattattttttatgttgtgattggaaggttgggtagaagttatttgagtagatacgtagtggtttgtaagatgatttttgtattttttatttttttagaacggtgaaggagggaataagaagtagtttttttggtttatttttgtagattttattttgtggtttgttttatgggaatgagtatttttagggtagttagttagtattatttgtgattatggttggtgaatgtttttgtttttgttttaagtttttttttgttgtgagaagaaatttgtggaggttttggggggttagatatgtgatttggtagattttcgagtgtgtttttagagatattgttttttgtaggagttaag

SEQ ID NO: 5 - DNA, 5365 bp, Artificial Sequence
  chemically treated genomic DNA (Homo sapiens)
tttgttttattatttaggttagagtgtaatggtgcgattttagtttattgtaatttttgtttttcgggtttaagcgatttttttgttttagttttttgagtagttgggattataggtacgtgttattatatttaggtaattttttgtatttatagtagagatggggttttattatgttagttaggatggtttcgattttttgattttttgatttattcgtttcggttttttaaagtgttgggattataggtatgagttattgtatttggtttattttttaatttttttaaatgtttttattaagtaaatattttgagaagtttttattagttattaaaaatttataatgtaaatatataaataaaaggagaatagtaagtttttttaaatattttgatattatttttaaatttagttaataaattgagaatgaatgttaattttttaaataaataggttaggggtagtggtttatatttgtaattttagtattttgaggggttgagttgggaggattgtttgaatttaggagtttaagagtagtttggataaggtgataaatttttttttttataaaaaatataaaaattagttgggtgtggtggtgtgtgtttgtagttttaatttttaggaggttaaggggtgtgggaggattttttgagtttagaaggtcgagtttgtagtgagtcgtgatcgtattattggtttttagtttgggtgattttgttttagaaaaagaaaaaagaaagaaaaaaaaagtttttattaattgaagatagattgaaagtaagagaaattgaaagtaagataaatgagtgggtggtttttttaagtattggtaagtgttgtagagaaaattatagtaataggagagttaatgatgggggtagggtggtgtattttagataattttagataaattatttttttttttttttttttttttttttgagatagagttttattttgttatttaggttagagtatagtggtacgattttggtttattgtaattttcgttttttaggtttaagtaatttttttgtttcgattttttgagtagttgggattataggtttgtgttattacgtttagttaatttttgtatttttagtagagatggggttttattatgttggttaggttggtttcgaatttttggttttaagtgatttattcggtttggttttttaaagtgttgggattataggcgtgagttattacgtttagatttattttagataaattaaaggaatttgaatataatgggtgattttagtatttgattaaggaagatttttttaggtagggagaatagaaagtgttaagattttgaggttagagtgtatttgagatagttaagtaatgcggaggaggttagaggagtaagaaatagggaaagtaggattggtaggaggaaggaagggaagggattgggtagagatagtagcggagaataggatttggatgtattggtaataggaggaatttattcgtggggttgttgatatttgagattgatattggtgttgggaaaataggaaagggtggaggtggagggagattttgagttatagtttgatttagttttatagaaaattagtagaagagagtttttttgggtgaatggagagagaagagtttatttagtattttggaggagattagagagagatagttaagaacgtataggttttattatatgttttgtgtaagattaggtttattttttttattgtgttttttttttttttttttttttttttttgagataagagtttagttgtgttgtttaggttgaaggttagtggtgtattcgtagtttattgtagttttaaatttttaggtttaagcgattttttattttagttttttgagtagatggaattataggtgtgtattattatgtttggttaattttttttttttttttttttttttttgtagtaatgtggtttcgttacgatgtttaggttgtttttgaattttcgggtttaagcgatttttttatattggttgggtttataggtttgagttattatgtttggttagtttttttaatttaaaaaatatagaaagtgttaatataaattaaaaagttataaaatagtgttaatagtattttattttttcgaagataaatataggtagagaaaaattaatggatattgtttttttgggtaggggtattattggttattataattttttttttcgtgtattttagaatttattaatttttttataaagattatgtagtataataagataataaatataattttgtgtgattttaaaatataggaagtatagaagtttttaaaatacgtttgtatttattacgtgaagaaatagatgttaatatttggttataattgttttagatttttttttttttttttttttttgttttttttttgggggggatagagttttgttttgtcgtttaggttggaatgtagtggtatgatattggtttagtgtaattttttttttttgggttggagtgtagtggtatgattttagtttattgtaatttttgttttttgggtttaagagagtatttttagttaatttttgtttttttagtagagataaggttttgttatgttgtttaggttggtttggaatatttgattttaagtgattcgtttatttcggttttttaaagtgttaggattataggtgtgagatattatatcggttaaataataagtttttaaaaaaataggagattggttaggtatggtgatttacgtttgtaatcgtagaattttgggaggttgaggtgggtagattatttgagatcgggtattggagattagtttggttaatatggagaaatttcgtttttattaaaaatataaaattagtcgggcgtggtggtgcgtgtttgtaattatagttattagggaggttgaggtaggagaatcgtttgtattcgggaggcggaggttgcgtgagttaagattgcgttattgtattttagtttgggtaattagaataaaattgttttaaaaaaaaaaaaaataaaaataggtcgggcgcggtggtttacgtttgtaattttagtattttggaaggttaaggtgggtggattacgaggttaggagatcgaaattattttggttaatacggtgaaatttcgtttttattaaaaaatataaaaaattagtcgggcgcggtggcggcgttcgtagttttagttattcgggggtgttgaggtaggagaatggcgagaattcgggaggtagagtttgtagtgagtcgagatcgcgttattgtagttcggtttgggtgaaagagcgagattttgttttaaaaaaaaaaaaattaaataaataaataaataaaaaaataaaataataggagaagatgatgatagattttataagagtttggttttagggttgaaattttatttagtgttgtggttttgcggttgtgggtttatgggtgtttttaaagggttttaggtagatggaggtttttggttggcgtggaggaaggaaaaggatgaaatcggtttttttggttattttttttagtttagttgtagttgtagttcgtgggtttgagtcgatttttggggtttatcggtttattttatagatgcggagtttatagtcgggaggcgtggcggttttgggcggtgtagggtttcggggcggggaggtcgaggcgttcgtttttttcgtcggggtttatttgggttagttttgagttttcgagtagggcggatcggtcgttgtttgtttaaagttggggtcgttaggagtgcgatcgtttgcggatttgtagttgggtatcggtcgtaacgttcgtttcgcgacggtaggtgagatgcgggcggtttcgtgggaggggtttttgtttgttttcgttatttatttttttttcgtttgttgttgttgtagggttgggaatgggggggattaagtatttcgtagggtgattcggggagatttgtgagttagtggttttagcgttgaatgagagttttttttcgggttcgcgttcgtagggattgaagggatttttgaatgttcgcgggacgtgtcgcggcggcgtttagtacggaggaggtaggtagggaggtgaggagtaggttagatcggtcgtaggtgtagggttttttgtttttttaggttgcggtttcgtggagggtttgtagatagttgttgagattatgagggttagaggtttgtggttacgcgcgttattattagttagttgttttttgtttggttttttttgtaggaatgggagtttggggggaggggagggtgtgggtaggattttttggaaaagggaagttcgttggtgtttatgtgtgggatggagagagggtagggggaggacggggatatacgcggagttttttatttagatgttgttaaatatagtttttatattagatacgtaatttattttagagatgtaatttaggtatatatatatggatatatataaaattttatttatagggatttttatttagtgttacgtgagaatataggcgtgtatcgtagataagttatataggtttcgtaggtttagtatatatgtttgtagtaatattattaggtatagagtcgaggtttaggtaggtatgtttagttgtacgtaggaagtaagatatatttagatatatataggtaagtttttatttagagaaagaaggtgtaggagatgtgttttgggtaattatagttatagttttttaagtgtgtatatatatatatatttatattgagatatatagatatatagagatatttggacgtgttaagtttatagtataaataggtttttgtaggtttattcggaggttgtgtgggtcgaggttgttgtatacgtgtgtttagatttttttatttttattttaatttcgtgttttgttttagggaagtttagggtttatatgatttaaggggagggttttcgggatagttttcggagaaattgtattatttttattaatgatttattttttttttagggaataaaggtttagggatcggtagttttattttagagtttattagttttttagagttttcggtgattggtttgtgtttttttttgggtgagtgttgggtaggttaggtggaaggagggtgaaatgggtttgtagggttattttggtatagttcgtttttttatagatcgcgttttttttttttaagttagtttgtgtagttttgtgtagtttgtgtgttttgagaattagggtattaaggggttttcgtaggggtagtttgtagtaagtagtttttttttattttagggtaggcgggggttttaaggtttttttgtttttgttatagttcgggttatttatgtttgtttttttttttttaga

SEQ ID NO: 6 - DNA, 5365 bp, Artificial Sequence
  chemically treated genomic DNA (Homo sapiens)
tttgggagaagagagataagtataggtggttcgggttgtgataagggtagggaggttttgagattttcgtttgttttgagatagagggagattgtttgttgtaggttgtttttgcgggaattttttggtgttttaatttttaggatatataagttgtataaggttgtataagttggtttagggaaggggggcgcggtttgtgagagggcgagttgtattaagatggttttgtaggtttattttattttttttttatttagtttgtttagtatttatttagggggagatataggttagttatcggaggttttgagaggttggtgggttttagagtagaattgtcggtttttgagtttttattttttgaggaggaagtggattattagtgaggatgatgtagttttttcgagggttgtttcgggagttttttttttgggttatgtgagttttggatttttttggagtaggatacgggattggggtgggggtgggaggatttgggtatacgtgtgtagtagtttcggtttatatagttttcgggtggatttgtaggggtttgtttgtgttgtaggtttgatacgtttaggtatttttgtgtgtttgtgtattttagtgtgagtgtgtgtgtgtgtgtatatttgagaggttgtggttgtgattatttaagatatattttttgtattttttttttttgagtaagggtttatttgtgtgtgtttgggtgtgttttgttttttgcgtgtagttgagtatgtttatttgggtttcggttttgtatttgatggtgttgttgtagatatgtatgttgagtttgcgaggtttgtgtggtttgtttgcgatgtacgtttgtgtttttacgtggtattgggtgggaatttttatggatggagttttgtgtgtgtttatgtgtgtgtgtttgggttgtatttttaggatgggttgcgtgtttggtgtgggagttgtgtttgataatatttgggtgggggatttcgcgtgtgttttcgttttttttttgttttttttttattttatatataaatattaacgggttttttttttttaggaagttttgtttatatttttttttttttttagatttttatttttgtaggaggaattaggtaggaggtagttagttggtgatagcgcgcgtgattatagatttttgatttttatagttttagtagttgtttgtaggttttttacgggatcgtagtttgggagggtaggaggttttgtatttgcggtcggtttgatttgttttttatttttttgtttgtttttttcgtgttgggcgtcgtcgcgatacgtttcgcggatatttaggagtttttttagtttttgcgagcgcggattcgggagagagtttttatttaacgttgaggttattggtttatagattttttcgggttattttgcgaagtgtttggttttttttatttttagttttgtagtagtaataaacgggaaggaagtgggtgacgaggataggtagagattttttttacggggtcgttcgtattttatttgtcgtcgcggggcgggcgttgcggtcggtgtttagttgtagattcgtaggcgatcgtatttttggcggttttagttttaagtaggtagcggtcgattcgttttgttcgagggtttagggttgatttaggtgagtttcggcggggagggcgggcgtttcggttttttcgtttcggaattttgtatcgtttagagtcgttacgtttttcggttgtaggtttcgtatttgtaaaatgggtcgatgaattttaagggtcggtttagatttacggattgtagttgtagttgggttagaaggggtggttaggggagtcgattttattttttttttttttttacgttaattaggagtttttatttgtttgggattttttgggggtatttatgggtttatagtcgtagaattatagtattgggtggggttttagttttggggttaagtttttgtgaggtttgttattatttttttttgttgttttgtttttttgtttgtttgtttgtttggtttttttttttttgagatagagtttcgtttttttatttaggtcggattgtagtggcgcgatttcggtttattgtaagttttgtttttcgggttttcgttatttttttgttttagtattttcgagtagttgggattacgggcgtcgttatcgcgttcggttaattttttgtattttttagtagagacggggttttatcgtgttagttaggatggtttcgattttttgatttcgtgatttatttattttggttttttaaagtgttgggattataggcgtgagttatcgcgttcggtttgtttttgttttttttttttttgagatagttttattttggttgtttaggttggagtgtagtggcgtaattttggtttacgtaattttcgtttttcgggtataagcgatttttttgttttagtttttttagtagttgtgattataggtacgtattattacgttcggttaattttgtatttttagtagagacggggtttttttatgttggttaggttggtttttaatgttcgattttaggtgatttgtttattttagttttttaaagttttgcgattataggcgtgagttattatgtttggttagttttttgtttttttaaaaatttattatttagtcggtgtggtgttttatatttgtaattttggtattttgggaggtcgaggtgagcggattatttgaggttaggtgttttagattagtttgggtaatatggtaaaattttgtttttattaaaaagataaaaattagttggaggtgtttttttgaatttaggaggtagaggttgtagtgaattgagattatgttattgtattttaatttaggaggaggaggttgtattgagttaatattatgttattatattttagtttgggcgatagagtaagattttgttttttttaaaaaaaaaatagaaaaaaaaaaaaagaaagaaatttgaagtaattatgattaaatgttaatatttgtttttttacgtggtgggtataggcgtgttttggaagtttttatgttttttgtattttgagattatataaaattatgtttattattttattgtgttatatgatttttgtagaaaagttggtaaattttggaatgtacgaagaaaaagattataatagttagtaatatttttgtttagagagatagtatttattaatttttttttgtttatgtttgttttcggaaaaatgggatattattggtattattttataattttttaatttgtattaatattttttatattttttaaattgaaaaagttggttaagtatggtggtttaggtttgtaaatttagttaatgtgggaggatcgtttgagttcgggagtttaggaatagtttgggtatcgtggcgagattatattgttataaaaaaaaaaaaaaaaaaaaaaaaaattagttaggtatggtggtgtatatttgtggttttatttatttaggaagttgaggtggaggatcgtttgagtttgggagtttgaggttgtaataagttacgaatgtattattgatttttagtttgggtaatatagttagatttttgttttagagagagagagagagagagagagagagtataatgaaaaaaataaatttgattttgtatagagtatgtaataaaatttgtgcgtttttggttatttttttttggttttttttagggtgttgaataagtttttttttttttatttatttaggagaatttttttttgttgattttttgtggagttagattaggttgtgatttagaatttttttttatttttatttttttttatttttttaatattagtgttaattttagatgttaataattttacgagtgagttttttttgttgttaatatatttaggttttgtttttcgttgttgtttttatttaatttttttttttttttttttttgttaattttgttttttttgttttttgtttttttgatttttttcgtattgtttgattgttttagatatattttggttttagggttttggtattttttgttttttttgtttggaagggttttttttagttagatattgaggttatttattgtgtttaagtttttttaatttatttgaaatgagtttgggcgtggtggtttacgtttgtaattttagtattttgggaagttaagtcgggtggattatttgaggttaggagttcgagattagtttggttaatatggtgaaattttatttttattaaaaatatagaaattagttgggcgtggtggtataaatttgtggttttagttatttaggaggtcgaggtaggagaattgtttgaatttgggaggcggaggttgtagtgagttaagatcgtgttattgtattttagtttgggtgatagagtgagattttgttttaaaaaaaaaaaaaaaaaaagaaaaagataatttatttgaaattatttgaaatgtattattttgtttttattattgatttttttgttgttgtagttttttttgtagtatttattagtgtttgagaaaattatttatttatttattttgtttttagttttttttgtttttagtttgtttttagttaatgaaagtttttttttttttttttttttttttttttaaaatagagttatttaggttggagattagtgatgcgattacggtttattgtagattcgattttttgggtttaggggatttttttatattttttggttttttggggattgagattataggtatatattattatatttagttaatttttgtattttttgtagagagagggatttgttattttgtttaggttgtttttgaatttttgagtttaagtaatttttttaatttagttttttaaagtgttgggattataggtgtgaattattgtttttggtttgtttatttaaaaaattaatatttatttttagtttattggttaagtttagaagtagtattagaatgtttaagagaatttattgttttttttttatttgtatgtttgtattgtagatttttaataattgataaggattttttaaggtgtttgtttggtggagatatttaaaaagattaaagaataggttaggtgtagtggtttatgtttgtaattttagtattttgggaggtcgaggcgggtggattaagaggttaggagatcgagattattttggttaatatggtgaaattttatttttattataaatataaaaaattatttgggtgtggtggtacgtgtttgtagttttagttatttaggaggttgaggtaggagaatcgtttgaattcgggaggtagaggttgtagtgagttgagatcgtattattgtattttagtttgggtggtagagtaag

SEQ ID NO: 7 - DNA, 6133 bp, Artificial Sequence
  chemically treated genomic DNA (Homo sapiens)
tttttgaaagttttttttgtcgtggtttttattattttattttttttaggttttttttttatttttattattgttttttttgtttttttttttgttggtattgttgtatttttagaatttttttgtttttttgagttgtttgaataataatgatatgttgttaatttttaaatttatatttttgtggttttaggtatttttaaatttagtatgtttgataaggaatttagtttttatatttttaaaatttttttattttttggagacggagtttttgtcgtttaggttggagtgtagtggtataattttggtttattgtaatttttgttttttgggtttaagtgatttttttgttttagtttattaagtagttgggattataggtgtttattattatgtttagttaatttttgtatttttaggggttttgttatgttggttagttggttttgaatttttgattttaggtgatttatttgcgttggtttcgtaaagtgttgggattataggcgtgagttattgcgtttagttaaggaattaatttttttttttttaaatttgtttattttagtttgttgaatgaaattattaggtagttagttatttaagattattttagagttatatggggttattttttttttttatttttcgtatttaattaattttgttatttttacgtttttgaatttttgaatttgttttttttttttatttttatattgttgttgtttggggttaggtttattttttattttgtttgggttttgttttttttttggtttttttataattagttttgtttttttttaattagtttttgtataaagtttaaatttatttggtttagtaaagtgatttttttaatataatatgattagtttataaatatgattagtttagttttttttaaaatataaatatgattaatttatatttagaatttttttaagtgtattgaagagggttttttattagatttttattttagtgtgttttatttttaagtagatttttacgtttgtttagtttattaatattacgtttttattgtttattatttttagtttgtattttttgggtgtatcgttaggttgtttacggtttttttaaatgttaggtagaatagttttttgttattttttgtttttttgatataggtttatttggggggattttttgattttttaagaattagcgtagtttgttttttcgtgaaaatttttttaattttttagtttgtttttttatagttgaattatttatgttttttgagtggtttttattggttttttataggtttgtgttttcgtagagataattcgttgttgtttttttttttatgtttttttgtattagattttaagttttatgaaggcgaggattatgatttatttatgtttatatgttgtgtttggtgtattgtaggtgtttagtgtttgtggaatggatgagtgaagatgaattattgtttttttgggatgaatgattttgttgtttattaaggtaaatgattttttaggtagtggtgtttttgtgcgttgcgattaatgtggtaattgttatattgagttgttattttagttagtgggattaaggagtaagatttttttttggagaagtggtttttgttagttttggggatttttttgataaagagatagggtagaggggaaaagaagtttatagattgtgatgtgggtttagttttaagattaagacggtttataaggttaggtacggtggtttacgtttgtaattttaatattttgggaggtcgaggtaggtagattacgagattaggagttcgagattagtttgattaatgtggtgaaattttgtttttattaaaaatataaaaattagttaggtatggtggcgtatgtttgtagttttagttatttgggaggttgaggtagaagaatcgtttgaatttaggaggcggaggttgtagtgagtcgagattatgttattgtattttagtttgggagatagagcgagatatcgttttaaaaaagaaaaaaaaagaatttgaaaaagaaaaaaaagaaggtttacgaaaatggatatttatcggggtttttagggatggtgaggagaattagtaggaagtatttttgggttaggttgtgggaaggagcgaagggtataggtagggattaggtagtttttatgtagcgcgggatttaaaaggaaggtagatatattatttaggaaagttttagtttggagatgttttaaatttttataaatggggtgtgaggtatatgattaattttttttttgttttattttattttttatttttagttgggttttgaagattagtatttagaaaagtaggagatgttatggtgttgaagaaagtataggattagtaggttgtggttttaatgatggattgtatgtgagttttggtaaatcgtttattttttttaagttttagttattttatcggggtatattttgatatgttttaattattttttaggattgtagtgaaggttaatttataatgatgataatagttattttttttagattattttttatgtgttagagattatgttaaatgttttattatatttattaatattaataatatttgtatgatatagaattattattagttttattttataagatgagtaaattgaggtttagggaggtaaagtattttgtttaaagtttaatgttgttaagtgagttgatggagttgacggaggtggtatttggtttgtggagttagtattttggttttttgatttgtatatttagttgtgtggttgattttattgtttaggagtgaagtaattataggttttttttgggatttttggtttcgaagttatagtggtagtatttagtaagaaataaggaaagatattttttttttttttggttttagatatgtgtttttgaggggttggttttttttttttaattgtaggggttggtgattgtattgggttgaatagtgtttatttaaaattcgtgtttattaggaatttgcgaatgtaattttatttggaacgaggattttagtagtagatgtaattaattaagattatttgtatttatattggattagggtgggttttaatttaatgattggtatttttataagaagagaggaatgtggatagagatgtagatgtagagggaagataattatgtgaagatatggggttatgttttcgtaaattaaataatattaaggattttgggaattattagaagttagaagaggtaaggaaggatttttttttagagtttttagagagtatatggttttgttaatattatggttttagatttttagtttttagaatagtgagagaatatatttgtattttaagttatttagtttggtagtaggaaattaatatagtaatttagtattgtgtgtattatagtttggtggatagagtatggattggaaattatttagacggattgggtggggtgtgtttatttgggggagatgagggagaggagaataagttatttatttatttagttatattgattaatttgtagataatgtttttttatgattttatgtgattgtgtgtatattgtgtttggcgagtgtgtttttagttttatttttttcggatatgacgatgggagttttttaggttggtgaaatttagaaggtgagaattttatttaagtaattgttttttttattttttggttattttttttatttttagattttagatggtgaagttgtgtttagagaggtttaaattttgtttaagtttttatagttagttagtaggaagtagaatttagatttagaattttttggttgtaaaaattttgtttttttttttatattaagtttttttttaagttaaagaaattgatttttttttagaaagatacggagtgatttgtttatttttttaagtattttttttagatttgaaagtaatatttatttgaaaaatatttagaaattattgaaatgttaaaagtaaaaaaattatggtaataattattgttattattgggtaaatatttttttagttttttttttttataaatatatattattagtataatttgaataatattgtaaatagtgttgtattttgtttttttaatttaatattattttgtaagtatttttttatgttaatagtttttgtaaataggattttaaattattaaataatgttttattatatggatgggttataatttaatattttttattattgtttatttagtttttattttttttataatgataaatatatagttaatattttttataaatatttgtttttttattattttttgaggataggggataatattgggtaaatggatatgaagattttaaggtatttgatgtataatgttaattgtttattaaaagggttttatttattagtttaattagagtgttttatacggtatttttatttatattgttattaataaagagttttgttatgttttgaaaaggcgcgtgtcgcgattttattatataggttgtcgcgtttagaggatggtagggggcgaggcgaggtagggaaattagttaggagatcgcggcgatgattttaggggacgcgttgggggtttgaggttaggcgtagggatggaggaattggaatacgtacgggattcgtagaatattcgacgggggcgggggatcgattttgataagataattttgtattgcgtggggtgtaggagagggaggagattgtacgttcggtttcggtttttttcgcgtcgggttcggtatcgattcgcgaagttggtcgaggcgtgagtttcgtttatttttttaatagggatatttttttttaaggcgggcgttcgcgcgcgtttcggtttcgtttttcgggggcgcgcgcggcggtcgcggcgtcggtttcgtcgggagcgtacgtgtaggcgtcgggcggaggagagggaggcgggagtcgggtcgcgggaggaggggaggcgtcgggggcgcgcgcgcgcgcgttgggcgttgttgggttgcggcggcggcggcggcggcggtggttattatggcggagtcggtcggagttttttttttttttttttttgttgtttttttgttcgtcggtagcggcgggttcgggtttcggggggtttagggtgagttttgggacggggggcgggggtcgggatggagagggttcggtaagggcgaggtttcgagtcgcggtcgttggattatagcgcgttttttttttacgagtataatatggtcgggtggggggcgtagaggagtcggggtgatttttagttagttttttcgattttcgaggcgtagtcgttcggcggcgacggagtttacgtcgggtttttggggattcgagttttgttttaggcggaattggattcgggtagtttttaggggtcgcgtttttagcgttttcgtgttttagagaggggagtttgagtttttagttttaagatttggaggttcgtggtttttgttttttatcgtgtttaggggcggggggtttttttttttttttttaggtgtttttggggggcgtttttttttcgttaagattgtggggttcgggcggtggggttttagttttttcgagggaatttgatgttgagagttcgcgtattttagattgtaggggaaggggtttttaattttttttttaggttttgtatttggcgtgtttttttttttttttttattgtttttttaatgttttgggaaagggagttatattttttttttatttaattttttgagtttagtggggtaatttttttttcgtttttcggtatttatgtttcgtggaggttatttggaggaagtgggacgaataggtttttaaatttttttggagtttggttttggaatttttaattttatggaatcgagttttttaagggttgatgtgaatttaggtgtatttgttttttttttcgttttttttattttatttcggggggtttatttagttaattattttgtggatgttttttaggtgaaattttggaatttgtttttaaatttttaagattatttaaagattttattattggattgtattttcggtttttggttagtatttatttatttttttatacgatgtttttttttagttcgtttatttttatatatttt

SEQ ID NO: 8 - DNA, 6133 bp, Artificial Sequence
  chemically treated genomic DNA (Homo sapiens)
ggggtgtgtgagggtgggcgggttgggaagaggtatcgtgtaggaaggtaaataagtattgattaagggtcgggaatatagtttagtggtgggatttttaaataattttgggggtttggagataggttttaggattttatttgaaaggtatttataaagtgattaattgaatgggtttttcggggtagggtgggggaggcgaggaggaaagtaaatatatttagatttatattaatttttggggaattcggttttatagggttagggattttaaagttaggttttaaaaaggtttaggggtttgttcgttttattttttttaaatagtttttacggggtatgagtgtcggagggcggaggggggattgttttattgaatttaagggattgagtgaaggggaaatgtgatttttttttttagaatattagggaggtagtggagggaggggaagaaatacgttaagtgtaggatttgaaggaaaggttagagatttttttttttatagtttgaggtgcgcggatttttaatattaggttttttcggagaggttaagattttatcgttcgaattttatagttttggcgggagaaagacgttttttaggagtatttggagggagggaagaaagtttttcgtttttggatacggtgaagggtagaaattacggatttttaaattttggagttggaggtttagatttttttttttggaatacgagggcgttgggagcgcgatttttgagaattgttcgaatttagtttcgtttggaatagggttcgggtttttaggggttcggcgtgagtttcgtcgtcgtcgggcggttgcgtttcggagatcggggaagttgattgggggttatttcgatttttttgcgttttttattcggttatattgtgttcgtggggagggggcgcgttgtagtttagcggtcgcggttcgaggtttcgtttttgtcgggttttttttatttcggttttcgtttttcgttttaggatttattttggatttttcggggttcggattcgtcgttgtcggcgagtaggaggataataagggggaagaaggaggaggtttcggtcgatttcgttatagtaattatcgtcgtcgtcgtcgtcgtcgtagtttagtagcgtttagcgcgcgcgcgcgcgttttcggcgtttttttttttttcgcggttcggttttcgtttttttttttttcgttcggcgtttgtacgtgcgttttcggcggagtcggcgtcgcggtcgtcgcgcgcgttttcgaagggcggggtcggggcgcgcgcgggcgttcgttttaaaggggagtgtttttgttaaaggggtgggcggggtttacgtttcggttaatttcgcggatcggtgtcgagttcggcgcggaggaggtcggagtcgaacgtgtagtttttttttttttttgtattttacgtagtgtagaattattttattagagtcgatttttcgttttcgtcgaatattttacgaatttcgtgcgtgttttagtttttttatttttgcgtttagttttaagtttttagcgcgttttttgggattatcgtcgcggttttttaattggtttttttgtttcgtttcgttttttgttattttttggacgcggtagtttgtgtgatggaatcgcggtacgcgtttttttagaatatagtaaagttttttattgatgatagtatgggtgagggtgtcgtgtgaggtattttgattgggttggtaggtagaatttttttggtaaataattggtattatgtattaaatgttttaaaatttttatatttatttatttagtattgttttttgtttttaagaaataataagaggatagatgtttatgaaaaatgttaattgtatatttattattgtaaaaaaggtagaaattaagtagataataatagaaaatgttaaattatggtttatttatatgatggaatattatttagtaatttaaaattttgtttataaaaattattgatatgagaaaatgtttataagataatgttaaattaaaaaagtaaaatgtaatattgtttatagtattatttaaattgtattgataatatgtgtttataggaaaaaaagattggaaggatatttatttaatagtaatagtagttattgttataatttttttatttttaatattttaataatttttaaatattttttaaataaatgttatttttaaatttagaagaaatgtttaagaaagtaaataaattatttcgtatttttttgaaaagaggttagtttttttagtttgagaaagaatttgatataaaggaaagggtagaatttttgtagttagagaattttggatttgaattttgttttttattaattagttgtgaaaatttgggtaaggtttgaatttttttaagtatagttttattatttgagatttaggggtggaaaggatggttaagagatagggagaatagttgtttaaatggaatttttattttttaagttttattaatttgaagaatttttatcgttatattcggaaaaaataaagttgaagatatattcgttagatatagtgtatatataattatataaagttatggggaggtattgtttataagttggttagtgtagttggatgagtaaataatttattttttttttttttattttttttaaataggtatattttatttagttcgtttaagtggtttttaatttatgttttatttattaagttgtggtgtatatagtgttaggttattgtgttagttttttattattaaattgggtagtttaaaatataaatgtatttttttattgttttggaggttagaaatttgaaattatggtgttggtagggttatgtgttttttgaaggttttagggaagaatttttttttgttttttttagtttttggtggtttttaggatttttggtgttgtttggtttgcggaagtataattttatgtttttatatggttattttttttttgtatttatatttttgtttatatttttttttttttataaggatattagttattggattagggtttattttaatttagtatgagtgtaaatgattttaattggttatatttgttgttaagattttcgttttaagtaagattatattcgtaggtttttggtagatacgaattttgggtggatattatttaatttagtatagttattaatttttgtagttaagaagggaaagttaattttttaggagtatatatttgaagttaggggggagggaggtatttttttttattttttgttaagtgttgttattgtggtttcgaggttaggggttttagaggggatttgtggttgttttatttttagatagtaaagttagttatatagttaaatatatagattagggaattagaatgttggttttatagattaaatgttattttcgttagttttattagtttatttgatagtattgaattttgggtaagatattttatttttttaaattttaatttatttattttgtaaaatggagttaataatagttttatgttatatagatattgttagtattgataaatatggtaaagtatttagtataatttttgatatataggaagtgatttaaaaagaatagttattattattattatgagttgatttttattataattttaggaagtggttgaggtatgttagagtgtgtttcgatgaagtgattgagatttagagaaggtaagcgatttgttaaggtttatatataatttattattaaagttatagtttattggttttgtgttttttttaatattatagtattttttgtttttttaggtattggtttttaggatttagttgaaggtggaaaatgaggtggagtaggggaggggttaattatatgttttatattttatttgtgagagtttggggtatttttaaattagagtttttttaggtgatgtgtttattttttttttaggtttcgcgttatatagagattgtttaatttttatttgtgtttttcgtttttttttatagtttggtttaaggatgttttttgttagttttttttattatttttgaaggtttcggtaagtgtttattttcgtaagttttttttttttttttttttaaatttttttttttttttttttgagacggtgtttcgttttgttttttaggttggagtatagtggtatgatttcggtttattgtaattttcgttttttgggtttaagcgatttttttgttttagttttttaagtagttgggattataggtatgcgttattatgtttggttaatttttgtatttttagtagagatagggttttattatattggttaggttggtttcgaatttttgatttcgtaatttgtttgtttcggttttttaaagtgttgggattataggcgtgagttatcgtgtttggttttgtaaatcgttttaattttagggttggatttatattatagtttatgaatttttttttttttttgttttgtttttttgttaggagagtttttagagttagtaggagttatttttttaggaaaaagttttattttttagttttattgattagagtgataatttagtgtgataattgttatattggtcgtaacgtatagagatattattatttaggggattatttgttttggtgagtagtagggttatttattttaagaaggtaatagtttatttttatttatttattttataagtattaagtatttatagtatattaggtataatatatagatatggataagttatagttttcgtttttatggaatttaaaatttaatatagaaaagtatgagaaaaagagtaataacgggttatttttgcgaggatataagtttgtaaagagttaatgagggttatttaggggatatgaatgatttagttgtgaggggataggttgaggagttgagaaagtttttacgaagagataggttacgttgatttttggaagattagagagtttttttagataggtttgtgttaggagggtaggagatggtaggagattgttttgtttggtatttaggagaatcgtgagtagtttagcggtatatttagaagatgtaggttgaagatgatggatagtggaaacgtaatgttggtgagttaggtagacgtggaagtttatttggaaatggagtatattggagtgggagtttaataagagattttttttagtatatttggaagggttttaagtgtaaattgattatgtttgtattttaggaaaggttaaattgattatatttgtaaattgattatattgtgttaggaagattattttgttgaattaagtgaatttgaattttgtatagaggttggttggaggaagataagattggttgtaaggaaattaaagagaaggtaaagtttaggtaagataggaggtggatttgattttaggtagtagtaatgtgaaggtggaaaagagaaatagatttaagagtttaaagacgtagaaatgataagattgattggatacgggaaatgaggaaaggggatggttttatatgattttaggataattttaggtgattagttgtttggtagttttatttagtagattagaatgggtaggtttgggaaaaagaaaattagttttttggttgggcgtagtggtttacgtttgtaattttagtattttgcgaggttaacgtaggtggattatttgaggttaggagtttaagattagttggttaatatggtaaaatttttaaaaatataaaaattagttgggtatggtggtgggtatttataattttagttatttggtaggttgaggtaggagaattatttgaatttaggaggtagaggttgtagtgagttaagattgtgttattgtattttagtttaggcgatagagatttcgtttttaaaaaataaaaaaattttaaaaatgtaaaaattgagttttttgttaggtatattgagtttgaaggtatttggagttatagagatgtagatttggaagttagtagtatattattgttgtttaaatagtttaagggagtaagagaattttggaaatatagtaatattagtaaaaaagaagatagaaggaatagtgatagaagtaggaagagaatttgggaaaaatagaataatagaaattacggtaagagaggtttttaagag

SEQ ID NO: 9 - DNA, 6101 bp, Artificial Sequence
  chemically treated genomic DNA (Homo sapiens)
attttgaaattttgggtttgataagttagttgtattttttttattattttttaaaagaaatatataattattaaaataaaaatatttgtttatgtaatatttaaaattattttaggtattattagttagtttatgttgtttattttgtaaaataatgagggtgatggagatttttttgtatatatttagaaaatttaaattggattaaatgtgatgattatgaaaaagagtttgtttatggtttttaagaatatttttatttagatttatgttgagaaattgatatagatatttgttattgagtttttttagaaaatttaattgaaagaatttggattaaaaaatttttatttttgatttttttttttttaagataataaattgtttagaatttggtattatatttattaaataatttttatagttattgtgatcgttattaggtttcgttagtattggtaatggtgtggaattttagtttatttttgggttttttttgggtttaattttatgatttttagtattattttatggaggttattaaaaaaggaagtagggttttttgattgagtggaatagtttttagggatatgtgggttatgttttatttttattatattattaatgttttatagggtaggatttataaattatatttgttttgtgttagtttagtgttttgtatatagttaataaatatttattgaatgaaagattgaatagatgaatgaatgttagtgaagtaagggtattagtagatatgttttgaggatgtatttggatatttttatatgtaaataatgtttttaaggatttaaaagttcggatgtaggaggttatgatttaggaagtgttagatgtttttagcgatattataatttttattaagttgttggtagtggtagttacggcgttttttgatgcgtttaatagggaagaggtgggtatttgaggttttttatttttttgttagtttgtgttataggtatatgtaaaggtgaaatgtgattatagtggatattaggattagtggttgggaaattgtagatgaagggtggaagagtagaatagggaaagttttattatttttatttttagtttttacgtatattagtgaggaatatttttagttgtaagtaatagaagatttgattattagagatgaaaataatcgggtttgtttttattataaattaagaaatatggaagtaggtggttttggtattggtttagtagttaaatattatgaaagttggtatttttatgattttttaggttatttttttagggtgtgggatggtattatgttaaatgtaggaagaaatgaagaatgggggtattttagttataattgtgtttttcgagttaggatgatttttttaaattaatcgatgttatttttatatttagatttttttaatgatttttcgttattttagagtaaaattagagtgttaataatgaagaaaattgttagcgatgtgttggtaagttaattttttaggaaaacgaaaaattttgatttgtaatgtttgttgatttttattatgtaaatatttttacggtggttgttttaatatgaagttattgaaatttgagttgggaagagatggatatgtttcgtttttgtgagttggtacgagtcggtataggtggttttagtatattattggatttggtttttatttatttttttgttttcgtgtggtattattttttttttttatgttatatttgtatgtatttttttgaattgtatttttagtgtgtatttatatgttttaattttggggtttttgtattcgtttgttttagttttttttagataattatatttattagttattgtttttttttagttttttattgaaatgttattttcgggtgattattaagataatattattattttaattattatttttatgggtttttattacgggcggaaggattcgtttttttattcgtggtgaagagtaggtgttattaaagtatgttaagtatgagtaaaagtgtatttgattgtttagagggttaagtttatgttagttttgggattatgtttttagagatgtaagtttaattattatgataataataaagtaataattatgttatgtgttaaggattttattagattttttattatagttaattaaattttaatttttatagtgttttgaatagtatataatgggtaaatcgagggatagatagtttaagaattagtttaaaggttgggtgtggtggtttatgtttgtatttttagtattttgggaggttgaggtgggcggattatttgaggttaggagtttaagtttagtttggttaatacggtgaaattttgtttttattaaaaatacgaaaaaaaaattagttaggtatggtggtgcgtgtttttagttttagttattcgggaggttgaggtgggagaattgtttgaatttcggggatgggggcggaggttgtagtgaatcgagattatgttattgtattttagtttgggtgatagattgagattttattttaaaaaaaaaaaaaaaaaaaaaaaaagaattagtttaaagttatataggtaataggaagttaagtagaagttgtaaattagatattttttgttatttttataggtttgttatttagtttggtttatagattagaagtaattagtgagatttgggaatataaagaaatgtaaaattttggttattgatatttgtagtgttaaatttgtattttaataagatttacgagatttgtatgtatgttaaagtttgaaaagtattgatggtgtgaaatgtggattatttattaatattttttataagagaaggtgggtaattttagttagtgtttttattattgtgaattgttaatttagttgttgttttgttttagattttgtttaatttagaggaataattgattaattttgtttgtggattttcggttaaagttttaattacgttaagtatagtttagtgttttaatagtttttatttatggattgaatatattagttttatagattatggttttattttggataggtattttttaggttaaagagaatagtgttaaaaatagtattttttaaagaaatttgaaattttttggaatatttgatgtgttttatggttagtaagaaaatagatttgtataaattggtttttttattaattttattttgtgaatttaattattttattatagggatagtgataggtaaagttaatttagattagagtagtattgttttgtagaaatataatgtaagatttttgtaattttaaattttttagtagttatattaaaaaaggtaaaaaagaggttaggagtgttggtttacgtttggaaggttgaggcgggtagatcgtttgaggttaggagtttgagattagtttggttaatatggtgaaatttcgtttttattaaaaatataaaaaaatttagttaggtacggtggcgtatgtttgtagttttagttattcgggagtttgaggtataagaatcgtttgaatttaggaggtagaggttggagatcgtattattgtattttaatttgggcgatagaataagattttagtttaaaaaaaaaaaaaaagtgaaatgtagtttaattaaaataatataattgtgtttagtggaaaaatatattgttttagttataaaatttaaatgaattaaaattaaataaattaaaaattaagttttttagttttattagttatattttaatatcggatggtattggttgtttttgatataattgattttagatatatgaaattgattattattttagatggttagtaagttaatgttataggatattgtagtttattaataatattgtagaatagggtttagtcgtttatatttatatttttagtgttttgggaggttaaggtgggagggttgtttgaggttaggagtttaagattagtttgggtaatatagtgagattttgtttttataaaaataaaaaaatgaaaattaaaaaaattattgtatagagaataaaggaataaaagtaatttggattataaagtatttattgatttttttttttttatagttggagttaattttttttttattggtttataattttttaattttttaattgtattaaattgtaagattagagttaggagttagggtgttatttattttttttttttatggttttagatttttttttttttatagttcgtatgtttttttggaaagtgaggtaattgtgttaaataggatagttttgagtggggtttagaggttgtaaaattttatgtttgtatttgatttatttggtaatttgttaaaaatatcgatgtttaggtttatttttttagattcggatatataaagtgatattttttatattaaataagttgttttaagtgtttttgaagtttaggaacgtttgggattattagatttagtaattgatttttaaaggttgcggattggaattagtacgtcgtgttgtcgttgttaggtattttatatttttttaggttgaggttttttaggttgttgttttttttttttttatttttgtagatggattttgtaggttgttaaattttattttcgaagatttgttttgatagcgttttttttttaagtgttgttatagggagttgagtttgtcgaggtagatagtggttacgtgattgttaaatcggttgttagaggcgcggttatttttggggcgggtatttaatttttcgttttgtaaattgcggggtgacgggacgttgttattaggatttaagatggttatcgcgttcgttagttatttcgttagttcgcgcgttagtgagttggtacgagatacgcggtggtttacggcgtttggggacgatttttagtttttcgtacggggcggagcgttcgttttttttttaattagtacgtcgggtcggttagttaggggtcgttcgcgcgcggggtgtgtgaggacgcgtttttagtcgttgagtgtttgagtcgggaagtagttgttgtggtatttgttgttgttcgagcggacgtagagtatcggacgcgggcgtcgtggcgttgggtaggagggcgaagttatgacgttagttaggtaacgagcgggcggttgttttgattgtttcgagttgggcgttagtttttcgagcgcgtgagtattgtcgttttttttcgcgggtggtttggagtttgttttcgtttttggtttttttcgtgttgggggtttttttcgtattttttatttgggtatttttgttttttttagaagttttcgggtttgtggtatattgcggagttttgtgtgtcgttgtttggtcgaggtgattttcgtttaaattttagggttgtaagcgtttttgggtgtgtagtggattttttatgaaaaatgtgttttattcgcgttttcgggggcggtttagggtcggagggagcgtggcgtgtatagtgtgtgttatgtttgcgtgttatgttttttgatagaattttattgttggtcgggagtagatttgtaaagttggtttttttttgatgtaggtatattgtttttaagttgtgaaattgtgtgtttttaaaatgtttgtttatgattggaattaggattttggttttcgaaggtattattttgtttttttattttttttattttagagttataagtgaaatgagttgagagatattgggtatgtagcgaaatttatgaaattggagatttttttttaattgtttttttagtttggaaggttttttttttgttaatgaggataggataatgggtttgtttatttttttttagtagttttgattgaatgtttaatttacgttagtttaattatttataaaaagagataaattgttttatatatttagtgttttgattggtttttttaaaagtagaatttgggttttgttgttttagagaaagggaggttttagtataaaaatgtgaagagaaataaaataagtttatttttggtttatgagttttttaggttttattcgttttggtgatttgagggttttttaatgttaatttttattatattgtgtttaagagatagtttgggaatttaatttttagtaagatttaattgtgt

SEQ ID NO: 10 - DNA, 6101 bp, Artificial Sequence
  chemically treated genomic DNA (Homo sapiens)
gtatagttagattttattgagggttaggtttttaagttgttttttaaatataatgtagtaaaaattggtattgagaagtttttaaattattaggacgggtggagtttggaaagtttatagattaaaaatgagtttattttatttttttttatatttttgtgttggggtttttttttttttgggataataaagtttaagttttgtttttaaaaaggttagttagaatattgggtatataaggtaatttatttttttttataaatagttgaattagcgtaaattaaatatttagttaaggttattgggagaaagtggataagtttattattttgtttttattaataaaaaaagaattttttaaattggaagagtaattgggggaaagtttttagttttatggatttcgttatatgtttagtattttttaatttattttatttgtgattttgagataaaaggagtaaagaaataagatggtattttcgggaattagggttttaattttagttatgagtaaatattttagagatatataattttataatttgagggtaatatatttgtattagagaagggttaattttgtaggtttgttttcggttaataatgaagttttgttagagggtatgatacgtaggtatgatatatattgtgtacgttacgtttttttcggttttgggtcgttttcgggggcgcgggtggggtatattttttatgggaaatttattatatatttaagaacgtttgtaattttggaatttgggcgagggttatttcgattaagtagcgatatatagaatttcgtaatgtgttatagattcgaaaatttttgaggaaagtagaaatgtttaaatgaaaagtgcggagggaatttttaatacgagggggattagaggcggaggtaggttttagattattcgcgagaaggagcgatagtgtttacgcgttcgggaggttaacgtttagttcggagtagttaaggtagtcgttcgttcgttatttgattgacgttatggtttcgtttttttgtttagcgttacggcgttcgcgttcgatgttttacgttcgttcgggtagtagtaggtattatagtaattgtttttcggtttaggtatttagcgattgggagcgcgtttttatatatttcgcgcgcgggcggtttttggttagtcggttcggcgtgttgattggagggaaggcgggcgtttcgtttcgtgcgaagggttggagatcgtttttagacgtcgtgggttatcgcgtgtttcgtgttagtttattggcgcgcgggttagcgagatgattagcgggcgcggtggttattttgagttttagtaatagcgtttcgttatttcgtagtttatagggcgagagattgggtgttcgttttaaaaatggtcgcgtttttggtaatcggtttagtagttacgtggttattgtttatttcggtaagtttagttttttgtaatagtatttaggaaagaggcgttgttagggtaggttttcgggagtgggatttaatagtttgtaaaatttatttgtaaaggtggggggaaaaaaagtaatagtttgggaagttttagtttaggaaaatataaaatgtttggtaacggtagtacgacgtattaattttagttcgtagtttttgagagttaattgttggatttgatggttttaaacgtttttgaattttagaaatatttagagtagtttatttaatatggaaagtgttattttatgtattcgaatttagaaaggtaggtttggatatcggtatttttagtaagttattaggtgaattaggtatagatataaaattttataatttttgggttttatttaaggttattttatttgatataattattttattttttaaagaagtatgcgggttataaaaaaaaaagaatttaagattatagaggggaaaagtggatggtattttaatttttggttttaattttatagtttaatgtagttgaagagttaagaaattgtgaattaataaaaggaaaattaattttaattatgaaaaggggggaattagtaaatgttttatgatttaaattgtttttatttttttattttttgtgtaataatttttttaatttttatttttttatttttgtagagatagggttttattatgttgtttaggttggttttgaatttttagttttaagtaatttttttattttggttttttaaagtattgggaatataggtgtgaacgattgggttttgttttataatgttattaatagattataatattttgtggtattaatttattgattatttaggatggtgattaattttatatgtttgaaattagttatattagaagtaattaatattattcgatattgaaatgtggttgatgggattgaagaatttaatttttaatttatttaattttaatttatttaaattttataattgaagtaatatatttttttattaaatataattgtattgttttagttggattatattttattttttttttttttttgagttggagttttgttttgtcgtttaggttggagtgtagtggtgcgatttttaatttttgttttttgggtttaagcgatttttgtgttttaggttttcgagtagttgggattataggtatgcgttatcgtatttggttaaatttttttgtatttttggtagaaacggagttttattatgttggttaggttggttttaaatttttggttttaagcgatttgttcgttttagttttttaggcgtgagttaatatttttggttttttttttattttttttaatgtggttattagaaaatttaaaattataggaattttgtattatatttttatagaatagtgttgttttagtttaagttagttttatttattattgtttttgtgatagaataattaagtttataaaatgaaattagtaaggaagttagtttatataaatttgtttttttgttagttataaaatatattaaatattttagaagattttaagtttttttagaaaatgttatttttagtattgttttttttaatttgggaaatgtttatttagaatgaagttatggtttataaaattgatgtgtttagtttatgagtaaaagttgttaaaatattgagttatatttggcgtggttaagattttgatcgaaggtttataagtagaattagttaattgtttttttggattaaataggatttgaagtaaagtagtagttggattagtaatttatagtggtggagatattggttagagttatttatttttttttgtggaaaatgttgatagataatttatattttatattattagtgttttttaaattttaatatgtatataaatttcgtggattttgttaaaatgtaggtttggtattgtaggtattagtgattaaaattttgtatttttttatgtttttaggttttattaattgtttttggtttgtgggttaggttgagtagtaagtttgtaaaggtagtaaaaggtatttggtttgtaatttttgtttgattttttattatttgtatgattttaagttggttttttttttttttttttttttttttttgagatggagttttagtttattatttaggttggagtgtagtagtatgatttcggtttattgtaattttcgtttttattttcggggtttaagtaatttttttattttagtttttcgagtagttgggattaaaggtacgtattattatgtttagttaatttttttttcgtgtttttagtagagataaggttttatcgtgttggttaggttgggtttgaatttttgattttaagtgattcgtttattttagttttttaaaatgttgggaatataggtatgagttattatatttagtttttaaattggtttttaaattgtttgtttttcggtttatttattatatgttgtttagggtattgtgaagattaaaatttaattaattatagtaaagagtttaatagaatttttggtatatggtataattattattttgttattattataatagttaaatttatatttttggaggtatgattttaaagttaatatgaatttggttttttgaataattaaatgtatttttgtttatgtttaatatattttggtaatatttattttttattacgggtgaagaaacgggttttttcgttcgtggtgaagatttatggggatagtagttggggtggtggtgttattttagtggttattcgaaagtgatattttagtagaaagttgaagaaagatagtaattaatagatatggttatttggagaagattggaataaacgagtgtaaaggttttaagattagaatatataaatatatattaggaatataatttaaggaggtatatatagatgtagtatgagggggaagagtggtattatacgagagtaaagaaatggatggggattagatttagtggtgtgttaaagttatttgtatcgattcgtgttagtttataggagcgaaatatgtttatttttttttaatttaggttttagtgattttatgttgaaatagttatcgtgggagtatttatataatggaaattaataaatattataaattaaggtttttcgtttttttggagagttggtttattagtatatcgttggtaattttttttattgttagtattttggttttattttgggatagcggggagttattggaagggtttgagtataagaatgatatcgattgatttaaaaagattattttgattcgaaaggtatagttgtgattggagtatttttattttttatttttttttgtatttaatatgatgttattttatattttgagaaaatgatttagaaaattatagaaatgttagtttttatgatatttagttgttgaattaatgttaaagttatttatttttatgttttttggtttgtgatgaaaataaattcggttgtttttatttttgatggttaggttttttattgtttgtaattaaagatattttttattgatatacgtggagattaaaagtagaggtggtagggttttttttgttttgtttttttattttttatttatagttttttaattattgattttgatgtttattgtaattatattttatttttatatatatttatagtataggttgatagaaaaatggaagattttagatatttattttttttttgttaggcgtattaggaggcgtcgtggttgttattgttaatagtttgatgggagttgtggtatcgttgaaaatatttgatattttttgagttatggttttttgtattcgagtttttagatttttaaaaatattgtttatatatgaaaatgtttagatatatttttaaagtatatttattaatgtttttattttattgatatttatttatttatttagttttttatttaataaatatttgttaattgtgtataaagtattgagttagtatagaataggtgtaatttatgaattttgttttgtaagatattagtggtgtagtagaaataagatatgatttatatgtttttagagattgttttatttaattaaggaattttatttttttttttggtggtttttatgaaatgatattgagaattatgaggttgagtttaaagaaggtttagagatgggttagagttttatattattgttagtgttggcggggtttgataacgattatagtaattgtaaggattgtttggtggatgtagtgttaaattttaagtaatttattgttttaagaggaaagaaattaagaatgggaattttttaatttaggtttttttaattaagttttttagaaaaatttaataataaatatttgtattaattttttaatatgggtttaaataagagtatttttagaagttatgaataagtttttttttatagttattatatttaatttaatttaagttttttggatatatataaagaagtttttattatttttattgttttgtaaggtgggtagtataaattagttggtgatatttgagataattttaggtgttatatgggtaaatgtttttattttaataattatgtgttttttttaaaggataatagaaaaaatataattagtttattaaatttaagattttaggat

SEQ ID NO: 11 - DNA, 7928 bp, Artificial Sequence
  chemically treated genomic DNA (Homo sapiens)
ttttttttttttttttttttttagacggtgttttgttttgttatttagattggagtgtagtggtatgatttgagtttattgtaatttttgttttttggtttaagtaattaggattataggcgtgtattattatatttagttaatttttatatttttagtagaggtgggttagggtgattttatatttttgattttaagtgagttgttcgtttcggttttttaaagtgttgggattataagtatgagttattgcgtttggttggaattttttttttaattaaaatatttttattttaattttgtttttaaatgttataagttataaaatatttttaaaaaattttttaattagttttatttttatatgtttttgtttttagattttttttattataaaataaataatataaatgatataagatagaaagggagggtattgtcgagttttattagggtataattttttagattttttttttatgtaattttttttttttttgagataaggttatgttttgtggtttaggttggagtatattggtgtgattacggtttattgtagttttgattttttggatttgagtaatttttttattttagttttttaagtagttgggattataggtaggtattattatatttggataattaaaatttttttttttttttttgtagagatagggttttgttatgttgtttaggttggttttaaatttttgggtttaagtgatttttttgttttagttttttaaagtgttgggattatagatgtgagttacggcgtttaggttttatgtaattttttttttttttattattttagttttttttttttttttttttttttttttttttaggttatatttgggaaataaaattttgaaacgttaatattttagaattggtagaaaatttatagtttatatgtaaataaaacggatatttaaaattgattttttaattttaaaaatttatttattttattttaaaaattgtggtaaaaaacgtgtaatataaaattaattattttaataatttttatattttgttttggataatagagttttaaaattttgttattttgtagatttgagattttgtatttattaaatagtaatttttttttttttatttttttttagtttttggtaattattattttatttttttttttatgagtttgatttttttagatattttaatgtaaaggaattatatagtatttgtttttttgtgatgggtttattttatttatataatgtttttaagatttatttatgttaaagttattttttaatatatataaagtaatagacgtttgttgtatggaaaagtaaaaatgtttgggtggttgggtattgtggcgcgtatttgtaattttagtattttgggaggttaaggtaggaggattgttggagtttaggaattttaggttgcggtgagttataattttgatatagcgttttagtttgggtaataaagtgagattttgtttttttaaaaaaaaaaaaaaaaaaaaaaaagcgtggggggttgggtatagtggtttacgtttgtaattttagtattttgggaggtcgaggtaggtagattatttgaggttaggagttcgagattaatttggttaatatggtgaaattttgtttttattaaaaatataaaaattagtcgggcgtagtggtacgtgtttgtagttttagttattggggggttttgagaatcgtttgagtttagaaggtagaggttgtagtgagttaagattgtggtattgtattttagtttgggtaatagagtaagtattcgttttaaaaaataaataaataaaataaaataataataataataataaaatgtcggttaggtacggtggtttacgtttgtaattttagtatttttggaggttaaggttagtagattatttgaggttgggagttcgagattagtttgattaacgtggaggaatttcgtttttattaaaaatataaaattagtcgagcgtagtggcgtatgtttgtaattttagttatttaggaaggttgaggtaggagaattgtttgaattcgggaggtagaggttgcggcgaatggagattacgttattacgttttagttttggttataaaagcgaaattttattttaaaaaaaaaaaaaaaaaaaagaaaaaagaaaaagaaaagtttggggaagtttttaagtaggaagtggaagtgttatttttagttaggcggttataggtatatatttgttttttttgttttgttttattttatttattttaagatgttgttagtttgattgtaagataatgtaattttaattttgtagagttacggtgtaaaaaaaaaaaaaagtttgagaatatattttatatatatatatatatttgtatgtttagagttttttttaaatttattatttttatttaaaaaaaaataggggtcgggtatggtggtttatatttgtaattttagtattttgggaggtcgaggcgggtggattacgaggttaggagtttgagattagtttggttaatatggtgaaatttcgtttttattaaagatataaaaagttagtcgggtgtggtggtgtatggttgtaattttagttatttaggaggttgaggtaggagaatcgtttgaatttaggaggcggaggttgtagtgattcgagattatattattgtattttagtttgggcgatagagtgagattttattttaaaaaaaaaaaaaagaaaagaaaatatagatagtgttttattatgttgtttaggttggttttgaatttttggttttaattgatttttttgtatcggttttttaaagtattgggattataggcgtgagttattgtttttagtttttagttatttttatgtaggtgggattagaagagtgtagtggggttttttgtttatttttttttttttttttttttttttttttttgagatagagtttcgttttttttgttttgttgtttagtttggagtgtaatggcgtgatttcggtttatcgtaatttttgttttttgggtttaagttatttttttgttttagttttttaagtaggtgggattataggggcgtattattatgtttagttaatttttatttttagtagagacggggttttattatgttgattaggttggtttcgaatttttgattttaggtgatttattcgttttaggtttttaaaatgttgggattataggtgtgagttatcgcgtttagtttttttgtttattttttattaatgttatgggtgtttgaagttttttgttttattaattataaataatttggatttttttttttatttagattttatgggaaagttgttaattttttatttatcgtggttgtgttattattttagtgagtttttgttggtattttaaaatttttttatgtaaatttgtgtttatatgtttttttgaaataaattttttaaagtagaagggcgtatttgaagattgtgtgtgtgtgtgtgtgtgtgtgtgtgtgtgtgtttatattttagagacgggatttcgttatgttttttaggttgtgttagaatttttgggtttaagtgagtttaagtgatttttttatttcgtttttttgaagtggtggggttaataggagtgattattatgttcggtttatttgaaattttgatttattttgttaattgttttttttaaaggtgttaatgtatatatttttgagagggttttttaaatagtttttaatgtaatatttttgattttattgtatttgtttttttatagatggggaaattaaggttttaagaagtaaggatttatttgatattataggtagtagagatttaggttttttggttttttggttgttgtggttgttgaggtattattattgaaggtggttttaattttttggtagttttatttttttgtttaaatattttttatggttttttagggtttataatataaattttaagtttaatttattttattatttggggttgttgtttgggtttttatttttgttcggttatattattgagtatttattattatgtgttagtttttttgtaaaacgttggataaatacgtggttttttattagggaatttttcgtaaggtatttgatatgttcgtttttcgttttttgttgtgtttaaggatttatagatgcggttggagtttgttgtttagtatagtgagtgtttattatgggagttattttttttattaagatcgtaaattttttttttggttatttatagttttttgaatgtttcgggtaattttaggggagtagggttggttttttataattttttattttattgggtggtttttggggttttggcgggttttagttttagaggagttcgaagggttttttttaataggggaagaggagttttaggtgggtttcggttagggtttttgggtaggttttgagggcgggtttggggattgtggttagtaaagtttttgagtcgatgttttagttttttcgttttttggtttggtttttttttggtattaatgcgttgtgggattttgcggaaagagtcgtttttttttgagttttagtttttttagttattatagggaaagtttggttttgtattttggagtgtattttgagtatagtcggggtatcgtaatggaaaatttttggtaaattgtaaagtgtagttcgcgtgtgtgggtatagttatttgggggtttacggtgcggggtatacggtgtcgggtgcggtgtcgtcgcgtattcgggttcgggttcggtttcgtttcgtttttcggtttttggttcgttttttttttttttttttcgttttttttgttttcgggaacgtcggttttcggtatgtcgcgcgttgatagttttataaatagtcgtttttgtcggtcgtcgcgaggacgggtagggtacgtattggtttcggcgtttattcgtatttttttttaggttagtgcgtgttcgcgcgtgtttgggggggcgtttttgcggggaggggtagcggtatcgggggagggcgggggcgtgttggtgcggggttttttgggggttgtgcggttgtgtattcgtggttgtgattcgtgtgtgtttgcgtggttgtgtttttcgggcgttggggatttgtgtttcgttgtttgtgtttttgtggattcgtgcgtgtgtgtgcgtgtgtgtttgtgtgtgttgtagttttttttagttttcgagatagttatttttttgttttggttggtattttcggggttttaggttattgtttttggtatgttttagtttgggtttagagagggagagttgtggtttggttttttgttttagaggatttggataggggtagtttttgtgtttcgtagggttatcgtgttattttatttttagtgttgggtgtattggagaatattttttggatgtttagagtttgttttagttttttgattagggttagcgtttggggtttttttatagtattgtttagtggtcgtttggtattttttagtagtagtaggataggtttagagaggggatattaattgtttaaggttatatagttgagtgatggagttgggattcgaattttagttagttgttatttattgggaatcgattacgttgggttagaagttgggagatttgggtttgttttggttttgttttgtgattggggttaagttatcgtttttttgggtttcggttttataggttttttagtagattatttagttatattaggagtcgttggggttttgatttaggggttttataaggtttgggtgtttagttcgtaatttaattttattttagatttttgttttttgtgaggtttttttacgatttaagttattttggattaaggaagtggtaggtgttattagggcggagggggtttagattattaggaggggggcggggtagggcggggtcgaggttattttttagggttttattgtggttgtttttggtttaggacgtttttttttttatgggtagttgttgaggggtatttggtagtttttattttcgttgaagtatatttagtaggaaaagtggttgttatttttgtttggggtagtaggggtattagtaaagttattttagttgttattgggtgttaggtttagcgtagtagaaatttagggtcgagttggattttagttggttttcgaattagtttgtttttttttttatgttttagtttttttttaagatggtagtgaggatggaacgaggttttttagttttgtgtttagtttatgttaggtttagttaatgggattttaggttcgtagtatagaagaggggtttagtatagcgtggttgtgtagtgtagggtaggtttttaggaggtatttgttagtgtgggagtggagggtagagtttaggaaggttttttgaaggaggtggtatttgagttgagttttatataatagtaaggtggggaaaggtatttaggtattgggtataatatttgttagtggtagttgatagggttgtagagggtagtagaggttagtttatcgggatttatttattatgttaaggggtttaggttttgtttgggagtcgagagggttatatatgtaaggttgtaagcgggtgtgtgatgtggtttgatatttgttagagaaaattttgtaaattgcgtggtagggtgtggaggttttaaggtttatgtggaggcgggggtagtggtttaggttttttatttagtataggatatagtggtgaggagatagacggagagagtttggggaggggagggttgggtagtgggtgtgtagggttgtggagaggagagaggagtttttatattgatttagtttgtggtttggttataggggtttggagttgggatttggggagggttgtttagagtttgagaagtttgtggggtttttggggtttgtttcgggggtatggatgtttggggttggagagaaaggtttgggttgtttgtatagggatgggggtttttggagtttgaagttaagtagagagggtggtgtgggtgttttgggtggaggtttcggtgcgggtggggtcgttggttggaggttaaggttggaggggagtgtggttgtggtggttgcgagtggttttggggagggttggtggttgggagtgaagaagtggaggttaaaggtgtttagagggtagttttgagataggggggcgaggtaggggaggttttgggggttgtggtagtatagggtggggtcgtaggtgtgattgggtttatgggtaggttgagggtaaggtgggggtagtaaagttaggtttttaaagggtgggggtgtaggggatatgcgtggggttggttgttgggtttgtagaggtgaagagtttgggatcgttttattttgataattgtaaagggttgtgtttatgcgagcggtttttgtagatttttttattttaggtttttgttttttagaggatttttatttaaattttattttagatatatatagtttttggttattttttattttttggtagtttttttttggttttggggagcgttgttaaggtgtttgggtagacgttggttttgcgttttgttttttgggagtttcgaggggagtagttttgtagttgtgtggtcgttgtttatgtttttcggtgttatttttattgttttagtttttttagcgggaatttaggtggatgggagggggttattgtttttttgtgataggtgaggttatggaggttagagaggaaaggtgatttttttaaggttatttttttaaggtggtttttttagggaaggggttttgggttttttttgtttttagtagttttttttgtttttagattgtatgtcgggtttggtatatattagttgttttgggtgtggtttagtggaaggtgagttagggtgaggaggaaaatttttttttaatttgtgtttttgttttataga

SEQ ID NO: 12 - DNA, 7928 bp, Artificial Sequence
  chemically treated genomic DNA (Homo sapiens)
tttgtaagataagggtataggttggggagggatttttttttttattttgatttattttttattaagttatatttaaggtaattggtgtgtgttaggttcgatatgtagtttgagggtagagggggttgttgggggtagggaaggtttaggattttttttttgagaaagttattttgggaaagtgattttggaaaagttattttttttttttggtttttatggttttatttgttatagaagggtagtagtttttttttatttatttgggttttcgttggaggggttgggatagtgaggatggtatcgagggatataaatagcggttatataattgtagagttgtttttttcgaaatttttagaaaatagggcgtagggttagcgtttgtttagatattttgataacgttttttagggttagagggaagttgttaggaggtgggaggtggttaggaattatgtgtgtttgggatgaggtttggatggggattttttaagggatagaggtttggggtgaaggaatttataggagtcgttcgtatgaatatagttttttatagttgttaaagtgaggcggttttaggttttttatttttataggtttaataattagttttacgtatgttttttgtatttttattttttgaggatttggttttattgtttttattttgtttttagtttgtttatgagtttaattatatttgcgattttattttgtgttgttatagtttttaggattttttttatttcgtttttttattttagaattgttttttggatatttttggtttttatttttttatttttagttattagttttttttaaggttattcgtaattattatagttatatttttttttagttttgatttttagttagcgattttattcgtatcgggatttttatttaaggtatttatattattttttttatttggttttaggttttaaggatttttatttttgtgtaggtagtttaggtttttttttttagttttagatatttatgttttcgagataggttttagaagttttataggttttttaggttttgaatagttttttttaagttttagttttaggtttttatggttaagttataggttgagttagtgtgaaggttttttttttttttttatagttttgtatatttattgtttaatttttttttttttaggtttttttcgtttgtttttttattattatgttttgtgttaagtaaggggtttgggttattgttttcgtttttatatgggttttgaagtttttatattttgttacgtaatttgtaggattttttttggtaagtattagattatattatatattcgtttataattttgtatgtgtggttttttcggtttttagataaagtttgggttttttgatatagtggataggtttcggtgagttgatttttgttgttttttgtaattttattagttgttattggtagatgttgtatttaatgtttggatgtttttttttattttgttattgtgtgggatttagtttaggtgttattttttttaggaagtttttttggattttgttttttatttttatattggtaggtgttttttggaaatttgttttgtattgtataattacgttgtattgggttttttttttgtgttgcgggtttgggattttattgattgggtttggtatgggttgagtatagggttggggagtttcgttttatttttattgttattttgggaggaaattgaggtatggggaggaggatagattggttcgagggttagttagggtttaattcggttttgagtttttgttacgttgggtttggtatttagtagtagttgaagtggttttgttgatgtttttgttgttttaggtaggagtggtagttattttttttgttgagtgtgttttagcgggggtaggagttgttaagtgttttttagtagttgtttatgggagggggagcgttttgggttagggataattatagtgaagttttgagaagtggtttcgatttcgttttgtttcgttttttttttggtaatttaagtttttttcgttttgatggtatttgttatttttttgatttaaaataatttgggtcgtgaggaggttttatagaggataggggtttaggatggagttgggttacgggttaagtatttaggttttataaggtttttgggttaaggttttagcgatttttaatatgattggatggtttgttaaggggtttgtggggtcgaagtttagagggacggtgatttaattttaattataagataaggttaaggtaagtttaggttttttagtttttgatttaacgtagtcggtttttagtgggtggtaattgattagggttcgaattttagttttattatttagttgtgtgattttgggtagttggtgttttttttttgggtttgttttgttgttgttgaggagtattaggcggttattgagtagtgttgtgggaaggttttaagcgttggttttggttaggaggttagggtaagttttgagtatttagggggtgttttttaatgtatttagtattagaagtggagtgatacgatagttttacggagtatagaggttgtttttgtttaggttttttggggtagggagttaggttatagttttttttttttgggtttaagttgggatatgttaagggtagtgatttggagtttcgggagtgttagttagaataaaggggtgattatttcggaggttggaaggggttgtaatatatataaatatatacgtatatatacgtacggatttataaaggtataggtagcgaggtatagatttttagcgttcggggaatatagttacgtaaatatatacggattataattacggatatatagtcgtatagtttttagggagtttcgtattagtacgttttcgttttttttcggtgtcgttgttttttttcgtagaggcgtttttttagatacgcgcgggtacgtattgatttggggaggggtgcgggtgggcgtcggggttagtgcgtgttttgttcgttttcgcggcggtcggtaaaggcgattatttataaggttgttagcgcgcggtatgtcgggagtcggcgttttcgaaggtagggagggcgggaaggagggagggagagcggattagggatcgggaagcggggcgggatcgagttcgagttcgggtgcgcggcgatatcgtattcggtatcgtgtgtttcgtatcgtggatttttaggtggttgtgtttatatacgcgaattatattttatagtttgttaagagttttttattgcgatatttcgattgtgtttaaggtatattttagggtataaggttaggttttttttatgatagttggagaaattgaggtttagagaagagcggtttttttcgtaaaattttatagcgtattggtgttagagagaggttagattagggagcgagagggttgaggtatcgatttaggggttttgttggttatagtttttaagttcgtttttagagtttgtttagaggttttggtcgagatttatttgggatttttttttttttgttgggagggatttttcgagtttttttgggattggaattcgttaggattttaaagattatttagtaaggtagaagattatagaaaattagttttgtttttttggagttgttcgggatatttagaaggttgtggatagttagagaggggatttgcggttttgataagaagaatagtttttataatgagtatttattgtgttaagtagtagattttagtcgtatttgtgaatttttagatatagtagagaacgggaggcgagtatgttaaatattttgcgggaggttttttggtagaaagttacgtgtttatttagcgttttgtagggagattggtatatagtagtaggtgtttagtgatgtagtcgggtagggatgggagtttaggtagtagttttagatggtgaggtgggttgaatttggaatttgtattataggttttagggagttataggaggtatttgagtaagagagtgagattattaggagattgagattatttttagtggtggtgttttagtaattatagtagttaggagattaggaggtttgggtttttgttatttgtgatgttagataagtttttattttttgggattttagtttttttatttgtgggggggtaggtgtagtggggttagaggtgttgtattagaagttgtttgaaaggtttttttaagggtgtgtgtattggtatttttggggaaagtaattgataaagtaaattaaaattttaaatggatcgggtataatggttatttttgttaattttattattttaggaggacgaggtgggaggattatttgagtttatttgagtttaggaattttaatatagtttgggaaatataacgagatttcgtttttaaaatataaatatatatatatatatatatatatatatatatatagtttttaaatgcgtttttttattttaagaaatttgttttaaggaaatatgtgggtataaatttgtataggaaagttttaaagtgttagtagggatttattgggatgatggtatagttacggtgggtgaggagttagtaatttttttatagggtttgagtgagaaaggaagtttaagttgtttgtggttaatgggataagaggttttagatatttatagtattggtaagaaataggtaaaaaggttgggcgcggtggtttatatttgtaattttagtattttgggagtttaaggcgggtagattatttgaggttaggagttcgagattagtttggttaatatggtgaaatttcgtttttattaaaaataaaaattagttggatatggtggtgcgtttttgtaattttatttatttgggaggttgaggtagaagaatagtttgaatttaggaggtagaggttgcggtgagtcgagattacgttattgtattttagattgggtaataaggtaagaagagcgaaattttgttttaaaaaaaaaaaaaaaaaaaaaaaaaaagaaataggtaaaaagttttattgtatttttttgattttatttgtataaaaatgattggaggttgggagtagtggtttacgtttgtaattttagtattttgggaggtcgatataggaggattagttgaggttaggagtttaagattagtttgggtaatatagtgagatattgtttgtattttttttttttttttttttttttgagatggagttttattttgtcgtttagattggagtgtaatggtgtgatttcgggttattgtaattttcgttttttgggtttaagcgatttttttgttttagttttttgagtagttaggattatagttatgtattattatattcggttaattttttgtatttttagtagagacggggttttattatgttggttaggttggttttaaatttttgatttcgtgatttattcgtttcggttttttaaagtgttgggattataggtgtgagttattatgttcggtttttatttttttttaaataaaagtagtaaatttaaaaaagattttaaatatgtaaatgtgtgtgtgtgtgtaaaatatatttttagatttttttttttttttgtatcgtaattttataaagttaaaattatattgttttataattaaattgataatattttagagtgggtgaaatgaaataggatagagaaggtaggtgtgtgtttatgatcgtttggttggagatgatatttttattttttatttaaaggtttttttaggtttttttttttttttttttttttttttttttttttttttgagatggagtttcgtttttgtggttaagattggagcgtaatggcgtgatttttattcgtcgtaatttttgtttttcgggtttaagtaatttttttgttttagtttttttgagtagttgggattataggtatgcgttattacgttcggttaattttgtatttttagtagagacggggtttttttacgttggttaggttggtttcgaatttttaattttagatgatttgttggttttggtttttaaaagtgttgggattataggcgtgagttatcgtgtttagtcggtattttattattattattattattttattttatttatttattttttgagacggatatttgttttgttgtttaggttggagtgtagtgttataattttggtttattgtaatttttgttttttgggtttaagcgatttttaagattttttagtagttgggattataggtacgtgttattacgttcggttaatttttgtatttttaatagagatagggttttattatattggttaggttggtttcgaatttttgattttaagtgatttgtttgtttcggttttttaaagtgttgggattataggcgtgagttattgtgtttagttttttacgtttttttttttttttttttttttttaaagagatagggttttattttgttgtttaggttggagcgttatgttaaaattatagtttatcgtagtttaaaatttttgggttttagtaatttttttgttttggttttttaaagtgttgagattataggtgcgcgttatagtgtttagttatttaagtatttttgtttttttatataataagcgtttattattttatatatattaaaaaataattttaatatggataaattttggggatattatgtaagtgaaataagtttattataaaaaggtaaatattgtatgatttttttatattgaagtatttaaaggagttaaatttatagaaaaaaaagtagaatggtggttgttaggagttgggagagaatgaggaaggaagaattgttgtttaatgggtatagagttttagatttgtaaaatgataaagttttggagttttgttatttaaaatagagtgtgaaaattgttaagatgattaattttatgttatacgttttttattataatttttaaaataaaataaataaatttttaaaattaaaaaattaattttaagtattcgttttatttgtatgtgaattatggattttttattaattttggaatattaacgttttagaattttattttttaggtataatttaaggaaagaaaaaaaagaaagggagagaaaaattggaatagtgaaagaaaaaagaattgtatgaagtttgggcgtcgtggtttatatttgtaattttagtattttgggaggttgaggtaggaggattatttgagtttaggagtttgagattagtttgggtaatatagtaagattttgtttttataaaaaaaaaaaaaaaagttttaattatttaagtatggtggtgtttgtttatagttttagttatttgggaggttgaggtgggaggattgtttaagtttaggagattaaggttatagtaaatcgtgattatattagtgtattttagtttgagttatagagtatgattttgttttagaaaaagaaaaaattgtatggaggaaagatttggaagattatattttaataggattcggtaatattttttttttttattttatattatttgtattatttgttttatgataaaaaaaatttaaaaatagaaatatataaaaatgaaattaattaaaaaattttttaaaaatattttgtagtttgtgatatttaggaataaaattaaaatgaaaatattttggttaaagaaaaaattttagttaggcgtagtggtttatgtttgtaattttagtattttgggaggtcgaggcgggtagtttatttgaggttaggagtgtgagattattttggtttatttttattaaaaatataaaaattagttgggtgtggtggtgtacgtttgtaattttagttgtttgaattagggggtagaggttatagtaagtttagattatgttattgtattttagtttgagtgatagagtaagatatcgtttaaaaaggaaaggaaaggaaaga

SEQ ID NO: 13 - DNA, 17293 bp, Artificial Sequence
  chemically treated genomic DNA (Homo sapiens)
gaaaaaaggaggaagagttgagttgtgtttagtttattttttttatatttattaatgagatataggttgagtatttttaatttaaagtgtttgggattagtagtattttagattttggattatttttagattttggaatatttgtatatatttaatgagatattttggggatgggaattaagtttaaatataaatttatttatgttttatatagattttatatatataatttgaaggtaattttatataatatttttaataattttgtgtataaaattaagtttgtgtatattgaattatgggaaaataaaagtgttatttagatatttttttggaaaatttgtggttgttcggcgttattattatttatgattttgaatttatatgttgtattattttttttatatttatttatatttattagttaaaaaaaaagattattaatatagtgaaaaagtaatgtgtttagggtaagtaagtagtatagtagtattattaaaataatatttggagatgttgaaaaaattgtgttgtatgtttgtgttttgattgtaatttgttacgtgaggttaggtgtggatttttgtttttttttttttttttttttttagagataaggttgttttgttatttaggttgtagtgtagtgatattattatatttggttgtagttttgaatttttgggtttatgtaatttttttattttaattatagtggtataattatatttggttgtagttttgaatttttggatttaagtaatttttttattttaattttttaagtagttgggattattggagtgtattattatgtttggttaattttattattagtagagattaagtttaggttggttttaaatttttggttttaggtaatttttttattttagttttttaaagcgttgggattataggtgagagttattatattatttgttagtgtggaattttttttttttttttttttttttttttttgatacggagtttcgttttgtagtttaggttggagtgtagtggcgtaattttgttttattgtaatttttgttttttaggttttggtttaagtaatttttttgttttagttttttaagtagttgggattataggtatgcgttattatgtttagttaagttttttatttttagtagagatggggttttgttatgttggttaggtttatttcgaatttttgattttaggtgattcgttcgttttggttttttaaagtgttataggcgtgagttattatatttggtttatttattttttatatttagattatttaacgtagttttggtttttattatttttaaggtttgtggttgtataattgaatttttttagcgaattttgtttttgtttgatgtagttagagtttgtttttattgtttgtatttaaagaatatgtattagttttttatggttgttagtttttaattattataaatttggtggtttatatgaacggaaatttattattttaaagttttggaggttaggagtttaaaataggtcgtatggggttaaaattaaaatatttttagggttatgtttttttggagattttaggggagaatttatttttttgttttttttgattttagaggttattattattttgtaattgaaaagtaggttagttgtttataatatttagagtttagttaaaaagagtaaggtttgggacgaaaaaatgaatttattttgaagttagtttgtggaaatggtacgaagtattttgttttaaatgtgttattttttttttggagtagaaagcgggttttttataaggtggtgggaggaagtaagtagggggagggcgttttcgttagttttggtggtttaattgttgggtagttgatttagtgtttttttgggtagaagtaagttataaaagtggttaagtggatacgtttttaatatttttttttggtaggtgtgagttcgaagtaattttttagagggtagaagttttaaggtgaaagttttttagcgggtatgttttgttttgttaattttttaagaattagatgaatttgttttgaagggagtgtttggtgaagaagttggtaaaattttttttttagaaatttaaagaaatttaaagattaaattagaagtgggagtaggaagaaaggagaagagaaaataaattttaaaaggaattggtcggatacggtggtttatttttgtaattttagtattttgggaggttcgagataggcggattatcggaggttaggaatttgagattagtttggttaatatggtgaaattttatttttattgaaaatataaaagttagtcgggggtggtaggggcgtttgtaattttagttatttacgaggttgaggtaggagaattttttgaatttaggaggcggaggttgtagtgagtagagattgtattattgtattttagtttgggtgatagagtgcggtttttttttaaaaaagaaaaaaaaaagatttaatttgtgatttattatattttaaagtgtattgaataaattttatattttgtgtttttatggatagttttttttatttttttttttgggagttttaagttttgttataattattatagggattgatggtagaaagggaaggttgtttttattttttttgtttggtttttgtgtatagaaaattttaataaattttggttttattggattgaagtgaattttggttatagagaggttttttgtagtttgtttttttatttttttgtttataagttttgtaatttttagggtatttgtttgttatttttagttgtttttgtttttgtttttagagttttgttttgttatttagtttggagtgtagtggtgttattttagtttattgtaatttttatttttcgggtttaagcgatatttttgttttagtttttttaatagttgggattataggtatgcgttattatattgggttaatttttttgtaattttagtagagacggggtttcgttatgttggttaggttggtttcgaatttttgattttaggtgatttgttttttttttaggtttttaaagtgttgggattataggcgtgagttattggatttggtttatttttagttttaattgtgagtttgttattgtgtgattttggttattacgtatttttaggttttagtttttattttgaataatagatataataattttttttttttttaatgttattgggagtatttaataagattaagtaggtatattgtaaaagtttagcgtggcgatgagaaatgaatgttgatttttgtgtggtaaggaagagattatagttgggttgggtatagtggtttacgtttgtaattttagtattttgggaggtttaggcgcgcggattacgaggttaggagattaagattattttgattaatacggtgaaatttcgtgtttattaaaagtataaaaaaaattagttaggcgtggtggtgggtatttatagttttagttacgtaggaggttgaggtaggagaatggcgtgaatttaggaggtggagtttgtagtgagtcgagatcgcgttattgtattttagtttgggtaatagagcgagattacgttttaaaaaaaaaaaaaaaaagaagagattatagttgaagggatagtaaatttattattaagatgtagaaaatgagttgttaggagtttgtggggaaatataatcgttttattatatatttttaattaaaggtttaaagaggtttttggagttggatgaaatttttatatattaaaaagttgtagaaattatttttttatttaagagggttattttttttgagaaaaattatttttttttgattttaaaaggttaacgttttttttaatataaaggtaaaatttgttttaaatttaagtttttaaatttattaagaatttattatagaattttaaaaaatttattaaaatatataaaggagaggtgtttttttaattatattatatagcggtttatatttgtaataaataaaatcgggattttttggggggggagtgggacggagttttatttttgttgtttaggttggagtgtaatggtttaattttggtttattgtaattttcgttttttgggtttaagtagtttttttgttttagttttttaagtagttgggattataggtatatgttattatttttagttaattttgtatttttagtagagatggggttttattatgttggttaggttggtttcgaatttttgattttaggtaattcgttcgttatggttttttaaagtgtggggattataggcgtgagttatcgcgttcggttaaaattcggattttgttgtaattgtaattttgtatttcgttttgttaatattttttcgtatgattaaattattttatataataggggtattttaggatataaattggttgtaatttatttaattaattttttattgttggatatttggagtattgtttttattttatggtttttttcgggtttttgggttaagtgttgtaattaataattttgttatacgaatttttatttatatttttgattttatttattgaattcgtggaagtggaattgttggattaaagggtatttgaaatatattattaatttgttttttaagagtgattttatttatttaaatttttacgcgtaatttaataggattttaatgttgttgttggtgtcgttaattgttaaatgtcgaagtatatttttcggtttgattttttgttttttttcgcgttttttcgtttatttcgtatattcgttatttttagtatatgttggttcgttttttttttatttcgtattaattttgtttaattaaaagtaaagttttttagtatcgtcgtgtagttggtaaggtgaagagttcgtcgtgtttaggggcgggcggaacgggttgacggacgcggttatgggttagtgtgagcggcgagtgggacgtgcgtggcgtgcgtgcgttgatttgggaagtattggatttgtgaggcgtgcgaattggtggtagtgagagatttcggcggatatggtttttagcgtgttagcggtagaattcgagtattttaaaggtattcgggtcgtgttgttggggtttttcggggtcggtaaagggatttaggtgagcggtaggattgggtttggcggcggagtttgttgaattttaaggttaaggcggtcggagatttagaagttttggatttgttcggagcgggtcggggattaaggtttgcggggaacgttggtcggggtttcggttttggtggggtatttcggagagggtttaaattggaggtcggggtagtttgagttaggattggagtgttcgagggatttagtgttgaagtgttgggttagggaatgtgagggttgattaattttattaagggtttagagattggaaaggtttgaggggtagagtgagttttgggtcgaggtatttagattataggttgaatggaggtaattagttttatggtttaggttatttgcgagttggaggtgaattgtttagaattagggttatattttaggtattggaggtcgggagattttgataatgatttatgatttagggggaggggaggagaagtatttttaatacgtggggtagagtgagaggtgatatgtgttgtgtgagttagttgaattgagatgggaggaaatttaaggttttttttgtttgaaagttgggggtgaatgtgtagaattggtttatagtttggagatttatgagtcgtaatttttgagtagtgtttataataagggttgggagtgtttatgggatttggtttggagttaggatttgaggttattgaaggttaagtagtttgggatgacgtaaatgattttagatgaaaaggaatttgaatttttttttattttgtttttattatttttgtttgtttgtattttttttttttttggtttttatttatttttttttttttttattttgttgttgtttatagggaatttgaaattttaattttattaattaataggttaaaaaataggtttagaaaggttaggtggtttttttaaattagtgaaatgagttttatgagtttgagattttaggaattatggagttagagtttgaagttattatttgttttagtaggtaataggggttttatttgggatttgggttttttttagatttgggatataatggggttatagattagggttgggatcgatgattttatttcggatttggaagttcgtaggttggattattgatgttttttttttgtttggggtttggtattgtatttggggttttaagtttttggtttttgtttgttgttaggttttaaagagggaagtttgagtttttaaatgaaagggaatttgaggattgttttgtgttcgtttttttttttttagtatttgttaagttttaaaaattttggtaaatagattattttatttatttttggtattttttgtggtatttagtatattatttggtttttgatggggttagtggaagtggatgaatgttatagattaatgtgggtgataaagaaagaagttttggaatattttatttatttttgtgatttgggtattaagttagaaaatatagtttttttttttttttatagattgagatgatttttttttggagtttatttgtatttgatttttttattttttatttttagcgttgttgatattttttttttgttgttgttatatttatttattgggtaatttgtagtttagggaagtttaattttagattttgtagatttttgttgtgagtgattaagtataaatagtagtttaaatgttttattgttttttttttttttttttttttttttgagatagggttttattttgttgtttaggttggagcgtagtggtgtgagtttaagtaatttttttattttatttttttaggtagttgggagtataggtatatgttattatgtttagttaatttttaaataattttttgtagagatagggttttgttatgttgtttaggttggtattgaatttttggatataggcgattattttgttttgattttttaaagtgtagggattataggtataagttattatgttttgagattttttttttaatttatattgaagttaataattttagtaattatggaatggataatttatattagtatagtattgggataagggttttataatttagttagttatgtaattttcgagttttagtgtttttatttgaaaaatggggataatatttattttgtttatttagtattttatgagtatttaatattggggatataaagtattgggtaagattgataaagtttttgtttttattaattaaatatttataatgatattggaaaattatgatatatgtgtgtgtgtgtgtgtgtgtgtgtgtgtgtgtgtgtgtattaagtatttataatttagatgatagtttgttatatagtaggtatttaataaattttgatttttttttattttagtaatatattttttttttttttttttaatttggatgttttagtgtaagatatgatttatttaggaagtttagaagaatattatattaatgagttgattgataagggtgtatgaagatgagagttggttagagaaggttttgtagaaatagaggagatgtgattagagttgggagttgaaaggataagatttatataagttatttaatttttgtatattttttagagttgtaataataggaatattggtgattgtatgtatttttgtggagtttaaaaaaaagtttaagtttgggtaatatggcgaaattttatttttataaaaaaatgtaaaaattagttaggtatggtggtgtgtgtttgtagttttagttatttaggaggttgaggtgggaggattatttgagttttggaggtagagtttgtagtgagttgggattttattattgcgttttagtttgggtaatagagtgagattttgttttaaaaaaaaaagattttaaattagattttataaatggtagtttataataatatttagtttgtagagatattttatatattttaattttttattatgaagaattttgaatatataaaagaagataggatggtataatgagtttttatttagttttaattattaattggtggttttcgtttttttagttattttttttttataaattattataaagtattttttaggtattataatattttatttgtaaataatattagtatgtattgttaaaagataatttttaaaaatataagtataatattttttaaaaaattaataatttttatttaaatttttttttgtgttattaatgtgataattttaagttttttttatttatttatttttttatagataaagttttgtttagttgtttaagttggagtgtagtagtttaattatagtttacggtagttttagtttttttattttagttttttgaatagttgggattataggtgtatgttattatgtttggttaatttttttagtgttttaaagatgggggttttgttatgttgtttaggttggttttgaattatcgggttttttttttagttatttaagtagttgggattataggtatgtgttattgtgtttatttttttttttaatttataagtttttttttttttttttttttggggttttgtcgaagaaattggattatttttttttttttttttttttttttgagatagagtttcgttttgttgtttaggttggagtgtagtggtgtgattttggtttattgtaagttttgtttttcggatttacgttattttgttttagtttttcgagtagttgggattataggtgtttgttattatattcggttaattttttgtatttttagtagagacggggttttattgtgttagttaggatggtttcgattttttgattttatgattcgtttattttggttttttaaagtgttgggattatagtcgtgagttattatgtttagttttagaaattggattattttttttgggagtattatattattttttgggaatttttagttgtatttttttggtgtatttaatatttttttttgttttttttattttttgtaaattggtggtttatatttaattagtatatatttaatttaatttaggtttaattttttggtttaattattttataggtggtgggtgttgtgttttttttgaggaggtatatggtatttttttgtttttggtgtttatagttatgttgtttagtgtttaggtttagtaattcgttatggatggtgaaatggtggtattttaattatattgttttttggttatttattagttgaaatatttttataaagagaaatttttttttatttattgtttcgttatttcgtgatatggttggtatagaaaagttaggataaatgtttgatttattttttttgttagtttttaaaatagtaggttgattatagagcgttttcggttatgtaattttttttaaaaatttagagttttagttttttttgagaaattagaagatttggtagtgatgtttttattttagtgtggtagtagttatttgtagttgtgtggtattgttgttttggatggtttgtgtgtttttttgttttttgtacggttttttttattgtttattgtttatatttgatttattttatatagttgtattgtttgtttggtttttattggtagatgtttgtaattttatatgtaaaatttttaatttggggttagtgtttagtgtttgtttagtaatgtttgttttttttttgttatattttgttatatttgcgtaatttagtattttatgtgttttatgttgtatgattgaaataatgtttttttttaaaattttttatttttaattaaagtagttaaatattttaaaattattcgtttttgtattaatgtaatgttttaaaatatttataatatttgggtttgttattttatttaaataattttatttttttgttttttttttggggttggatgttttttcggtgtggttaaaattaaaggtatgttttttggtttttttgttaatttttttttattttttttatgtgttaaatttatgtttaatttttcgaggttaggtacgtttaggtagttttatgggttagatgtattagttatgttattgtagtgatatttgtaatatttttgagatttatatttttatttttttttttatagttggagaaattgaagtttgaatggtttgttttttaggttatatagtaagtaatttatagagtttgtatttgaatgattttaaagtttttgttttttttgttgttatttattgttttaggttagattttttttttatcgtgtgtatgttaggagggtgtaataattataatatagttatttattgtttagttacgtgatagatttttaagttaaagattttatatgtattatttgatttaattttataatattaggagataggttttttttattgatagagaaattgagtttagaggttttattttgttttaggatatatatgtagtaagtagtaaaggtaggatttgaatttatgtttgtttgatttttgagtagttattaatttatattgttgttgtgtaatttagatgaagaggtagaaatgaatatgaatggaaaaatatatataagtgtagggtgttaggtgggaagtattagatgagtgattttgaatgttgggttagtttagggatagaataagaattataatttgttgaagtttttttgtttatttttttgtttatttagtgaggttggtaatgatttttttagtaagttaagagatatttgaaatgtaaatataggtttttgtgattaaaaaaaaaataatttaagttataagatatttagaaaaagtgaatagtttgatttattttataatgtgaatagatttgtgtagtttatatttattattaagaaatagaatattgttagtattttgaaattttttttgtgtttttttttaggaggatagttattaaggttttttgggttgtttgttttaaagttttatagtgttatggttaagagttagggtttggtaatttggtttgttgttagtttttttattagttttgtgattttgggtaatttagtttttgagttttatttgtaaaatgtagttaaaaatagtttttattttatgggtttattatgtattatatatattaagtatcgtaaaataatgtatggaaaattgtttggtatgatgtatatgtttaaagttagttaatgttaatatgaatttttagcggaagaaggggtagttggggaggtgtttttgttttaggagatagggttttattttgttatttaggttggagtgtaatggtacggttatagtttattgaagtttcgaatttttgggtttaaatggtttttttattttagttttttaagtagttggattataagtatttgttattatgtttagttaattaaaaaaaaaaatgtagaaatggggttttgttgtgttgttcggattggttttaaatttttggttttaagtgatttttttaaagtgttgggattatagatgtgagttattgtttttagtttagttaggtttttgatgggagaaatgtatttagaagtatattatagaaaaggtttagattaatattggagtagagagggtatttttgtggagtgaggagtttgtgttgaggtttttggagaggtatttatgtcgcgtatttgggaattatgcgtaagagtagtttgtttgtagtggtgtaggacgtaaatatagggtatttgtggaagtaagttgggagggtttggtaggttttagaagttgattgtggagggtagttgagtgttaggttaagatatttggattttttttttattgtattatagagatgttgaaggtttcggaatgtgtatgttttggagggtaggtagtatatttaatagtgttttaagatatgattttagttgtatgtgtaggaatattgatagtaggagtgataaagattggaggtataaaggtaattgtgttaggtatagtgatatgcgtttatagttttaattatttcggaagttgtggtgggaggattgtttgggtataggagtttggggttatagtgtgttatgttgattaggtgtttgtattaaatttagtattaggttaggtattgtggtttgtgtttataattttagtattttgagaggttgaggtaggtagttcgtttgagtttaggagttggagattagtttgggtaatatgacgaaattttatttttataaaaaatataataattagtcgggtatggtattgtatgtttgagttttagttatttgggagattaaggtaggaagattgtttgagttcgggagtttgaggttatagtgaattatgaatatgttattgtattttagtttgggtaatagagtgagattttattttaaaaaaaaaaaaaaaaaaaaaagtttaatattaatatggtgattttttaggagtaggagattattaggttgtttaaggagaggtaaatcggtttaggttagaaaaagagtaggttaaaatttttatgtcgatgtgtagtgggttaatatttgtgaagttattgtgttttattttgggtaatatagtaagattttatttttaaaaaaatataagaagaagatgatggttataaggtgagaagattggtgaatttgggattaaattaaatttttaggattgatagtttttttttattttttagttgttaggttttatgttggatgtttttgtatacgtaattttattaaatttttataatagtttagtagatagatattgttttttgttttatggataaagaaaacgagattttagaaaaggtaatgtaatttgtttaggatgatatagtgaataaacggtagagttcgttttttaatttagatttatattattataaaatttagtttttgttattatattagggttttatatattgtatttattagaatttgaggtgttgtttgagagttatttaattataaattttaaaggtgggtttaggaaatgttttagatgattgataatatattgaaatttgagaattatttagtttattatgttgtttttttagtggttttagtatttttataattattttagagttttttattttatagagtttttatagaggtgatgagtttgttttttgggtttagtaatagtttttggttgatagtaatagattatgattgagtgtgggttttagatttttgttttttaaagtgtagtttagagtttagttatttatttaggtcgggaagtttgtttaaaatgtaggtatttaggttttattttattgaattagaatttgtattttttttttttttttttgagacggagttttatttttgttgtttaggttggagtgtagcggtacgattttaattttagtttattataatttttgttttttagttttaagcgatttttttgtttttgtttttttagtaattgggattatgttattacgtttagttaattttgtatttttagtagagacggggtttttttatgttggttatgttggttttgaattttcgattttagatgattcgtttgtttcggttttttagagtgttgggattataggcgtgagttatcgcgtttagtcggaatttgtattttaatagtatttttttagtgatttagagtttgtgaatggttgttttaaagtataagtttgaagtgtgaggggattataataaagttattttattaggtttttgtagtttgtaaataaagattaatgtaaagaagaaagattatggaaggaagttttttatttattgaatgtttgttgcgtgtttgatgtttttggtattttattttatttatttttataagaattttgtgaagtagttattatttttattaaattgatgaggaaattgatattttgagaagttaagtatttagtttaagattatacggttattgagtgttttagttaggaattaagtgtaaatttgtttgattttaaaatttatgcgtgttttttatagtttattatattgatttttaggtagttagtaggaaatgaaggaattcgttttttttttttttttttttttttttttttttttttgagataagagttttgttttgttatttaggttggagtatagtggcgcgattttcgtttattgtaatttttattttacgggtttaagtagttttttgttatagttttttgagtagttgggattataagtatttattattacgtttggttaatttttgtatttttagtagagacggggttttattattttggttaggttggttttgaagttttgaatttttgatttcgtgatttattcgttttagttttttaaagttttgggattataggcgtgagttattatatttagttaggaattagtttttttttttattggtgtgtgtttttttatttagttgtagaatttaattatttggaatagtgtataagagttttgtagtttgggagtgataaaaatagaataggttttgtgttaatagtttttttttgtggtgttttggttagtttttttatttgagtaagtttgatttttaaattgtttatttaggttaattttaatagtaatgagaaagattggtagaaagtattttttagatgtacggttatagtgttagtttggttttttattgttagggtttttgatatttattgattttgtaaagtatagaattttggttttttgggtttgtttgtttgtttgagacgtagttttgttttttcgttcgggttggatttcggttcgtcgtaatttttattttttgggtttaagtaatttttttgttttagttttttaagtagttgggattataggtacgtgttagtacgtttagttaatttttgtatttttagtagagatggggttttattatgttggttaggttagtttcgaatttttgattttcggtgatttattcgtttcggttttttaaagtgttgggattataggtgtgagttattgcgtttaatttagagtatagagtttttttttgttgttgtttttttgtgagatggagttttgttttgtttttaggttggagtgtaatggcgtagttttagtttattgtaatttttaatttttgggtttaagcgatttttttgttttagttttttgagtagttgggattataggtatgcgttattatgttcggttaatttttttatattttagtagagacggggttttattatgttggttaggatggttttaattttttgattttgtgatttattcgttttggttttttaaagtgttgggattataggcgtgagttattgtattcggttaagtatagtttttaatgtttttttattagattttattttgttatgaagttatttttttgttttaattgaattggtttatgaattataaattagttttatttatgtattttttattgtgtgtatttaagtatgtatttaagaaaatttttaattatataaaaattagttaggtacgtggtttgtgtttgtaattttagttattgggaggttgaggtaggagaattatttgagtttagggagttcgtggttgtagtgagtcgtgatcgtgttattgtattttagtttgggtgatagagtgagattttgttttaaaaaaaaagaaagaaagaaagaaaagaaaatttttagtgaattgatttgttggaatcgggatttaaatttgtttagtttataaaataattgaacggaaaaagttaaaattgagttttttgaattgattatattttttgtaaattttgtatttttttttttttattgtaaagttagtgttgagttgtttagggtttttttttgttttaattttgtatttttatgtataatttattaaatataagttttttaagtatatagtttatgttttttatttatttgttttttaggttttcgatagggtttttgggaaaggtattagtaaatgttttttttttgtatgaatgaatataggattaggataggggttatggtaatagttagtgtttattgagcgtttattatatgttagggtttgtatatattgaattttgtataatttttttattaatttagtgatatagatattattattatttttattttatttagaggaaatttgaaatttagaaaggtgaagtgatattttaagttaattttatataatggttagtggatttggagtttgtaaattagtagtttaatttttaagtttgtgtttttgattaaaatattataatgttttttaaaattagtatgtaagtgtttattatttgttaagtgttttttgtatatattttagttaatttttatagttattttttgagatggagttttttttgtttttattttaaatagataaggaaattgaaaagtgaggtggttattatagtatagttatttagtgatagggaaggaggaaaatttagttttgtttgggggtaaattgtttttagttgtttttttgatttagtagttgtagtatatgataattgtatatttatttttttggtaaatgtttatttagtatatgttatgtgttaggtgttgtattaagtgtattatatatatgattttatttaaattttatagtaattatgtgaagtgttggtattatttttatttttttttttttttttttttttttttgagacgaagttttattgttatttaggttggagttggagtgttgtggtgtaattttagtttattgtagtttttgtttattagatttaaataatttttttattttagttttttgagtagttgtaattttaggtaagcgttattatatttagttaatttttgtatttttagtagagacggggtttttttatgttggttaggttggtttcgaatttttgatttcgtgattcgtttattttagttttttaaagtgttggggttataggcgtgagttattatgtttagtaagtttttttatttataatggggaaattgaaatttatgtgttattagtgtgttgagtggaaatagtgataattaatatttatgatttttttttgtgtgttagttgtattgttttaagtgttttatatatattattttatgtaatttttattataattttataattagtatatgttagaatgtaatataaggtatttttatttttattataggtaaggaagtaggtatttgtttatgtttatatagttagtaagtggtagggttaggtttatatttaggtagtttgattttatagtttgtaatgtaattgaattttggtttttgtttttttttttgtagg

SEQ ID NO: 14 - DNA, 17293 bp, Artificial Sequence
  chemically treated genomic DNA (Homo sapiens)
tttatagagaggaagataaaaattaagatttaattatattataggttgtggagttagattgtttaggtgtgaatttggttttgttatttattggttatgtaaatatgggtaaatgtttatttttttatttgtaatggggataaaagtattttatattatattttaatatatattgattatagggttatggtaagaattatatgaaataatatatgtaaagtatttaaaatagtataattagtatataggaaggagttataaatattaattattattatttttatttaatatattagtgatatataagttttagtttttttattataaatgggaagatttgttgggtatggtggtttacgtttataattttagtattttgggaggttgaggtgggcggattacgaggttagaagttcgagattagtttgattaatatggggaaatttcgtttttattaaaaatataaaaattagttgggtgtggtggcgtttgtttggaattgtagttatttaggaggttgaggtaggagaattatttgaatttggtaggtagaggttgtagtgagttgagattgtattatagtattttagttttagtttgggtgatagtgagatttcgttttaaaaaaaaaaaaaaaaaaaaaagagaataaaaatagtattaatattttatatggttgttgtgaggtttaaatgagattatgtatataatgtatttggtataatatttggtatataatatgtgttgaataaatatttgttaaagggatgaatgtataattgttatgtattatagttattgggttagggaggtaattaggagtagtttgtttttaggtagaattgggtttttttttttttttgttattaagtagttgtattatggtggttattttattttttagtttttttatttgtttaaaatgaaggtaaaaaaggttttattttagaaggtagttgtgaggattagttgagatatatataaagagtatttggtaaataataagtatttatatattagttttaggaggtattatagtgttttggttaagagtataggtttgagagttaaattgttggtttgtagattttaggtttattaattattatgtaaaattgatttaagatgttattttatttttttaggttttaaattttttttaagtaaaatggagatggtaatagtatttgtattattgggttgatgagaagattatatagaatttagtatatgtaggttttggtatatagtaagcgtttagtgggtattggttgttattataatttttgttttaattttatatttatttatataaaaagaaaatatttattaatgttttttttaagaattttgtcgggagtttgggaaatagatgaataaaaggtatagattatgtatttaaagagtttatatttggtgaattatatatgagaatgtagaattagaataggaagagattttagatagtttaatattggttttgtagtgggaaaaaaagaatgtagaatttataaggaatataattagtttaaggagtttaattttagtttttttcgtttaattgttttataaattaagtaggtttagatttcgattttaataaattagtttattgggagtttttttttttttttttttttttttttttttgagatagagttttattttattatttaggttggagtgtagtggtacgattacggtttattgtagttacgaattttttgggtttaggtgatttttttgttttagttttttagtagttgggattgtaggtataagttacgtgtttggttaatttttatgtaattgggagtttttttaggtgtatgtttaggtgtatataataaaaggtatatagatagggttggtttgtgatttatggattaatttagttaaagtaaagaaatgattttatagtaaaatggaatttagtgagaaggtattaaaaattgtatttggtcgggtgtagtggtttacgtttgtaattttagtattttgggaggttaaggcgggtggattataaggttaggagattgagattattttggttaatatggtgaaatttcgtttttattaaaatataaaaaaattagtcgggtatggtggcgtatgtttgtagttttagttatttaggaggttgaggtaggggaatcgtttgaatttaggagttggaggttgtagtgagttgagattgcgttattgtattttagtttggagatagagtaagattttattttataaaaaaatagtaataaaaaaaaattttgtattttgggttgggcgtagtggtttatatttgtaattttagtattttgggaggtcgaggcgggtggattatcggaagttaggagttcgagattagtttggttaatatggtgaaattttatttttattaagaatataaaaattagttgggcgtgttggtacgtgtttgtaattttagttatttgggaggttgaggtaggagaattgtttgaatttagaaggtggaagttgcggcgagtcgagatttagttcgggcgaagaagtaagattacgttttaaataaataaataaatttaaaaaattaaaattttgtattttgtaaaattagtgaatgttaggagttttgataatgaaaaattaggttggtattgtggtcgtatatttagagagtgttttttgttaattttttttattgttgttgaaattaatttgggtaaataatttggaggttaggtttgtttaagtggaaaggttgattaaaatattatagagaagagttgttagtatagaatttgttttatttttattatttttaaattgtaggatttttatgtattgttttaggtgattggattttatagttagatgaaagaatatatattaatagggaagaaaattaatttttggttgggtatggtggtttacgtttgtaattttagaattttgggaggttaaggcgggtggattacgaggttaggagtttaagattttaagattagtttggttaagatggtgaaatttcgtttttattaaaaatataaaaattagttaggcgtggtggtgggtgtttgtaattttagttatttaggaggttgtggtagagaattgtttgaattcgtgaggtggaggttgtagtgagcggagatcgcgttattgtattttagtttgggtgatagagtaagatttttgttttaaaaaaaaaaaaaaaaagaaaaagaaaaaaagaaaacgaatttttttattttttgttggttgtttgggagttaatgtggtaggttgtaaagagtacgtatgggttttgaagttagatagatttatatttgatttttagttaaggtatttagtagtcgtgtgattttgggttaagtatttaattttttagagtgttagtttttttattagtttaatggggataatgattattttatagggtttttatgaggataaatgaaataaagtattaaaaatattagatacgtagtaggtatttaataaataaaaggtttttttttatggttttttttttttgtattagtttttatttataggttgtagaaatttaatgaaataattttattatagtttttttatattttaaatttatgttttagagtagttatttatagattttaaattattggaggaatgttgttaaaatgtagatttcggttgggcgcggtggtttacgtttgtaattttagtattttaggaggtcgaagtaggcggattatttgaggtcgggagtttaagattagtatgattaatatggagaaatttcgtttttattgaaaatataaaattagttgggcgtggtggtataattttagttattagggaggtagaggtagaagaatcgtttaaaattgggaggtagaggttgtggtgagttgggattgagatcgtgtcgttatattttagtttgggtaataagagtgaaatttcgttttaagaaaaaaaaaaaaaaatgtagattttagtttaatagggtagggtttaagtatttgtattttaagtaagtttttcggtttggatgagtggttgggttttaaattatattttgaagagtaggggtttgaagtttatatttagttatagtttgttgttgttagttaaaaattgttgttgagtttaagaaataggtttattatttttatgaaaattttgtggggtggaggattttggggtaattatgggaatgttaaaattattagagagatagtatggtgggttgagtggtttttaaattttagtgtattattaattatttagggtattttttaggtttatttttaaagtttatgattgagtggtttttaagtagtattttaggttttgatgggtatagtatgtgaagttttgatgtagtggtagagattgggttttgtagtggtatagatttgggttaggaaacgggttttatcgtttatttattgtgttattttgaataaattatattattttttttaaggtttcgttttttttatttatagaatagaaaatagtgtttatttgttgaattgttgtggggatttaataagattacgtatgtaaagatatttagtatagggtttgataattaggaaataaagggaaattattagttttagagatttggtttaattttaaatttattagtttttttattttgtaattattattttttttttatgtttttttagaaatgaggttttgttatgttgtttagggtggagtatagtggttttataagtgttagtttattatatatcggtatgggaattttggtttgttttttttttgatttgggtcgatttatttttttttaggtaatttagtggttttttgtttttgggaggttattatattgatgttgaatttttttttttttttttttttttgagatagggttttattttattgtttaggttggagtgtagtgatatgtttatagtttattgtggttttaaattttcgggtttaagtaatttttttgttttagttttttaggtagttgggatttaggtatgtagtattatgttcggttaattattgtattttttgtagagatggggtttcgttatgttgtttaggttggtttttaatttttgagtttaagcgagttgtttattttagttttttaaagtgttggaattataggtataagttatagtgtttggtttgatgttgaatttagtgtagatatttgattagtatagtatattatagttttaaatttttgtgtttaagtaatttttttattatagttttcggagtagttgggattatgggcgtatattattgtgtttggtataattatttttgtgtttttagtttttgttatttttgttgttaatgtttttatatatgtagttagaattatattttaaaatattgttggatatgttatttattttttaaaatatatatatttcgaagtttttaatatttttgtggtataatagaggaagagtttaaatattttagtttggtatttagttgttttttataattaatttttaaaatttgttaagtttttttaatttatttttataagtgttttgtgtttacgttttgtattattgtagataaattgtttttacgtatggtttttaaatacgcggtataaatgtttttttaaggattttaatataagttttttattttataggaatgttttttttgttttaatattggtttaagttttttttgtagtatatttttgagtatattttttttattaaaagtttaattgggttggaagtagtggtttatatttgtaattttagtattttgggaggattatttgaggttaaaagtttgagattagttcgggtaatatagtaagattttatttttatatttttttttttaattagttgggtatggtggtaggtatttatagtttagttatttaggaggttgaggtgggaggattatttgagtttaggagttcgaggttttaatgaattatgatcgtgttattgtattttagtttgagtgatagagtgagattttgttttttaaaataaaaatatttttttaattattttttttttcgttgaggatttatattaatattagttaattttgagtatgtgtattatgttaagtagttttttatgtattgttttacggtatttagtatgtataatatataataaatttatgaggtaggaattatttttaattgtattttatagatgaaatttaggggttaagttgtttaagattatagagttagtaaaagaattggtaataggttagattattaagttttagtttttagttatgatattataaggttttaagataaataatttaaagagttttagtggttatttttttggaagggagtataaggaggattttaaagtgttggtaatattttgttttttgataatgggtgtaagttatataaatttgtttatattgtaaaataaattaagttgtttattttttttaggtattttatagtttaagttgttttttttttaattatagaaatttgtgtttgtattttagatgttttttaatttattgaggaaattattattaattttattgggtggataggaggatgaataggagaattttagtaaattgtagtttttgttttatttttgaattaatttaatatttaaagttatttatttgatgttttttatttggtattttgtatttgtatgtatttttttatttatatttatttttgtttttttatttagattatatagtaataatgtaaattaatgattatttaagagttagatagatatgagtttaaattttatttttgttatttattatatgtgtgttttgaggtaagataaagtttttgagtttagtttttttgttagtaaaaaggatttattttttagtgttataggattaaattagatgatatatgtaaaatttttagtttgggggtttgttacgtaattgagtaatgggtgattatgttgtaattattatatttttttgatatgtatacggtaggagaaaaatttaatttggggtagtagatagtagtagaaagagtaggagttttggagttatttagatgtaagttttgtaaattatttgttatgtagtttagagaataagttatttaaattttagtttttttaattgtaaaaggggaaataagagtgtgggttttagagatgttgtaagtattattgtaatgatataattgatgtatttgatttataagattgtttaagcgtgtttggtttcgaagaattgggtataagtttgatatatggaagaaatgaggaggggttggtaaaaaaattaagaaatatatttttggttttgattatatcgaaggagtatttaattttaaaagggaggtaaggaaataaagttatttaaataaaataataaatttaggtattatagatgttttaaaatattatattgatgtaaaagcgagtagttttgaaatatttaattattttagttaaaagtgaggagttttaaaaggaaatattattttagttatgtaatataaagtatataaaatattgagttacgtaggtataataaagtatagtaggaagaaaataaatattattgagtaggtattaggtattaattttaggttagggattttatatgtaagattgtaaatatttgttagtgggagttaagtaggtaatgtaattgtatgaaatgagttaaatgtaagtaatgggtagtgaagaggatcgtgtaggggataggaagatatatagattatttaaagtagtaatgttatataattgtaagtgattgttgttatattggaatggaggtattattgttaggttttttggttttttaagagaaattggagttttggatttttaagagaaattgtataatcgaaaacgttttgtggttaatttattattttgaaagttgataaagagaataaattaagtatttattttgatttttttatattaattatattacggggtaacgaaatagtagatgaggggaagtttttttttatagaaatattttagttaataaatgattagggaataatataattagaatattattattttattatttataacgaattattgaatttagatattgaatagtatgattataaatattagagataaggaaatattatgtgtttttttagggagagtatagtatttattatttgtgaagtagttgggttaaaaaattgaatttaaattgaattaagtatatattaattaagtataaattattaatttataggaaatagagagggtagaggaagatgttaagtatattaggggaatataattgaaaatttttagagagtggtataatatttttaggaaaaataatttaatttttggggttggatatgatggtttacggttataattttaatattttgggaggttaaggtgggcggattatgaggttaggagatcgagattattttggttaatatagtgaaatttcgtttttattaaagatataaaaaattagtcgggtgtggtggtaggtatttgtagttttagttattcgggagattgaggtagaatggcgtgaattcgggaagtagagtttgtagtgagttaagattatattattgtattttagtttgggtaatagagcgagattttgttttaaaaaaaaaaaaaagaaaagaaaaataatttaattttttcggtaaaattttaggaaaaaaagagaaggggaatttataaattaaaagaaaggatgggtatagtggtatatgtttgtagttttagttatttgggtggttgagggaggagttcggtagtttaagattagtttgagtaatatggtaggatttttatttttaaaatattagaaaagttagttaggtatggtggtatgtatttgtaattttagttatttaggaagttgaggtgggaggattgaggttgtcgtgagttatgattgggttattatattttagtttgggtaattgagtaagattttgtttgtaaaaaaataaataaataaaagaaatttaaaattattatattggtaatataaaagaaaatttgaataaaaattgttgattttttaaaggatattatgtttatgtttttaaaaattattttttagtaatatatattaatattatttataaatgaaatgttatgatgtttgggaggtgttttataataatttgtgaagggagaatggttagaggagcgaaggttattagttaatggttggggttgggtaagggtttattatgttattttgtttttttttgtgtatttaaaattttttataataaaaagttaaggtgtatgagatgtttttgtaggttaaatgttattgtaggttattatttgtaaagtttgatttaagattttttttttttgagataaagttttattttgttgtttaggttggggcgtaatggtgagattttagtttattataaattttgtttttaaggtttaagtgatttttttattttagttttttgaatagttgggattataggtatatattattatgtttggttaatttttgtatttttttgtagagatggggtttcgttatgttgtttaggtttgaatttttttttaaattttataaaaatatatataattattagtatttttattgttataattttggaaagtgtatagaggttaaatgatttgtgtaaattttatttttttaatttttagttttaattatattttttttatttttataaagttttttttgattaatttttatttttatgtatttttattaattaatttattagtataatgtttttttaaattttttgaataaattatgttttatattgaaatatttaagttgaaggaggggaagggagatgtgttattaagataaaagggagttaaaatttattgagtatttattatatagtaggttgttatttaggttgtgggtgtttgatatatatatatatatatatatatatatatatatatatatatatattataattttttagtattattgtgaatgtttagttgatgagggtaagaattttattagttttgtttaatgttttatatttttaatgttaggtgtttatgaaatgttgaatgagtaaggtaggtattatttttattttttaggtaagaatattgaggttcggaagttatatagttagttaaattataaaatttttgttttagtattatattagtataggttgtttattttataattattgaaattattaattttaatatgagttaagaaaaaaattttagggtatagtggtttgtgtttataatttttgtattttgggaggttaaggtaggatgatcgtttgtgtttaggagtttaatattagtttgggtaatatagtaagattttgtttttataaaaaattgtttaaaaattagttgggtatggtagtatgtgtttgtatttttagttatttgggagggtgaggtgggaggattgtttgagtttatattattgcgttttaatttgggtaatagagtgagattttgttttaaaaaaaagaaaaagaaaaagaaaaataatgaagtatttgagttattgtttatatttgattatttatagtaaaagtttgtagagtttaagattaaatttttttaagttgtagattatttaataaatgagtgtggtagtaataggaaagagatgttaataacgttgaggataaaggataaagggattaggtataggtaagttttaaagaagaattattttagtttgtggagagaaaagaaagttgtattttttgatttagtgtttaggttataggaatgaatggagtgttttagaatttttttttttattatttatattaatttgtgatatttatttatttttattaattttattaagggttaagtaatgtgttaggtgttataaggggtattaagaatgagtaagatggtttgtttgttaagatttttaaaatttggtaagtgttaggaagagaaaagcgggtatagggtagtttttagatttttttttatttgggagtttagatttttttttttgaagtttaataataggtaagagttagaggtttagggttttaggtgtaatgttagattttaagtaagaaggggatattaataatttaatttgcgggtttttaaattcgaaatgagattatcgattttaattttaatttatggttttattatgttttagatttagaaggggtttagattttaagtgaggtttttgttgtttgttagggtagatggtaattttagattttaattttatggtttttgaggttttaggtttatgaaatttattttattaatttgggaaagttatttgatttttttgggtttgttttttaatttgttgattgataaagttaaaattttaagttttttataaataataataaaataaaaaaaggaaaaaataaataaaaattaaagggaaggaagatataaataaataaaaataataaaaataaaataaaaaaaaatttaagtttttttttatttaaaattatttgcgttattttaagttgtttagtttttagtagttttaggttttaattttaagttaggttttatgagtatttttaatttttattgtggatattatttaaaggttgcgatttatgggtttttaggttataaattagttttatatatttatttttaatttttaaatagggagagttttaggtttttttttattttaatttaattggtttatatagtatatgttattttttattttgttttacgtgttggagatgtttttttttttttttttttaagttataaattattattaaaatttttcgatttttagtgtttggaatgtaattttgattttggataatttatttttaattcgtaggtaatttgggttataaagttaattgtttttatttagtttgtaatttagatgtttcggtttagggtttattttattttttaaatttttttagtttttagatttttagtggaattaattagtttttatattttttaatttaatattttaatattgaatttttcgggtattttaattttaatttagattgtttcgatttttaatttggatttttttcgaaatgttttattagaatcgagatttcggttagcgtttttcgtaggttttagttttcggttcgtttcgggtaggtttagggtttttagattttcggtcgttttgattttggagtttagtaggtttcgtcgttaagtttagttttgtcgtttatttgggtttttttatcggtttcgggaggttttagtagtacggttcggatgtttttaggatattcgggttttgtcgttggtacgttgggagttatgttcgtcgaagttttttattgttattagttcgtacgttttataggtttagtgttttttaggttaacgtacgtacgttacgtacgttttattcgtcgtttatattggtttatagtcgcgttcgttagttcgtttcgttcgtttttgagtacgacggattttttattttattaattgtacggcgatattgaggaattttgtttttgattggatagaattggtgcgggataaggaaggggcgggttagtatgtattaagggtggcgggtgtgcggagtgggcgggaaaacgcgaaggaggataggaggttaggtcggaaggtatatttcggtatttgatagttgacgatattagtaataatattgaaattttattaaattgcgcgtgggagtttaaatgggtaaaattatttttagaagataaattagtaatatgttttaaatattttttggtttagtaattttatttttacgaatttaatggataaaattaaggatatgagtaaagattcgtgtaataaagttgttaattgtaatatttagtttaaaagttcgagaaaaattataaaataaaggtaatattttaaatgtttaataataagagattggttaaataaattgtaattaatttgtattttggaatatttttgttgtataagataatttaattatgcgggaaaatgttagtaaagcgagatataaaattgtagttataataaaattcgaattttggtcggacgcggtggtttacgtttgtaatttttatattttgggagattatggcgagcggattatttgaggttagaagttcgagattagtttgattaatatgatgaaattttatttttattgaaaatataaaattagttgggagtggtggtatatgtttgtaattttagttatttgggaggttgaggtaggagaattgtttgaatttaggaggcggaggttatagtgagttaagattgagttattatattttagtttgggtaataagagtgaaatttcgttttattttttttttaaaaaatttcgattttgtttattataagtgtagatcgttgtgtagtgtgattagaggagtattttttttttgtatattttaatagattttttaaagttttatggtaaatttttaataagtttaaaaatttaagtttaaaataagttttatttttatattaagaaaaacgttaattttttaaagttaggaaaagatagttttttttaaaagagatgatttttttggatagggaaataatttttatagttttttggtgtgtgaaagttttatttagttttaagggtttttttggatttttagttaagagtgtgtaatgaaacgattatgtttttttataggtttttaataatttattttttatattttgatgatgaatttgttatttttttagttgtggttttttttttttttttttttttttgagacgtggtttcgttttgttgtttaggttggagtgtagtggcgcgatttcggtttattgtaagttttattttttgggtttacgttatttttttgttttagttttttgcgtagttgggattataggtgtttattattacgtttggttaattttttttatatttttagtagatacgggattttatcgtgttagttaggatggttttgattttttgatttcgtgattcgcgcgtttgggttttttaaagtgttgggattataggcgtgagttattgtgtttagtttagttgtggttttttttttattatatagaagttaatatttattttttatcgttacgttggatttttatagtgtatttgtttaattttgttggatatttttaatgatattgaaggaagaaaggattgttatgtttattatttagaatggaagttgaggtttgaagatacgtagtgattaaagttatatagtagtagatttataattaagattgaggatgagttaggtttagtgatttacgtttgtaattttagtattttgagagtttgaggggggggtagattatttgaggttaggagttcgagattagtttggttaatatggcgaaatttcgtttttattaaaattataaaaaaattagtttagtgtggtggcgtatgtttgtaattttagttattagggaggttgaggtaggagtatcgtttgaattcgggaggtggaggttgtagtgagttgagatggtattattatattttaggttgggtgatagagtaagattttgaaaataaaaataaaaataattgaggatgataagtaggtgttttagagattatagggtttatgggtagagggatgggaaaataagttgtaggaagtttttttgtggttaaaatttattttagtttaataagattagagtttattgaaattttttatgtatagggattaggtaaggggagtaggagtagttttttttttttattattaatttttatagtgattgtgataagatttagggtttttaggagggaaagtaaggaagattatttataaagatataaagtgtaagatttatttaatatattttgaagtgtaatgaattataagttaagtttttttttttttttttttgagaaggagtcgtattttgttatttaggttggagtgtagtggtgtaatttttgtttattgtaattttcgttttttgggtttaagagatttttttgttttagtttcgtgaatagttgggattataggcgtttttattattttcggttaatttttgtatttttagtagagatggggttttattatgttggttaggttggttttaaatttttgattttcggtgattcgtttgtttcgggttttttaaagtgttgggattataggagtgagttatcgtgttcggttagttttttttaaaatttattttttttttttttttttttttgtttttatttttgatttaatttttgaatttttttgaatttttaaagaagaaattttattaatttttttattagatattttttttaaggtaagtttatttaatttttggaaagttaatagagtaaagtatgttcgttagggaatttttattttggaatttttattttttgggggattgtttcgaatttatatttattaagagggaatgttgaaagcgtgtttatttggttatttttataatttatttttgtttaggaaggtattaagttaattgtttagtagttaagttattagagttaacggagacgttttttttttgtttatttttttttattattttataaaaggttcgttttttgttttaaaagggaagtggtatatttaaggtaggatgtttcgtgttatttttataagttagttttaaaataaatttattttttcgttttagattttgttttttttaattggattttgaatgttgtgagtaattaatttgttttttagttataaaatgatggtagtttttgaagttagaaaaggtaaggaaatgggtttttttttagagtttttaaaggaatatgattttgaagatattttgattttagttttatacgatttattttgaatttttgatttttaaaattttaaggtaataaattttcgtttatatagattattaagtttgtggtaattggaaattagtagttataggaaattagtatatattttttggatataagtaatagaaatagattttagttatattaagtaaaaataaaattcgttgagaggatttagttgtataattataggttttggaagtgataggagttagggttgcgttgggtaatttagatataaggaataagtaggttaggtgtggtggtttacgtttataatattttgggaggttaaggcgggcggattatttgaagttaggagttcgagatgagtttggttaatatggtaaaattttatttttattaaaaatagaaaatttagttgggtatggtggcgtatgtttgtaattttagttatttgggaggttgaggtaggagaattgtttgaattaggatttgggaggtagaggttgtagtgagataagattgcgttattgtattttagtttgggttatagagcgagatttcgtattaaaaaaaaagaaagaaagaaagaaagaaaattttatattaataggtggtgtggtggtttttatttgtaattttagcgttttgggaggttgaggtgggagaattgtttgaggttaggagtttgagattagtttggatttggtttttattaataataaaattagttaggtatgatggtgtattttagtagttttagttatttgggaggttgaggtggaaagattgtttgagtttaggaatttaaggttgtagttaggtatgattgtgttattgtggttgaggtggaaggattgtatgagtttaggagtttaaggttatagttaggtatgatggtgttattgtattgtagtttgagtgatagagtaattttgtttttgaaaaaaaaaaaaagaaaaaagataaaaatttatatttgattttacgtgataggttgtagttaaaatatagatatataatatagtttttttagtatttttaggtattattttgatgatgttattatgttgtttatttattttgaatatattatttttttattgtattaatggtttttttttttaattgataaatgtgaataagtgtaagaaaaatgatatagtatataaatttagagttatgaatgatggtgacgtcgaataattatagattttttagaggggtgtttaagtgatatttttgtttttttatgatttagtatatataaatttggttttgtgtatagaattattaaaaatattgtataaaattatttttaggttatgtgtataaggtttatataaaatataaatgaatttatatttagatttggtttttatttttaagatattttattaagtatatgtaaatattttaaaatttgaaaatgatttaaaatttgaaatattgttggttttaagtattttggattagggatatttaatttgtattttattagtgagtatgggaagaatgaattgagtataatttagttttttttttttttttt

SEQ ID NO: 15 - DNA, 11178 bp, Artificial Sequence
  chemically treated genomic DNA (Homo sapiens)
  unsure (4636, 5359)
aattattagtttggtttatgtaatatatttttatgggttatttaatatatgttagattatattttaagtattgaggatgtggtattgaattaattgttttaatttttttttttttgagttaataatttttagtagagggggtagaaagtgaatgaataaatattttaatatataattagatttggagttttagaaaataatgtaaaatatatattttggttttttattttggaagatgtgtatttgttgtttatttattttaaagtttggtggatgagattaagaatggggttttgggtttggcgtgattattgtagagtgggatagtatttaggttgttagttgttttttgtattttttttgatagtgattgtttagatttagaatatagatattatataggtattatttaagagaattgaaaatatatatttatataatgtatatgaatatttattatagtattatttataatagttaaaaagtagaaataatttaaatatttattatatgtatgaataaaatgtggtataattatataatgaaatgttatttagttataaataggagtgaaatatggatacgtggtatattgaaaatattaagttaagtgaaagaaaatagttatagaaaattatgattttatttataagaagtgtttagggaggtcgggcgcggtggtttacgtttgtaattttagtattttgggaggttgaggcgggcggattatgaggttaggagatcgagattacggtgaaattttgtttttattaaaaatattaaaaattagttgggtatggtggcgggcgtttgtagttttagttattcggagaggttgaggtaggagaatggtgtgaatttaggaggtagagtttgtagtgagtcgagatcgcgttattgtattttagcgtgggtgatagagcgagatttcgttttaaaaaaaaaaaaaaaaaaaaagaagtgtttagggtaggtaaatttatagatagaaagattggtagttgttgggggcgagagggagatgagaagaaggagtgattgttaatgggttagggtttttttttgaagtagtgaaagtgttttgaaattagggagtggtgatggttgtataatattgagattatattgaaagttgttgagttttatatttaaaaatggtagatgttatagtgtgtgaattattataataaagttgttataaaaaaatgttgggattattttttatttgaaggtgaggattttatgaagattaaatgaaatgaaataatataaagtatttaaagtttagtgtttgggatatagtatgtatttaattaatggtggtggttgttgtttttgaagtaatacggtttaaatatttgtaagttggaatttttatttatttattgttatatttttagaatatgatttgttatggagtatgtagttaataaatataatattagttaaatgaatgtggtttgtttatatttatgtttagttatatttattaatgtggttgttttttttgtttcgttttttgtagtatgttagtgaatttgtattaattgggtttgtgttttgagttatttgtttagtggtagtatttaagagatatggagttttttatagtttattttttagtgtttaagttggggttgggggtatagatttagtttggggaggtaaggtttttatttaaattaaaggtgaaagtggggaggttaggtatggtgttttatgtttgtaattttagtattttgggaggtagatgtgggcggattatttgaggttaggaattggtgattagtttggttaatatggtgaaattttgtttttattaaaaatatagaaattagttgggcgtggtggcgtatatttataattttagttatttgggaggttggggtaggagaatcgtttgaattcgggaggtagaggttgcgatgagtagagatttattattgtatttattttcgtgatatgagattttatatatatttattttagtgtaggaaaattggtatatttttatttggaagtattttggagttaattgagataaaagatgttaaggaataaatttgtttttgtatttgttatttttttttttttttttttttttttttttttttttttttttttttatatatatatatatatatatatattttttttttttttttttttttttttttttttttttgagtcggagttttattttgttatttaggtcggagtgtagtggtatagtttcggtttattgtagttttcgttttttaggtttaagcgatttttttgttttagtttttcgagtagttgggattataggtatatattattacgtgtggttatttttgtatttttggtggagatggggttttattatttggttaggttggttttgaatttttgattttatgatttgtttgtttcggttttttaaagtgttgggattataggcgtgagttatcgtatttggtttttgttttttaatattaattgtagtttttgttggagttttgttgatgggattagtattttaagttagtttatgggtttagtttttttttgaaaagatggtttagtttagagggtttagggttttttttggtgtttattaagtataaatgtgtgttttatgtaagagggaaaatttttgagaattggaagatagaaatattgtattagagagatttgggagttagagtttaataatgtatttaaaataggttttaatagttattttttttatagattatatagagttttggtttattatagggtttttagagtatgttttattttatttttttttttagttgggtgagatttaggatgtagtataggttaagtaagggtttgattggttttgagatttttttagtttaaaggtttattttatatttatttattgttgtttttttggtttttttgaggatttttatatatatttgaagaatattatttgtgatttgaataaggtattttatgatagtaagtttgttttagttatatgtatatttgaatttttgtatatttttttagtgggattttttttttttttttttttgagatatagttttattttgtgatttaggttggagtgtagtggtatgaatacggtttattgtggttttgatttttcgggtttaagtgattgttttattttagttttttaagtagttggggttataggtatgtattattatgttcggataatttcgtatttttttggtagagttagggtttttacgtgttgtttaggttggttttgaattttttagtttaggtagtttgttcgtttcggttttttaaaatgttgagattataggtgtgagttattatgtttggttaggattattttttagaagtagttttttttgattaaagttatgttttgtataaaatttagaaaatataaaacggtagaagaaatgaaagtagtaagtaaaagttatttttaattttttaagggtaatttaagtaaataaattaaaggtgattgttttaggttgtgtgattagggaaggtttttttaggaggtgaatgtttttatttatatcgtaaataatgagtttgtgatgattaggaataggttgttttaggaagaaggaatagtaagtgtaaaggttttaaggtgggaattagtatagcgtgtttgaggaatagaaagaagtggtagtatgtttggagtttagtaagtagaagggatgtggaagtaggttaggttagagagacgagtaggtgttagattaggtagagtttgggggattttggtaaggattggattttattttaagggtattggaaagttaaggaagggttttttataggataatgatatgaaaagatttattttttaaaagttgattttttgtttgttgtgtggagaggtgatttaggtgagtaagagggagattagtatggatgaggagagtggtttgtggtttgaatttgttggtggtaaaggaggagagaaataaagggatttgggatatatatgaaggtagagttgattggatataatgaattggttgtgagaggtgatggagagaaagaagtttataatgaattttagggttttgttttgagcgtttgtttgggtgaatgtgttatagggttgaatgaattagaatgtgtttaattaattttttgtggaatatttgggttatttgtatattttgttgattaagaatgtttttggaagagtatatgtatgggttagttttttttttttattttgttgtatttttgatagtaagatgggttattagtagttgtattggagttattgttgaaaatttagttagggttttcgtttttgtcgcgtttgtttaaatcggtattgtttgatttagaaatgtggttttaatacgtgttgttagtgttttcgttagtacgcgaacgatattagttttattaagttggattaaatgatttttttttaaaggattatttaaggtatttatttaatataaaattacgatagttttttgtatataaaataaatatttaaataaagaacgtttttataaatgttattgtgtataaattattggatagatatattttttttgggataggtttttaggaatgaaattattggttaaaatagaatttaaattatagggagaatttttttttatgaagtggngatttggtttgttcgatttttgatttttggaaggtcgcgtcggtagggcggggtacggcgcgttttagtagttttgcgtgggggcgaggaggtggaggagggcgaggaggtggagaagggcggggaggtgtagcgtggcgtttagttcgtttgttattcggtttcggcgttgggttgaggggaggggtgttgttgaaagtttttttttttttttgtaggggcggtcggcgagttttagtgagagcggacggtgttagaggtagggggtcgagaaataaagttttcggggtttttttcggggtcgcggtcggggttgcgcgtttgatcgttttttttttcgcgaaggtaatggtttttaaatttttgcgcgcggttattttcgggtcgttcggttcgggtaagggtatcgtgtgttagaggatcgtttaaaattttggtttttagtatttttttagcggttattttttgcgggagaatattaaggttagtatcggtgaggggtttcggaaacgagggtcgggggcgagtcgcgttgggttggggtgaggttttggagggattggggttttcggattacggcgtttttttttcgttcgcgtgtggtcgtttaggttcgtacgtgtcggggcgtatgtagttgtcggtcgcgcggtttaatcgcgtttggggaggaggtcgaggttttagggacggtcggtgggaggtgtttacggtttttttttntcgttttttttgtcgcgaggaatagttcgagttattcggtcgagggaacgataattaggtagggagatttcggagttttcgtttcgcgttgttttttttaagataaagtcgttttcgtattcgttagttttggttttttttttcgagttcgtagagagtcgcgcgtcgtttaacgcgggagtatagaggtggagggtcgtttatatataatagtcgggcggggtcgcgtttttcggaatttgtggggcgggggggtttataatttaaatttttttagtttttttacgtagtttcgggtttcggggtagagttttgggtggttttgaaaggtttgtttgttcgttgtcgttttttaaggtaaattttttttagtaatttttttttttttcgaagtcgtcgggtttggtcgttaggagattcggaggagattcgttttgataaattatattttgtaatgtagtttttttggaaatggttttttgagttgttttttttggtatgagatgttttttttggttggcgtggtgaatttggggatatatagatcgtttgattttttagtttgacggggttgagtgcgtttttttttttttttttttttattttacgtttatattagtttcgaaagaattggcgttaaaaggcgagaggtagcggttgtgttgttgcgaggtttttaatttttttgggatggagatgttggtaattagtaatttttttatgaaaagttgttttttttagtaggggttttttattgtcgatgtattttttaaggatgttcgggttggttattgtttattatggattaattattcggagatttgtattttagaagtatagattggtttgaaaaggaaggtggaggatagtattagaaaataaaaggaaagtttaaaagtaaggaattaagaagtatttttagaattgtattttttattttttaagtagattgaaaaagcggatttttataggaaattttttttttatttttatgttttaaaaggaagaattatgtgtattagattgtatttgagttttttgttgtgggtattgttattttaagtgcgtttattttgattttaatatatttatatgtattttatttttgaaatgttgcggtttgaggggagagcggtttgagggggaaggttggtttttattttaatggttttgtgtttaggttgggtttttttatggtaggggtatggagttagtgaaggaagatagtgagaagagatgagtttattttataattttttgtatttgattaggagatttgtttttttttatgagtttattttataattttttgtattttatttggtgatttgtttttttttggaatgaagggttttatattgtttattttgggattggatttatagttttttttatgtttaaagagagtgtgatgggaagtagtttatttttgtatttttttaggggttttgaaaattttttatttgttttttttttttgtttttttttttttttttttttttttttttttttttaatttttttgtgttttaaattttagtttttatttttttttaaatgtttttattttttttttagtgattttttttggagtgagaaatgattatgaaatgtttagatttttttttttttgttgggaattaagtagttttttgtatgagttaattaaaaaaaaaattttattaaagaaagaagaaaaataaaggatagtaatttgttttgaaagtggtttgtttttagtgaattttcgggttatcggattattttttttttttagaaggtttgagaattttataggtttattgtttggtaaataaaatatttttttttacggtatttatttttttgtttgttatttgttgtttgtttttagttgattttttggtgggaaatataattatttttttgtatgtattttttataatggaaggtttgaaggagacgatgaagtataataaaaatttaggaaatagaatcgtgtaggaatttgaattggaaagtagtttcggttatttgttttagtttggatttgggtatatttttgtttatatggtttttttttttttgtagtttggtgaaaagttgtttttttaggaaagggttattttgatgttattgttttttggaagtttttttttatttgttttggtagaatttattttttttttttgtatataattttttttttttgagacgagtttcgttttgttatttatatcggagtttagtggcgttatttcggttcgttgtaatttttgtttttcgggtttaagcgatttttttgttttagttttttaagtagttgggattataggcgtttgttattacgttcggttaatttttgtatttttcgtagagatagggttttattatttttacgaaggttcgaggttaggttggtcgcgaattcgggattttagatgatttattcgttttggttttttaaagtgttgggattataaatgtgagttatcgtatttgatttttttttttttgtatatgttttattgattttaatgttgtagttatatattatgtagtgtaaaaatgtttgttttatatttagtaagatatttgttgagtggttgttgtgcgttaatgttttaggtgttgggggtaatagtattaagataattttgtgttttttttattattatttatagataggggttttgttttagtgtttaggttggttttaaatttttggtttagttttttaaaatgttgggattataggtgtgagttattgtatttggtttatttttgggttttttgttttttttgtttatattattgtataatttttattttgaaatttggaggatagggattaggtaaagtatttaatgtataaaaggagtttatcgagtttgtattaaaggtttgggttataaattttagatagtatattttagtttagaagttaagtaatttatagtatagagattattttgtttaattagttttgatttatggtaaaagtttgtgtttaatatggatttgagattagttttatggtagttgttatttattggttttttttatattgtttagagtggtataggttgaggtttattagatattttatttgaagagttatatttatatttttggtttagattttttttagtatattgtaagagtaaatagaagggagagtttttttagattgttaggagttgggttttattttttgttgtaagaaatattagtttttttttgtgtatgtatgggtatgtatatgtatgtatgagtatatatatatatatagggattggtattttattgagtgagttttattataaattttgaataaattttgatatttaatgatagatttttttattgggttatatttaaaggatatgtaaattttgttttaaaggttggagaaatagtggtattttttaaaattatattatattggatttattattttaagtgtaggaaaattggtatatttttatttggaagtttttggagttaatgaggaggttaatttatcgttatagatcggttgaaattagaagtgtcgtgtgtgatatttgtgattcgaatttagtaatataatttcgtttgtgttttatttatattttatttttgtttgagatggagttttgttttgtcgtttaggttggagtgtagtggcgtgattttggtttattgtaagtttcgttttttgggtttatattatttttttgttttagtttttcgagtagttgggattataggcgtttattattatatttggttaattttttgtatttttagtagagacggggttttatcgtgttagttaggatggttttgattttttgatttcgtgatttatttattttagttttttaaagtgttgggattataggcgtgagttatcgcgtttgatttatttatatatttttttgagatggagtttcgttgtcgtttgggttgaaatgtagtggtacgattttggtttattgtaattttcgttttttaggtttaagtgatttttttgttttagttttttgagtagttgggattataggtgttcgttatttaatttatttttttatttttattttttttgcgatagagttttgttttgttatttagtgtagtggcgtagttttggtttattgtaatttttgtttattggatttaagcgatttttttgttttagttttttaagtagttgggattagaggtatttattattatatttagttaatttttgtattttttagtagagatggtattttattatgttagttaggttggtttcgaatttttgattttaggtgattcgtttgtttcgattttttaaagtgttgggattataggcgtgagttattatatttggttttttgtgttttttaaaaaattgaattggtttgttgagaatgtgatttttttttttttttttttttttttgagatggagttgttgtttagattggagtgtaatggtttaatttcggtttattgtaatttgcgttttttgggtttaagtgatttttatgttttagtttttcgagtagttgggattataggtatgtattattatgtttggttagttttgtatttttagtagagatagggtttttttatgttggttaggttggttttatattttcgattttaggtgatttgtttgtttcggttttttaaagtgttgggattataggtatgagttattgcgtttagttgagaatgtgatttttagtatttattataagttttttagagagtagaggattttatttgtggtaaaatatatacgcgtgtatatatatatatatatatatattttatatatttagtttttagaaatgtatagatttaaattgatagtttgttttgttgaatttaatttataatttttatatataggaaattaatgttttaaatgaagatagaagtagtttttttttgaaagtatttatgtggttttgttaaaattttatatttttttatgaatttggtattttattaataatatttagttgtttttataattgtgttagtaaggttttatttgtttatattgaggttgatgaaaagaagtaaagttgttgttgtttgtattatgtggtattttttttagattattggaatttttttttttttggtttttgtaagaaatggttgtgttttttatttttttttagttttttgtatattgtgtggttgattatgttttttgttattataaattgttgagaggtttagtgtttaatttgtggtttatttttaggaattatttagggtttttttttattagtttttttatgtattattttgttttttgattttattttttatttttattttttttttgattaatttattttttttttttttttttttgtttttttggttttttttttttttttttttttttgagatagggtttttttttgttgtttaggttggtatttagtagtgtagttaatgagtttgagttttttgtaagtgtaaatttttgggtttaagtgatttttttattttatttttttaaagtattagaagtataggtacgagttatatacgtggttattgtttttttttttttttttttggggggggggcgggaggaggggtggtgttatgttattttaaagagttgtttttataattttttgggagataaatgtgttaaataagtaatagttttattttattgacgtgaatattttaaaaatttaaaatatgtttataattttttaggaatttttttttatattaggaaggatggagagaaggtaaaattaagagttggtaagttttgtgtttgggaaatttttttgaatattttttttttttttgtttttttaataga

SEQ ID NO: 16 - DNA, 11178 bp, Artificial Sequence
  chemically treated genomic DNA (Homo sapiens)
  unsure (5820, 6543)
tttattaaaaagataagaaaaaaagaggtatttaagaaaattttttaaatataaagtttattaatttttagttttgttttttttttattttttttgatgtgggaagaaatttttaggaagttgtagatatgttttaagtttttaaaatatttacgttaataaggtgggattgttgtttatttaatatatttattttttaaaaaattataaaagtagttttttgagatagtatagtattattttttttttcgttttttttttaaaaaaaggaagaaagaaatagtggttacgtgtgtggttcgtgtttgtatttttggtattttgggaggatgaggtgggaggattatttaagtttaggagtttgtatttgtagggagtttaagtttattgattgtattattgaatgttagtttgggtaataggaggagattttgttttaaaaaaaaaaaagaaagaaagaaattaagaaagtaggaaagaaagaaagaaagataaattggttaagaaaaaaataagagtagaaaataaagttaagaagtaggatggtatataaaaaagttgataaagagaagttttggataatttttagaggtaggttataaattgggtattgagttttttaatagtttatggtaataaggaatatgattaattatataatgtatagaagattaaaggaagatgagaagtataattattttttatagagattaaaggaaaaaaagttttagtgatttaaaaagaatgttatataatataaataataatagttttatttttttttattaattttaatataagtagatggaattttgttgatataattgtaaaagtagttgagtgttgttagtggaatgttaagtttataaaaggatgtgaagttttaataaaattatataaatatttttaggagaaaattgtttttatttttatttaaaatattaattttttatatgtagaaattgtgagttaggtttagtagaataaattattagtttaaatttgtatatttttaagaattaaatgtgtggggtgtgtgtgtgtgtgtgtgtgtgtacgcgtatgtgttttattataaatgaaattttttgttttttggggaatttataatgaatgttaagaattatatttttagttgggcgtagtggtttatgtttgtaattttaatattttgggaagtcgaggtaggtagattatttgagatcgggagtatgagattagtttgattaatatggagaaattttgtttttattaaaaatataaaattagttaggtatggtggtgtatgtttgtaattttagttattcgggaggttgaggtatgagaattatttgaatttaggaggcgtaggttgtagtgagtcgagattgagttattgtattttagtttgggtaataattttattttaaaaaaaaaaaaaaaagagagagaattatatttttaatagattaatttagttttttaaaaaatataaagagttaggtgtggtggtttacgtttgtaattttagtattttgggaggtcgaggtaggcggattatttgaggttaagagttcgagattagtttggttaatatggtgaaatattatttttattaaaaaatataaaaattagttgagtgtggtggtgggtgtttttaattttagttatttgggaggttgagataggagaatcgtttgaatttagtaggtagaggttgtagtgagttaagattgcgttattgtattgggtgatagagtaagattttatcgtaaaaaaaataaaaataaaaaaataaattaggtggcgggtatttataattttagttatttaggaggttgaggtaggagaattatttgaatttgggaggcggaggttgtagtgagttaagatcgtgttattgtattttagtttaggcgatagcgagattttattttaaaaaaatatataagtaggttaggcgcggtggtttacgtttgtaattttagtattttgggaggttgaggtgggtggattacgaggttaggagattaagattattttggttaatacggtgaaatttcgtttttattaaaaatataaaaaattagttaggtgtggtgataggcgtttgtagttttagttattcgggagattgaggtaggagaatggtgtgaatttaggaggcggagtttgtagtgagttaagattacgttattgtattttaatttgggcgatagagtaagattttattttaaataaaaataaaatataaataaaatataagcggaattatattattagattcggattatagatattatatacgatatttttaattttagtcgatttatgacgataagttggtttttttattaattttaagagtttttaaatggagatgtgttagtttttttgtatttgagatagtagatttagtataatgtggttttaaaaaatattattatttttttaatttttaaaataggatttgtatattttttagatatgatttaataaaagaatttattattaaatattagaatttgtttagagtttgtagtaggatttatttaatagagtgttagtttttgtgtgtgtgtgtatatttatatatatatgtgtatatttatatatatatagagaaaagttaatattttttataatagagggtaagatttaatttttggtaatttaagagaatttttttttttatttatttttgtagtgtgttaaagaaaatttgagttaaagatatgggtgtgattttttaaatgaggtatttgataagttttagtttgtattattttaggtagtgtaggaagggttaatgggtgatagttattatgaagttaattttagatttatattaagtataaatttttattataaattagagttaattaaataaaatggtttttatgttataggttgtttgatttttggattaagatgtattgtttagaatttgtgatttaggtttttaatatagattcggtaagttttttttatatattaggtattttgtttgatttttgttttttaagttttagagtggaaattgtataatggtataggtagaaagaataaaaggtttaagaatgggttaggtgtagtggtttatatttgtaattttaatattttgggagattgagttaagagtttgagattagtttgggtattaaagtaaaatttttatttataaataataataaaagaggtataagattattttaatgttattgtttttagtatttagaatattgacgtatagtagttatttagtagatattttattgggtgtgagataggtatttttatattgtatgatatatgattgtaatattagaattaataagatatgtgtagaggagaggaggttaggtgcggtggtttatatttgtaattttagtattttgggaggttaagacgggtggattatttaaggtttcgagttcgcgattagtttgatttcgaattttcgtagagatggtgaaattttatttttacgaaaaatataaaaattagtcgggcgtggtggtagacgtttgtaattttagttatttgggaggttgaagtaagagaatcgtttgaattcgggaggtagaggttgtagcgagtcgagatagcgttattgaatttcggtgtgggtgatagaacgagattcgttttaaaaaaaaaaagttatgtgtagaggaaagagatgaattttgttagagtaggtgagggaagatttttaagaagtaatgatattagaatggtttttttttgaaagagtagttttttattaggttgtaggaggaggaaagttatgtagataagagtgtgtttaaatttaggttggagtagatggtcggagttattttttaatttaaatttttatacggttttattttttgggtttttgttgtgttttatcgttttttttaaattttttattataaagggtatatatagaagggtggttgtgttttttattaggaaattagttaaaagtaaatagtaggtaatagatagaaaaataaatatcgtggaaaggaatgttttatttattaggtagtaagtttataagatttttagattttttgagagggaaaaataattcgataattcgaaagtttattagaaataagttatttttaaaataaattgttgttttttattttttttttttttttgataaagttttttttttaattggtttatgtaaaaagttgtttgatttttaatagaaaaaagaaaatttaaatattttatagttattttttattttagggaggattattggggaggaaatgaaggtatttgaaagagaatgaaaattaaaatttagaatataggaaagttaaaaaaaaaaaagagagagagagagaaagagagaataagggaaaagagtaaatggaaaatttttaaagtttttaagaaagtgtagaaataagttattttttattatattttttttaaatatggaaagggttatgagtttagttttaggatggatagtgtgaagttttttattttagaaggaaataagttattaagtaaggtatagagaattatggaatgggtttatagaaggaaataagttttttagttaggtatagagaattatggaatgggtttatttttttttattgtttttttttattgattttatgtttttattatgaagaagtttaatttaaatataaaattattaggatgagagttagtttttttttttaggtcgttttttttttaaatcgtagtattttaagaataaaatgtatgtgaatgtattaaaattaaaataggcgtatttgaggtaataatatttataatagaaaatttaagtgtaatttggtatatataatttttttttttgagatatgggggtgggggaagagttttttgtaaaagttcgtttttttaatttgtttaagagataaggaatataattttggagatattttttaattttttgtttttaagttttttttttgttttttggtattgttttttatttttttttttaagttagtttgtgtttttgaaatgtagattttcggataattagtttatgatgggtaataattagttcggatatttttgagaagtatatcgatagtaaaggatttttgttgggaagaataattttttataaaggagttgttaattattagtatttttattttagaagggttaagagtttcgtagtagtataatcgttatttttcgttttttaacgttaattttttcggaattggtgtgaacgtggagtgggaggagagggggaaagggacgtatttaatttcgttagattaagaaattaggcgatttatatatttttaagtttattacgttagttaaaggaggtattttatgttaagggaggtagtttaagaagttatttttaggaaagttgtattataaaatgtaatttattagaacgagtttttttcgagttttttgacggttaggttcggcggtttcgggaggggggggagttgttggggagagtttattttagaaggcgataacgaatagataggttttttaaagttatttagggttttgtttcgaggttcgaggttgcgtggaggggttggagaggtttaggttgtgagttttttcgttttataggtttcggggggcgcggtttcgttcgattgttatatgtgggcggttttttatttttgtgttttcgcgttaggcggcgcgcggttttttacggattcggaggagggggttagggttaacgggtacggggacggttttgttttaaggagggtagcgcgagacggaagtttcgggatttttttgtttagttatcgttttttcggtcgggtggttcgggttatttttcgcgataggaggagcggnggagaggagtcgtgggtattttttatcggtcgtttttggagtttcggttttttttttaggcgcggttaagtcgcgcggtcgatagttgtatgcgtttcggtacgtacgagtttgaacgattatacgcgggcgggggaagggcgtcgtgattcgggagttttagtttttttagggttttattttagtttaacgcggttcgttttcggttttcgttttcgaagttttttatcggtgttggttttgatgttttttcgtaagaagtggtcgttggagagatgttggagattaaagttttgggcgattttttggtatacggtgtttttgttcgagtcgggcggttcgaggatgatcgcgcgtaggagtttggaagttattgttttcgcgaggaggggggcggttaaacgcgtagtttcgatcgcggtttcggaggaagtttcgggaattttgtttttcggttttttatttttggtatcgttcgtttttattgggattcgtcggtcgtttttatagggggaaggagagatttttaataatatttttttttttagtttagcgtcgggatcgagtagtaggcggattgagcgttacgttatattttttcgtttttttttattttttcgtttttttttattttttcgtttttacgtaaagttgttgaagcgcgtcgtgtttcgttttgtcgacgcggttttttaggggttagaggtcggataggttaagttnttattttatgaaaaaaaattttttttatgatttaagttttattttggttagtagttttatttttagaaatttattttagagaaagtatatttgtttagtgatttgtatataatgatatttgtaagagcgttttttgtttgaatgtttattttatgtataaagaattatcgtggttttgtattgggtagatgttttggataattttttgaaggaggattatttagtttaatttaataaaattgatatcgttcgcgtattgacggaaatattggtagtacgtattgaggttatatttttggattagatagtgtcggtttgaatagacgcgataagagcgagaattttggttgaatttttagtagtggttttagtatagttgttggtgatttattttgttgttaggagtgtaataagataaaaggaaggagttagtttatgtatgtgtttttttaagggtatttttaattagtaaagtatgtaaataatttaaatgttttataaaagattggttagatatattttagtttatttaattttatagtatatttatttaggtaggcgtttagggtaaaattttaggatttattgtagatttttttttttttattattttttataattaatttattatatttagttagttttgtttttatatatattttaaatttttttatttttttttttttttgttattaataagtttaaattataggttattttttttatttatattggttttttttttgtttatttgagttatttttttatatagtaggtaaaagattaatttttagaaagtaaatttttttatgttattgttttatggaaaatttttttttggttttttagtgtttttggaataaaatttaatttttattaggattttttaggttttatttgatttggtatttgttcgtttttttgatttgatttatttttatattttttttatttgttaggttttaaatatattgttatttttttttgttttttagatacgttatgttaatttttattttagggtttttgtatttgttgttttttttttttggaataatttgtttttaattattataagtttattgtttacggtatgaatgaggatatttattttttggagaggttttttttaattatataatttaagatagttatttttaatttatttgtttaaattatttttaaggaattaagggtaatttttatttgttgtttttattttttttatcgttttatattttttaaattttgtataaggtatgattttgattagaaaaaattatttttaaaaaatgattttggttaggtatggtgatttatatttgtaattttagtattttgggaggtcgaggcgggtagattgtttgaattaaggggtttaagattagtttgggtaatacgtagaaattttaattttattaaaaaaatacgaaattattcgggtatggtggtgtatgtttgtagttttagttatttaaggggttgaggtaagataattatttgagttcgggaaattaaggttatagtaagtcgtgtttatgttattgtattttagtttaggttatagagtgaaattatgttttaaaaagaagaagaaaaaaaattttattggaagaatgtgtaaagatttagatgtatatgtggttaaggtagatttattgttatggaatgttttatttaagttataaatagtgttttttaaatatgtgtgaaaatttttaaagaaattaaaaaagtaataataagtggatatggagtggatttttggattggagaggttttaaaattagttagatttttgtttgatttgtgttatattttgagttttatttagttagggggggaaatggaatagaatatattttagaaattttgtaataagttaagattttgtatgatttataaaaaggataattattgaaatttgttttagatatattgttgaattttggtttttaagtttttttaatataatgtttttattttttagtttttagaagtttttttttttatataagatatatatttatatttaatgagtattaaaaagaattttgagttttttgaattaggttatttttttaaaaagaggttgggtttatagattaatttgaaatgttagttttattagtaaaattttagtaagagttgtagttaatattgagaagtagaggttaggtgcggtggtttacgtttgtaattttagtattttgggaggtcgaggtaggtagattatgaggttaggagtttaagattagtttggttaaatggtgaaattttatttttattaaaaatataaaaatagttatacgtggtggtgtgtgtttgtagttttagttattcgggaggttgaggtagaagaatcgtttgaatttgggaggcggaggttgtagtgagtcgagattgtgttattgtatttcggtttgggtgatagagtgagatttcggtttaaaaaaaaaaaaaaaaaaaaaaaaaaaaaaaaaaaatatatatatatatatatatatatagagagagagagagagagagagagagagagagagagagagagagatagtaagtgtagaaataggtttgttttttaatattttttattttaattaattttaagatgtttttaaatggagatgtgttagtttttttgtattgagatagatatgtatggagttttatgttacgagagtggatgtagtagtggatttttgtttatcgtaatttttgtttttcgggtttaagcgatttttttgttttagttttttaagtagttgggattatagatgtgcgttattacgtttaattaatttttgtatttttagtagagatagggttttattatgttggttaggttggttattaatttttgattttaagtgattcgtttatatttgttttttaaagtgttgggattataggtatgagatattatgtttggtttttttatttttatttttaatttaggtagaagttttgtttttttagattgagtttgtatttttaattttaatttaagtattgaaagatgggttgtgaagggttttatattttttgagtattattattagataagtagtttaaaatataggtttagttgatgtagatttattaatatgttgtaaaaggcggaataagaaagatagttatattggtgaatgtgattgaatatgaatgtgaataagttatatttatttgattagtattatatttattggttatatattttataataggttatattttggagatgtagtagtgaataaataaaagttttagtttatagatatttaaatcgtattattttaagagtaataattattattattaattaagtgtatattatgttttaggtattgggttttaagtgttttatgttattttattttatttaatttttataagatttttatttttagatagaaggtaattttagtatttttttatgatagttttattgtgataatttatatattataatatttgttatttttaaatgtaggatttagtagtttttagtatagttttaatgttgtataattattattattttttaattttagaatatttttattattttagaaagaaattttgatttattagtagttattttttttttttatttttttttcgtttttagtaattattaatttttttgtttgtagatttgtttattttggatatttttttttttttttttttttttttgagacggagtttcgttttgttatttacgttggagtgtagtggcgcgatttcggtttattgtaagttttgttttttgggtttatattatttttttgttttagttttttcgagtagttgggattataggcgttcgttattatgtttagttaatttttagtatttttagtagaaatagggttttatcgtggtttcgattttttgattttatgattcgttcgttttagttttttaaagtgttgggattataagcgtgagttatcgcgttcggtttttttggatattttttataaatggaattatagttttttgtgattgtttttttttatttagtttaatgtttttaatgtattacgtatttatattttatttttatttatggttaaataatattttattgtatggttatgttatattttatttatatatataatggatatttgggttgtttttattttttggttattatgaataatgttgtagtgaatgtttatatatattgtgtgagtgtatgtttttagtttttttgggtaatatttgtgtggtatttatgttttaggtttaaataattattattagaaaagatgtaaggagtaattgataatttgggtgttgttttattttgtaatagttacgttaggtttagagttttatttttagttttatttattaaattttaaggtagataaataataaatatatattttttaaggtgaaagattaaaatgtgtattttgtattgttttttagaattttagatttaattatatattgaggtatttgtttatttattttttgttttttttattagaaattattagtttaaagaaggaaaagttaaaatagttggtttaatgttatatttttagtgtttaaaatatagtttggtatatattagatgatttataaaaatgtgttgtatgggttaggttgatggtt

SEQ ID NO: 17 - DNA, 5150 bp, Artificial Sequence
  chemically treated genomic DNA (Homo sapiens)
tgtagttttagtaaatatagggttttattgtgttagttaggatggtttcgattttttgattttgtgattcgtttgttttagttttttaaagtgttgagattataggcgtgagttatcgtattcggtttaaataatttattttatttaaaaaatagttttgtttaatttcgtttatgagttgtgttgtgtttttaatgtttattaatagtatattgtttagttttggaaagtatttagttagatatttaaaaagtaatagaaattgaagggtaaaatagaagatggaataaaaattttttaatagtgtatttaatttaataggtttttaatttattagggtgttattggaatataattgtttttttggtttttgttatataagattaaagttaaattattaaatataattgtagtatttttgattttatatatttttttttttatatatttatatagacgttcgaagtattttttagggtagaattgttttttgttttttatttttaggggataattatgtattagggtttatttgttagttatttttgttattgttattattgttggtattagggggtaggggtgaaggaggtggttagattagggttcggggtgtttggttgagtgttttttttattgagtttatttttgtgtttgtagttttttataggttgaggttttagtgttttgtttgtgttgttgagggggttttatggtttgttgagaggtttttttaggaagtttatagggaggaggttggcgtgttttttgttttgggggtgggatagtttttttttgtttttattttaggtatttgatttaagtttttttgtgtatgaggaatgtttggatgtttttttttggtaggtgggatgggttagagggaggttttgtttatatagtttttaattaggaatttagagatttgtgttttaggaaggagttgttttcgttattatttggttaattgtgtgttgtgtagattcgtagtttggaaataggttttaaggatgtttaggatttgtttcgtgtttataaaggttaggggtcgttttttgttttttgtttttttgttaattttgtagtaggttttggattaattaagttttcgtaatagtttcgagatttaggttttgtgaaagttgttagaattaaaatggagttatttttgtttaattttaagagtaataataaaattatgcggtcgggaggttttgaaggagggttttttcgtatatttgtttatgattagagttttttcgaagtttttgggaagggtatagatgtttgtaataagatttttttttattttttattttttgtcgggattttgtagtttattatgtgagttataaggacggttagtcggttgtataagaatatttgtttaataacgttgtgtttatttataaatttatgtcggtttttgggataagtttttggaattagtgtttttttttttttaaaatagttgtgtaggtggatgtggtggtgagtgtttgtagttttagttatttaggaggttgaggtaggagaattcgggaggtagaggttgtagtgagttgagattgtgttattgtattttagtttgggtaatagagtaatttaagaaaaaaaaaaaaaaaaagataaaaattaaaaatcgattatgtattgtttttttcgttttttaaagtattttttgttttttttttttcgatgcgtttttagtttattaaggtcggggttttgtatgtaatgttgttgtttatttttagttaaattttatagttttggagagtttttttttgttttttaaggttgataggattattatttttttcgtttatagatgagggaattaaggtttggagaggtttcgttttgaaggatatttagtaagtggtggatagagaattttagtttagatttaaaggttatttaatttattttttttaaatttatgttttttagtatttagttagttacgtattattttgataattttttgtcgtagttatattattgtttgtggtatgatttattgaatatttttttttatataagtttagatttgttttaagtttattagaaaaggaaatttgtaattgaaaaatggaagattattattttttgttataaatagaagtaattgtgtattttatatatattaaaagtagtgtttttatagtttttttagatgttttgagtttaaagtatgttttattttgttaaaggggagatggtaaagttagggtggtagtgaaattaattaaaggtggggaaattatgtaaagtttataaggtattttttatttttttttttttttgagatgttgttttattttgttatttaggttggatatatatttggttgttaaggattagggataggggaagaggtagaggaaagaggtggtttggttataaaagtattttgtggggttggagttttttagtattttaattatggtgttgttatataaatttatttaggtgataaattgtatatatatttttatatatatgtatacgaatataggtaatattggggaaatttgaataataattgtggattatgttattgggggagattaaataaagtgtatagatattttttgtatttttttttttttttttttttgtttagatagggttttgttttgttatttaggttagagtgtaatgatatggttttgatttattgtaatttttatttttcgggtttaagtgatatttttattttagttttttaagtaggtggagagataattttagtttatatttaaaggttatttaatttattttttgtggagggattataggagtaggttatttcgtttcgttaatttttgtattttttgtagagatgaggtttttttatgttgtttaggttggttttaaatttttgcgtttaagtgaatttttcgttttagttttttaaagtgttaggattgtaggggtgagttattacgtagggttttttgtattattttttttttttttttttttgaaaaaaagttttattttgttatttagggttggagtgtaggggaatgattttagtttattgtaattttttttttttaggtttaagtgatttttttgttttagttttttaagtagttgggattataggtgtatgttattatatttagttaattttttgtatttttagtagagatggggttttattgtgttagttaggatggttttgattttttgattttatgatttatttatttcggttttttaaagtgttgggattataggtatgagttatcgtatttagtttgtattattttttataattatttgtgaatttatagttttgttaaaaattttaatttaaatatgaaatttagggtggttataaagttttttgatttattttgattttggaattaattaattaattaattgaggagatttattagtgagttttttttgatttttagttaagaatgtttttaatttagtaagatgaagtaggaggtagaggaaattaagggggtaataagtagggggtaagaaggatttatgagagcgatattttttttgagagttttaggacgattatcgggaagttaggagggcgtaggtaggaggattcgggaaagttcggtttgagggaggttttaggcgtggtggggagtggggtagggtaggtagaggttgggtagtaggtgaggttttttgggttttgagggttaagtttggggtttgaggtaaataggttcgagtggagaaggggttgttgtggttgggttggggtgggtggagttggaggagttttttttttttgaattagtttttgaattgtgttataaaatacggtatattaagtttattttttttattatttttaagtgtatagggcggtagtgttgagtatacgtatagtgttgtgtagttgatttttagaatatttttattttgtaattttgaagttttgtttttattaaattttaattttaattttaattttaattttaatttattgtttttttttttagttttagataatttttattttatttttgtttttatgtatttgatttttttcgggattttagagaagtgtgttcgtgcgtatttgtttttttgtattggtatattttattgagtataatgttttaaggtttatttatgttgtagtaggtgttagggtcgtttttgtttttaaggttgcgtgatattttattgtatgtgtgtattttgtttggtttttttattttttttttgttggatatttgggtagtttttagtttttggttgttgtggataatgttgttgggaatatgggtgtgtagttatttgttcgagtttttagttcgtatttttttggttatatatttagagtgggatgtttggattgaagtaatatttttgaatttagtttgaggttattaaattttttgaattttttattagaggttatatttttgggtgtttttcggggtttatggaaaatagatttattttaggttttatttatttgtgtaagggaataggggttaattttaagtgtataggttgttttggaagatttagtttaggtttggttgatttagagtattggtttttttttagtttgcgtttttaggatataggtgtgggtatttatatatattaagtgggttttagggtagttaggttatttagtgtgtttttttttatatttttttggggttcgtgatattacgagttttaattcgggttttggtttaggttgtgtgtttttagttttatttttttttatattttgaatgaggtgaatgaaggagtggtaacgcgttttttataagatattgtgagttatatttagttttttttttttagtaagtttggttttaggttataggattgggcggggttaagatggatattaggggtgtggggagggacgtggagtatttatagttaggggtaaagtttttttttgatttaaatttaggtagtttgcgttgtagtcggtttttggtgtttttatttcgttttttttttgttgtttttaagatatgtaggggttttgggtgttgttgttgttgggtttgaggttatagttttttttgggcgttattttaggtaatgaggttttttaagttgttttatatatagggtatttttttagttaggttgatttgatttttattttttttttggttagt

SEQ ID NO: 18 - DNA, 5150 bp, Artificial Sequence
  chemically treated genomic DNA (Homo sapiens)
gttggttagggggagagtagagattaggttagtttggttgagggggtgttttgtgtgtggaatagtttggggagttttattatttgggatgacgtttagggagagttgtagttttaggtttagtagtagtagtatttagggtttttgtatgttttgggggtagtaggagggaggcgaagtggggatattaggaatcggttgtagcgtaggttgtttgggtttaaattaggggaggattttgtttttggttgtaaatgttttacgtttttttttatatttttggtgtttattttgatttcgtttagttttgtgatttgaagttaagtttgttgaagggaagggattgggtgtggtttatagtgttttgtgggagacgcgttgttatttttttatttattttatttaaggtgtgaagagaggtgagattggaaatatatagtttaggttagggttcgggttagggttcgtaatgttacgagttttagaggagtgtgaaaggaggtatattgggtggtttggttgttttagaatttatttggtgtatatgggtgtttatatttatgttttgaggacgtaggttgggaaggggttagtgttttgggttagttagatttgggttgggttttttagagtagtttgtgtatttgaggttgatttttgtttttttgtataggtagatggagtttggggtgagtttgttttttatgggtttcggggaatatttagaagtgtagtttttgataaggagtttagagagtttggtaattttaggttgagtttaaaagtattgttttagtttagatattttattttgagtgtgtagttaaaggaatgcgaattagggattcgaatagataattgtatatttatgtttttagtagtattatttatagtagttaagagttggaagttatttaagtgtttagtaaaagagaaatggagaaattaaatagggtgtatatatataatggagtattacgtagttttgaaaataaaggcgattttgatatttgttataatatggatgaattttaggatattatgtttagtgaaatatattagtgtaaaagaataaatacgtacgaatatatttttttgaggtttcgaggggagttaaatatatagagatagaagtggaatggaggttgtttgaggttgagggaggaggtaatgggttagggttggggttagggttagagttggagtttaatagggatagagttttaaggttgtaggatgagaatgttttggagattagttgtataatattgtgcgtgtatttaatattgtcgttttgtatatttgaaaatggtgaaggaggtaaatttgatgtatcgtgttttgtagtataatttaaaaattggtttaagaagaaaaggtttttttagttttatttattttagtttaattatagtagttttttttttattcgagtttgtttattttaaattttaggtttggtttttagaatttaggggattttatttgttgtttagtttttgtttgttttgttttattttttattacgtttagggttttttttaggtcgagttttttcgggtttttttgtttgcgtttttttggtttttcggtggtcgttttggggtttttagggaagatgtcgtttttataggttttttttgttttttgtttgttgtttttttagttttttttattttttgttttattttgttgagttaggaatatttttggttgaaagttagaggagatttattaatgggtttttttaattaattgattgattgattttaaagttaaggtgagttaggaggttttatagttattttgagttttatgtttaagttggaatttttgatagaattatagatttataagtagttgtaagaaataatataagttgggtgcggtggtttatgtttgtaattttagtattttgggaggtcgaggtgggtggattatgaggttaggagattaaggttattttggttaatatagtgaaattttatttttattaaaaatataaaaaattagttgggtgtggtggtatgtatttgtagttttagttatttgggaggttgaggtagaagaattatttaaatttgggagggggaggttgtagtgagttgagattatttttttgtattttagttttgggtggtagagtgagatttttttttaaaaaaaaaaaaaagggaaataatataagaggttttacgtagtggtttatttttgtaattttagtattttaggaggttgaggcgggagatttatttgagcgtaggagtttgagattagtttgggtaatatggaaaaattttatttttataaaaaatataaaaattagcggagcgaaatggtttgtttttgtggtttttttataggaaataaattaaatagtttttgggtgtgagttgaaattatttttttatttatttgggaagttgaggtgggagtattatttgagttcgggaggtggaggttgtagtgagttaagattatattattgtattttagtttgggtgatagaataagattttgtttaaataaaaaaaaaaaaagaagaaagtataagagatgtttgtgtattttgtttagttttttttagtggtataatttatagttattatttagatttttttagtgttatttgtattcgtgtgtatgtgtgtgggagtgtgtatataatttattatttaagtaggtttgtgtaatagtattatagttgagatgttgaagagttttaattttatagggtatttttataattaggttattttttttttttatttttttttttgtttttaatttttgataattagatatgtgtttaatttgggtgatagagtgagataatattttagaaaaagaaaaaaataagaaatgttttgtggattttgtatagtttttttatttttggttagttttattgttattttaattttgttattttttttttaataagataaagtatgttttagatttaaaatatttaaggaggttgtaagaatattgtttttggtgtgtgtggaatatatagttgtttttgtttatggtaagagatggtggttttttattttttagttataagtttttttttttaatagatttaaggtaaatttgagtttatgtagagaaaaatatttagtaaattatattataggtagtaatgtggttacggtaaaaagttgttaaggtgatacgtgattagttgagtgttaagaagtatggatttaaaagaagtaaattaaatagtttttgagtttgagttgaaattttttgtttattatttattgagtgttttttagaacggaatttttttaagttttaatttttttatttatgaacgaaaagaatgatagttttgttaattttaagaaatagagggaggttttttaaaattatggagtttaattgggaataagtagtagtattgtatgtagagtttcggttttagtaaattaggggcgtatcggaggaggggaggtaaggggtgttttgaaaggcgaaaggagtagtgtatggtcggtttttggtttttgttttttttttttttttttttttgagttgttttgttgtttaggttggagtgtagtggtatagttttagtttattgtaatttttgtttttcgggtttttttgttttagttttttgagtagttgggattataggtatttattattatatttatttatatagttgttttgaaaggaagagaatattgattttaggggtttattttaggaatcggtataagtttatgagtggatatagcgttattaggtaagtgtttttgtgtagtcggttagtcgtttttgtgatttatatagtgagttgtaaagtttcggtaaaaaataaaaaataaaaaaaggttttgttgtaggtatttgtgttttttttagaggtttcggaagggttttgattataggtaggtgtgcgggagggtttttttttagaatttttcggtcgtatgattttgttgttgtttttagggttggatagaagtggttttattttgattttgataatttttatagagtttgggtttcggggttgttgcggggatttaattagtttagggtttgttgtagagttagtaggggagtagggggtaagaggcgatttttgatttttatgaatacgaggtaagttttgaatatttttgaaatttgtttttaagttgcgggtttgtatagtatatagttggttaaatggtagcggaagtagtttttttttagagtataaatttttaaatttttaattaagggttgtgtaggtaggatttttttttggtttattttatttattaaggagggatatttaggtattttttatgtataggagaatttgggttaggtatttggggtgggaataagaagggattgttttatttttaaggtaggagatacgttaattttttttttatgggttttttggggaggttttttaataggttatggagtttttttagtagtataagtaggatattggggttttagtttgtgggaagttgtaggtataggaatgggtttagtggagggggtatttagttaggtatttcgagttttgatttggttattttttttatttttgttttttaatattagtagtagtgatagtggtaggggtggttggtaggtgggttttagtgtatggttgttttttgagagtgagggataaaagataattttgttttgaagggtgtttcgggcgtttatatggatgtgtggaaaggaaagtgtatgaagttaaggatgttgtaattgtgtttagtggtttaattttgattttgtatgataggaattagggggataattgtattttaatagtattttggtgagttgaaaatttgttaagttgaatatattattggagagtttttgttttattttttattttgttttttaatttttgttgttttttaaatatttggttaagtgttttttagaattgagtaatgtattattgataaatattaagaatataatatagtttatgaacgaggttgagtaaaattgttttttaagtaaaataaattatttaggtcgggtgcggtggtttacgtttgtaattttagtattttgggaggttgaggtaggcggattataaggttaggagatcgagattattttggttaatatagtgaaattttgtgtttattaaaattata

SEQ ID NO: 19 - DNA, 11416 bp, Artificial Sequence
  chemically treated genomic DNA (Homo sapiens)
  unsure (9907)
gttgggattataggtgtgtattattatgtttggttaatttttgtatttttagtagagatagggttttattatgttggttagtttggtttcgaatttttgattttatgatttatttgtttcggttttttaaagtgttgggattataggcgtgagttattacgttcggtttggttttaatttcgttttatttattttttgtttaagatggaattgttttggtttaaatgtttttgatatattttttttttttttttttataagggtttttttaattttaagggttataggggataaagattaattttttgtaaattttttaggttgaataggggagatgatatttttgtttaatagggtttgtcgtatttagggtagagaggaatttagttagaaattatttgtatggtgagggttatttataattttgagttttgataaaaggtggtattcggaagattaataagtgtttaatttaagaaaatattgagtaagtttattttgtatttttatataaagagtataatggtaatatattttataatagtaaagtaaaataagttaaattattttaggtaaattaaattaagaaggttttttatgaagtaggtaattgttggaattaagttgatataatattgttagtcgattttaatacgtgtttagaaatagaatattggtttagatttttaaattaattattttttttgtttttttttagttgtagtcggagattattggtcggtttataggaataagtagagttagtttaaattgtagaaaaaaaatttaaaaataattgatgggattagaatttaataataagtgtattatagtttttgaaataatttttttttttttagtttttatttttattaaagataaattattgtaagattgatttatttgtaaaataagtattagttttattatatttggtttgattatttgtataaagtgtagtaagaataattatttgttatatagttttttttttaaattggttttgatggaattttgttttataagaaattttagataagatttttttttaaagttaagttaagttatgggttattattgttaattatttgtatgagttgggtaaatttttttttttttgaggttttaatataatttggggtttttgggtttgttagaaagtgatattttttatttaatataggttaggaatattgtatagagattgtgtagataaggtataaagttagtttttttaaggggtttttattggttttatatgttaattttgattttttaaagaaaagtatgttattttagttaaagttttggtaaaattattagtttttttaattgtgttttattataaatgaagatagatttttattgtatttatgtaaataattgtattgttataagttaagaatatttataagtggtttttaaattttggataaataaggtagagagaaataaatatgttttaatttttgtttataggagtatattttatttaattattaaaaattgtaaataggttgggtgtagtggtttacgtttataattttaatattttgggaggtcgaggtgggtagattatttgaggttaggagtttgagattagtttggttaatatggtaaaatttcgtttttattaaaaatataaaaaattagttgggtgtgatggtgtttatttgtagttttagttattcgggagtttgatgtataagaattgtttgaatttaggaggtagaggtggtggtgagttgaaattgtattattgtattttagtttgggtaatagaataagattgttttaaaaaaaaaaaaaaaaaagtaaatagtttaaaagtttttttgattttgaaaaataaaataaaggattagtaatattttaagtaaaaagttataaaaggattatttcggttttttgttattagtttagtttatgtaattaatgtttgttttgtttgatattaataaatattttagttatgatagttttgaaagttttttttttattttaatgttataatttttaaagttatttgaaatttgcgtttaagattatttgttaaagatttatagttgattataaattattttttaaagaggattaaaataagttaataattgtttatggatgatataaagttttaggatagttattattaaagttatatttgattaggaattgtggttatttttatgatttttaataattttatataataattataatataggagttttttataattttggaatatatattaataatatatttatataaatatagtttaaagaaagttaaatatcgtttcgtatttgataatgttttttgtatgattttttgtgcgtgtgattttgggttatttattttgtgtatttgtggtaatgaatgagattttattggtggtgtggatttgattgatttttgtaattgtgtagggtaaaagaattggtaaaagaaaatgataataagattttagtaaaggggtagggagggttaagagaattgaatatttgggttggtagagaaattaaagtttagaaattaagaggtaagagtgtagtgtaggggatatattttatttttttgtttttttttttttgtttttttttttagggatttaggtttttgggattatattggatttgtttttgaagttgaaaaataaaaggttgaggagatagttggttttaagtgattagttttaagttagttttgttagaaattttagattataggagaagggtggagagaaaggatatgattatttttggttttattttttattagaggtgagaatgataaggaatttttttttaattttttttgagggtatgaagagggttagtaggagaagggttgggagttttgaggttttttgtaggattttatattttataggtaaggattaagaattaggattaaatattttcgtgggatagttttaaattagtattagtaagtatagttagggtgatttttttttttttttttttttatttttaaattaaaaaaaaaaatttggatgggcgcggtagtttatatttgtaattttagtattttgggaggttaaggtgggtagattatttgaggtcgggagttcgagattagtttgattaatatggattttatttttattaaaaatataaaattggtcgggtatggtggcgtaagtttgtaattttagttattcgggaggttgaggtaggaaaattgtttgaattcggggggcggaggttgtagtgagtcgaggttgtgttattgtattttagtttgggtaataagaataaaatttcgttttaaaaaaaaaaaaaagaaaaagaaaaaattttttttttttgagttggagttgtaaagagaagaatttttaaaaagaaaagaaatttttaaaaaattaaaatataaaaattttttttagagatagggtttcgttgtgttgtttaggttggtttttaattttaggtttgaagcgaattttttttagttttagttttttaagtagttgggattataggtatgttattattatgtttggttttttttttttaaataatttttaaaaaatgttttattttgtttttatttaatatataataattggattagagtggtgttttatttgttataatatttttttaacggtagagtgtgtattattgttgttttttataataaatggtgttatattttggttttggttgaagtaataatattttttagtgaaatttttgttatttaaaattttttgttttgtaatttatgtgtaatagggttagtatattttttagttgttagtggggttgttttttgtgatttaataggaagattatagtgtaaaaatatttttatgttattaatatatgtttgttttaggttatttggaaaatttaaaaaaataaaaaaaagaggaaataattatttatagttttattatttagagaaaattatagttaatgttttggtgtatttttttttagttttttttttttatttaaattttttaattatattcgattttaaatatatatatattttttaaaaattgtaaagataatattgtattttagtataaaagaaaattttggaaatgtagaaaagataatggaaaagaaaaattagttgtttgtgatgttattatttagaaatggttatatttattagttagtttttttatatatgtgatttttattatttttatattttttattataaacgataagttttagaagagaatgtagtaaatgtaggggttttgaaagaaggggtgtattttgttttgtttttgatgtttttgggatataggtaattaaaaggttgaagatcgagtgttgtagaatagggttttttaaggtgtggttcgtaaagtagtaaagtagtagttttttttgggagtttattagaaatataatcggagttttattagtgggtcgggaatttgttgtaataagtttttgggggatttagatgtttgttttttttatagtttgagaaatattgtattaaaagattggattttgggaggtagggggttttagatgaattgaaagtggaaatttatttaggaaatgggacggaattgttttgtagtatggaatttattgatattgatatagttgtttgtgtggttaagttttttgagatagggattagttgggtttggtattttaatgttgagttttatgtttggtttgtaataggtgtttatcgaatatttgttgaatgaattaaggaatgaataagtgagtgaaaaaggatttttagagttgtgttttatatgtttttttttttttttttttaatttttaggattggaatattagttaatatttgattattgttagtttatttttttttatttacgtcgattgtatttttgggttttagggataaagtaggttttggggtgtattatgattttattatttttagtattggttattggtatttgttttattaattttttagtgttaggtatgtttggggatataggtggaggtataaaaaggtggtgtagatggggtatgatgagggtagtgtttatgttttaaggttttagaattatttaaagtatttaagagttgaaaatagtgtttagagtaggaaattttagttttgttatttgtatgtgttagttggataggttattttttttttatatatatatatatatatatatatatatatatatatgaaatatatatatataaggaaaatatatatatataaggaaatatatattttttatatatatatttttttatatatatattttatatatatatttttttatatatatattttatatatattatatatatttttttttaatttttttttttttgagatagggtttcgttttgttgtttaagttagagtgtagtggcgttattttggtttattgtaagttttgttttttgggtttacgttatttttttgttttagttttttaagtagttgggattataggtgttcgttatcgcgttaggttaattttttgtatttttagtagagatggggttttatcgtgttagttaggatggtttcgattttttgattttatgattcgtttgtttcggttttttaaagtgttgggattataggcgtgagttatcgcgtttggtttttttttttttttttttttttttttttttttttttttttttttttttttttttttttttttttttttttttttttttttttttttttttttttttttttttttttttttttttttttttttttttttttttttttttttttttttttttttttttttttcgtattcgagtgaagagattattaaataggttttgagtgagtaataaggttgtttattttatttgggtgtaggcgggttaagtttaaaaagagagttagttaagggagatatgggtggggtcgttttataagataggggtaggtaaaggaaaaattatagttaaaggggggttttttggcgggtaggagtgggggttataaggtgtttagtgggggagttttttgagttaggatgagttaggagaaggaattttataaggtaatgtcgttagttaaggtaaggatcggttatttttattttttttgtggtggaatgttattagttaaggtaggaatagattatttaaattttattttttttgtgattttttagttattttaggtcgtttggatgtatatgtgtaggttataggggatatgatggtttagtttgggtttagacgtttgatattttttttttgagatagagatagatttttattttgtttgtttaggatggagtgtagtgacgtgattttagtttattgtaattttcgttatttaggtttaagtgatttttttgttttagttttttgagtagttgggattataggtatgcgtcgtaatattcggttaattttttgtatttttattagagacggggttttattatgttggttaggttgatttcgaatttttgattttaagtgatttattcgttttggttttttaaagtgttgggattataggtgtgagttattgtgtttagttttttttttgttatttgtagtttttattagtgaatttatttttaataggagttttttgttttttttttttttgagatagtgtttttttttgtcgtttaggttggagtgtagtggcgtaattttggtttattgtaagttttatttttcgggtttacgttatttttttgttttagttttttaagtagttgggattataggtgttcgttattacgcgtagttaatttttttgtatttttagtagagacggggttttattatgttagttaggatggtttcgattttttgattttaggtgattcgtttgttttggttttttaaagtgttgggattataggtatgagttatcgtattcggtcgagttttttgtttttttgttggagatttacgcggaagtgtttttatagtatggtatggtgtttttaggatattaggggtttaattaattttaggttagtttttatgttgattttttggtttataatttttatattataaatttagatttttatttagatttggtttagatttgatttgaatttatattttttatgaatgattgtttttttttattttttttatagttttaaggtaaaatgtgtattttaaaataattttagtagatttggtgtggtggttttagtaggtttggtatggtggtttacgtttgtaattttagtgcgttgggaggttgaggtgggaggatcgtttgagtttaggagtttgaggatagtttgggtaatatagtgagatttttatttttagaaataaataaataattagttgggtatagtgttgtatgtttgtagttttagttatttgggaggttaaggtgggagaattatttgagtttaggattttaagattacggtgagttataattaaattattttagtttgggtgatagagtaagattttgttttataaaaagaaattagtttttggtcgggaatggtggtttacgtttgtaattttagtattttgggaggtcgaggtaggtggattatttgaggttaggagtttgagattagtttatttaatatggtaaaaatttttttttattaaaaatataaaaattagttgggtatggtggcgtatttttgtaatgttagttatttgggaggttgaggtaggagaattatttgaatttaggaggcggaggttgtagtgagttgagattgcgttattgtattttagtttgggtaatagagtaagattttattttaaaaaagaaaagaaattagttttagtttgaatttgtatttggtttgtcgtcgtaggcgtttttttttgtattagtttttgtgggtttttttggttttagatttttttattaatgttgttttttgaggattttttttttttttttttttttttttttaagttatgtgttatttttttttttttagtatttttgtatttggagttggagaagagagtttttttcggtttagtttattatgtggttagaagtttttatttgttttttttatattttagtgtttttatttgtttagtggggatgagtttttttcgtttagggttattatgggaattatatgggatagttatagtgtttggtaaggagtggatgtttagtgaatgttggtttttttttttaggacggttgtattttagtagatgaggagatggggtgtagtggggtattgagtttgagttgttgagtttttaggttattgttgcgtttgagatttcgtggtgttatttgtatttttgggggattaaggttattttgggacggggtttttgtttttttagtatttatagtttatttgggtgaaagatgaattaatggatgaaaagggaaaaggtgaaaaagtgataatatgaaaaatttttaaacgtttagtagtttaattttttgtatttgttgttgttaggttggagtgtagtggtataattatggtttattgtagttttaaatttttggttttaagtagtttttttattatggtttttaaaagtgttgggattataggatgagttatttttttagtttttttttttttttttaattagatataatttatagaaaagggtatcgattttaaatatatagtttgaaaaaattttgatatatatttatatttatgtaatcgttatttagattaagatagaatatttttggttgtgaggtatttgtgggtttttttgtgttaatttttttttaaagttagaggagatgtttaggtttatattggttattagagatttgttttgtttgttttgagttttatataaatggaattatatagtatgtatcgattagtgtttttttttcggtattttatcgtgagtattagtatatattatttagtagtttttaaaaataatagttttttggaatttagttgtttagagttattgttgtttaaattagattttaaattttttttagggataggttttgggtggttttggtgaaaaagataaggattttgtttttgtgggattttagtttagagagaataagtatttaacggagtaggggattcggtggtagaggttgggttgaataagggtaataggtgtggggcgggttgatgttagtttagttttgggatttttaagttgttaagttaggtataggttgtagcgggttagggtgggtagaaggtttttattatttagtggtatttaattggttaaagaggttttatgattaatagtatcgtggtgtgttttgaggaaggtaggagggaggttggaattagtttgggtttgggggatttttgaggaaaatttttggtttcggttttgtttagattttattttatgttattttagaattgtttgtggatagttacgggtgttttattttttggggtagaaatttttgtttaaaggtattttgtcgggtagaagggttaaggtgtttttaatttttagtgggtattgcgtggggatatttgaaattgatgtttttagtagatatttttagaagagagagggtggatttggggttgtcgggatgagggtagtgggttgagggattggggtggtggtgacgtaaggggaggttttttggggaggggcgtggggtgtgtttgggtttaaagttagaggtgtattgtagtattttggcggtttttcgtttgtgttttgcgtttatgttaggttggggtagagttacggcgacgcgtgagttttcggtttttttatttggggttttaattttaggttttttattttttaatgtggaggagatattggtgtttatttgttaaggtagttgagaggaataagagaagttgtgtggggggttttttggtatttcgtttagagttagtgcgtgtgtgaggaaggagggttgttttttatttacggttatttcgagagttaggtacgcgtcggaggtgggttaaaaanatgaaaattgtgtttttagtttacgaatatggtatacggtttggataagatttttttatttttgattttttttttcgttttgtgtagtgggaggtttgaaagaggaaatcgttagggagttttttttttaggtttttgagtagatttgatagggttttggatagaggggagtttcgtagattttgggagggattttagtttttatagttagggttttggtttagttttggagacgggataatggggatgggaggtaatttttgagttttttttgtgggttaggtgtgttatttgttttattcggtttagtttttagagcgattttgaggggatgatgttagtaatgttatttaataggggaagagattgaggttgagggaggtggtagagttagtatttggagtagttgggggttttttgtttgtttgtttttgagacggagtttagttttgttatttaggttggagtgtagtggtatgattttagtttattgtaattttcgtttttcgggtttaagtagtttttttgttttagttttttgagtagttgggattataggtgtatattgttacgtttagttaattttttatattttagtagagacgggatattatcgtgttgtttaagttggtcgcgaatttttgagtttaggtgatttgtttgtttcggttttttaaagtgttgggattataggtatgagttattatgtttagtagttggggttttaattgaggtttgtttggtattaaagttgtggattggttgttggatatatatatatatgagaaagagggagagagaaagaagtgtttttagtttttattttattttaaaattataaagttttagttagaagttattattagttaagagggatggagggggcgatgagagatgtagaatgtcgtttttgataattaattttaataagagtgagattatttggtttttttaaatttgatatattaagtaaaaggtaagtttcgttttttagtattgttattaaattaagttaggtttttgttgagtttattttaatgaataagttaagtagagttgataattgatggttggttatattaggggattttttttgttggaaggagtttgttgaataggttaaatattatttttttaattgtgttagtataatttatttgttgttttagtagtttatttttttattgggtagaaggaatgagtatgggttttggagcgaaatttagttttgttagtgtttgtttgtgttgtgtggttttaggtaagttgttcgttgtttttgagttttggtttttttattttgagatgtgaggagaagattttagggtttataggtttttttggaggatttggatggtatatatttataaattatagatgtgttgtttgggtgggtaattattgtatttatttttaagtttaggtattttagtttgagtaattagaagtggggggatttgtacgtttggagataggaggttatttttatttcgttaagtaattgttttt

SEQ ID NO: 20 - DNA, 11416 bp, Artificial Sequence
  chemically treated genomic DNA (Homo sapiens)
  unsure (1510)
agaggtagttatttggcggggtaaggatagttttttatttttagacgtatagatttttttatttttgattgtttaggttggaatgtttgaatttggaggtgggtgtaatagttgtttatttagataatatatttgtggtttataaatatgtgttatttagattttttagaaaagtttgtggattttggggttttttttttatattttagaatgaagaaattaaggtttagagataacgagtaatttgtttaaggttatatagtataggtagatattggtagggttgggtttcgttttaaagtttatgtttattttttttatttagtagggagatgagttgttaaggtagtaaatgaattgtgttagtataattaagagagtaatgtttaatttatttaataaattttttttagtagaaggggttttttgatatagttagttattaattattaattttgtttagtttatttattaaagtaggtttagtaggaatttgatttggtttaatagtagtgttggaaagcgaagtttgttttttgtttaatatgttaaatttaaaggagttaggtgattttatttttgttaggattagttattaaggacgatattttgtattttttatcgttttttttattttttttggttgatagtgatttttggttggggttttatggttttgagataaaatgagaattaagaatattttttttttttttttttttttttatgtgtgtgtgtgtttagtaattaatttatagttttagtgttagatagattttaattaaaattttagttgttgggtatggtggtttatgtttgtaattttagtattttggaaggtcgaggtaggtagattatttgagtttaggagttcgcgattaatttgggtaatacggtgatatttcgtttttattgaaatatgaaaaattagttgggcgtggtagtgtgtatttgtagttttagttatttaggaggttgaagtaggagaattgtttgaattcgggaggcggaggttgtagtgagttgagattatattattgtattttagtttgggtgatagagttagatttcgttttaaaaataaataaataaaaaatttttagttgttttaagtattagttttgttattttttttagttttagtttttttttttgttaaatgatattgttggtattatttttttagggtcgttttaaggattgggtcggataaggtaagtgatatatttgatttataggagaggtttaaaagttgttttttatttttattatttcgtttttagggttggattaggattttggttatgggagttggagttttttttagagtttgcggggtttttttttgtttagggttttattagatttgtttagaagtttagagaggaggttttttagcggtttttttttttaggttttttattgtatagaacgggaggagagattaggaatgggagggttttgtttaagtcgtgtattatgttcgtgggttggggatataatttttatntttttggtttattttcgacgcgtgtttggttttcggagtggtcgtgggtaaagaatagttttttttttttatatacgtattggttttgggcgagatgttaggggattttttatatagttttttttattttttttaattgttttggtaggtgggtattagtgttttttttatattaggaaatggagagtttgagattagggttttaagtgggagaatcggaaatttacgcgtcgtcgtggttttgttttagtttagtataggcgtagagtataggcgaggagtcgttagggtgttgtagtgtatttttagttttggatttaagtatattttacgtttttttttaagaggtttttttttacgttattattattttaattttttagtttattatttttatttcgatagttttaggtttatttttttttttttggaagtgtttgttgagggtattaattttagatgtttttacgtagtatttattgggaattgggagtattttggtttttttgttcgatagggtgtttttggataagagtttttgttttaggaaatgggatattcgtagttatttataggtagttttaggatgatatgagataaagtttgggtaaggtcggggttagaggttttttttagaggttttttaggtttaggttggttttagttttttttttgttttttttaaaatatattacggtgttgttggttatagagtttttttggttagttgggtgttattgggtggtgaagattttttatttattttgattcgttataatttgtatttgatttaatagtttggaggttttagggttgggttgatattagttcgttttatatttgttgtttttgtttagtttagtttttgttatcgggttttttgtttcgttgagtgtttgttttttttagattggagttttataagggtagagtttttgttttttttattagagttatttagggtttgtttttgagaagggtttggagtttggtttaagtaataatggttttggataattggattttaagaggttattgtttttggagattattaaatgatatgtgttaatgtttacgatagaatgtcggggaaagggtattgatcggtatatattatatgattttatttatatgaggtttaaaataggtaaagtaagtttttggtggttaatgtaagtttgggtattttttttggttttgggagggggttggtatagggaagtttatagatgttttataattagaaatgttttgttttgatttgggtggcggttatatgggtataaatatatgttaaaatttttttaggttatgtatttaagatcggtgtttttttttgtaagttatatttaattgaagaaaaaaaagaaggttgaagaagtggtttattttgtaattttagtatttttggaggttatggtgggaggattgtttgaggttaggagtttgaggttatagtaagttatgattgtgttattgtattttagtttggtaatagtagatataaaaagttgaattgttgaacgtttgaagattttttatgttgttatttttttattttttttttttttatttattagtttattttttatttaggtgggttgtaagtgttgagaaggtagggatttcgttttagagtgattttggttttttagggatgtaaatggtattacgaggttttagacgtagtaatggtttgagagtttagtagtttaggtttagtgttttattgtattttatttttttatttgttgaaatatagtcgttttaagagaagagattaatatttattgagtatttattttttgttagatattgtgattattttatgtgatttttatgatgattttaagcgggaggaatttatttttattggatagatggagatattggagtgtggggaaggtaagtggggatttttagttatataatggattgagtcgaggaaggtttttttttttagttttagatatagaaatgttggggaaaaaaaaatagtatatagtttgaaaaaggaagaaaagggggaaggaaaatttttaggaggtagtattgatgagggaatttaaaattagaggggtttataggagttgatgtagagaggaacgtttgcgacggtaagttaggtataggtttaggttgaagttggtttttttttttttttgagatggagttttgttttgttgtttaggttgaagtatagtggcgtaattttagtttattgtaattttcgttttttgggtttaagtgatttttttgttttagttttttaagtagttggtattataggagtgcgttattatgtttagttaatttttgtatttttagtagagaggagtttttgttatgttggataggttggttttaaatttttgattttaagtgatttatttatttcggttttttaaagtgttgggattataggcgtgagttattattttcggttagaagttggtttttttttatgagatagagttttattttgttatttagattggagtggtttgattatagtttatcgtaattttgaaattttgggtttaagtgatttttttattttagttttttaagtagttaggattataagtatgtagtattatgtttagttaattgtttgtttgtttttagagatggaggttttattatgttgtttaggttgtttttaaatttttggatttaagcgatttttttattttagttttttaacgtattgggattataggcgtgagttattatattaggtttgttaaagttattatattaggtttgttgaagttgttttaaggtatatattttgttttggagttatggaagggatagagaaagatagttatttataagaaatgtgaatttaagttaaatttgagttaggtttaagtggggatttgaatttatagtataagaattgtaaattaagaaattaatataaaaattggtttagaattagttgaatttttagtgttttgaaaatattatgttatgttgtggaaatattttcgcgtgaatttttaatagaaaaataaaaaattcggtcgggtgcggtggtttatgtttgtaattttagtattttaggaggttaaggtaggcggattatttgaggttaggagatcgagattattttggttaatatggtgaaatttcgtttttattaaaagtataaaaaaattagttgcgcgtggtggcgggtatttgtagttttagttatttgggaggttgaggtaggagaatggcgtgaattcgggagatggagtttgtagtgagttaagattgcgttattgtattttagtttgggcgatagagagagatattgttttaaaaaaaagaaaaataaaaaatttttgttgaagatgagtttattagtgagaattataaatgataagaaaaaggttgggtatagtggtttatatttgtaattttagtattttgggaggttaaggcgggtggattatttgaggttaggagttcgagattagtttggttaatatgatgaaatttcgtttttaataagaatataaaaaattagtcgggtgttgcggcgtatgtttgtaattttagttatttaggaggttgaggtaggaggattatttgaatttgggtggcgaaggttgtagtgagttgagattacgttattgtattttattttgggtaaatagagtgagagtttgtttttgttttaaaaagaaagtgttaggcgtttgagtttaagttaagttattatattttttgtgatttgtatatatatatttagacggtttgaagtaattgaagaattataaaagaagtgaaatttaaatggtttgtttttattttaattgatgatattttattataaaagaagtgaaaatggtcggtttttgttttaattgacgatattattttgtgaaatttttttttttggtttattttggtttaaaaagtttttttattgagtattttgtgatttttatttttgttcgttagagaatttttttttgattgtaattttttttttatttatttttattttataaaacggttttatttatattttttttggttgattttttttttggatttagttcgtttgtatttaggtgaaataaatagttttgttgtttatttaaagtttgtttggtggtttttttattcggatgcgagagaaaagaaaggaaagaaaggaaagaaaaagaaaaagaaagaaagaaaagagaaagaaagaaagaaagaaaaagaaagaaagagagaaagaaagaaagaaagaaagaaagaaagaaagaaagaaagaaagaaagaaagaaagaaagaaagaaagaaaggttaggcgcggtggtttacgtttgtaattttagtattttgggaggtcgaggtaggcggattatgaggttaggagatcgagattattttggttaatacggtgaaattttatttttattaaaaatataaaaaattagtttggcgcggtggcgggtatttgtagttttagttatttgggaggttgaggtaggagaatggcgtgaatttaggaggtagagtttgtagtgagttaagatggcgttattgtattttagtttgggtaatagagcgaaattttgttttaaaaaaaaaaaaattaagaaagaatatatataatatatatgaaatatatatatggaaaaatatatatatgaaatatatatatggaaaaatatatatgtggaaaatatatatttttttgtatatatatattttttttgtatatatatattttatatatgtgtatgtgtgtatatatatatatatatatgggaaaagagtgatttatttaattaatatatgtaagtagtagggttgaggttttttgttttgaatattgtttttagtttttaaatattttggatggttttgggattttaaaatatagatattgtttttattatattttatttgtattatttttttatgtttttatttgtgtttttaagtatatttggtattaaggagttagtaaggtaggtgttaatggttagtattaagaatggtgaaattatggtgtattttaagatttgttttatttttggagtttagagatgtaatcgacgtgggtgggagggggtgggttggtagtggttagatgttaattgatgttttaattttagaaattaaaaaaagagaaaaagaggtatgtggggtatagttttagagatttttttttatttatttatttattttttgatttatttaataagtattcggtgagtatttattatagattaggtatggggtttaatattgggatgttaaatttagttggtttttgttttaggaagtttaattatataaatagttgtgttagtgttaatgagttttatgttgtaaagtagtttcgttttattttttaagtgaatttttatttttaatttatttgaagttttttattttttagagtttaattttttggtgtagtgttttttaaattgtaaggagagtaagtatttgaattttttaagggtttgttataatagattttcggtttattggtgaggtttcgattgtatttttaataagtttttaggagaagttgttgttttgttgttttgcggattatattttgagaagttttgttttatagtattcggtttttagttttttaattatttgtgttttaggaatattagggataaaatagagtgtatttttttttttaggatttttatatttgttatatttttttttagagtttgtcgtttatggtaagagatataaaaatggtaggagttatatatgtgaaaaaattggttggtaagtgtggttatttttgggtggtgatattatagataattgattttttttttttattgttttttttgtatttttaaaatttttttttgtgttgagatatagtattatttttataatttttaaaaaatatatatatatttaaagtcggatgtaattgaagagtttaggtggaaaaaaaaaattggaaggaaatatattaaaatattaattgtggttttttttgggtggtaggattatgaatgattatttttttttttttttatttttttgaattttttaagtagtttaaaataagtatgtattaatggtataagaatgtttttatattgtggtttttttgttaaattataaagaataattttattggtagttgagaaatgtattaattttgttgtatatgagttataagataaagaattttaagtggtaagagttttattgggaaatgttattgttttagttaaaattaagatatgatattatttgttgtgggaaatagtagtaatatatattttatcgttagaaaagtgttgtgatagataagatattattttagtttaattattatatgttaagtaaaaataaaataaaatattttttaaaagttgtttaaagaaaaaaagttaggtatggtggtaatatgtttgtaattttagttatttgggaagttgaggttggaggaagttcgttttaggtttggagttggagattagtttgggtaatatagcgagattttgtttttaagaaaaatttttgtattttaattttttaaaagttttttttttttttaaaaatttttttttttgtagttttagtttaaaggaaaaagatttttttttttttttttttttttttttgagacggagttttgtttttgttgtttaggttggagtgtaatggtataatttcggtttattgtaattttcgtttttcgggtttaagtaatttttttgttttagtttttcgagtggttgggattataggtttgcgttattatgttcggttaattttgtatttttagtagagatggggtttatgttggttaggttggtttcgaattttcgattttaggtgatttgtttattttggttttttaaagtgttgggattataggtgtgagttgtcgcgtttatttaagtttttttttttaatttaaaaatagagaaaaagaaaaggagaaattattttggttgtgtttgttaatattggtttagagttattttacgaaaatatttaattttaatttttagtttttgtttgtgggatatgaggttttataggagattttagggtttttagttttttttttgttaattttttttatgtttttaagaggagttagaagagagttttttgttatttttatttttaatggaaaatggaattagaaataattatattttttttttttattttttttttgtgatttaggatttttgataaagttggtttgagattggttatttagagttaattgtttttttagttttttgttttttagttttagagatagatttaatatagttttaaggatttgggtttttgggaaagaaagtaaaagggaaggagtaaagagatggggtatattttttatattatatttttattttttaatttttaggttttgatttttttgttagtttagatgtttagtttttttggttttttttatttttttgttgggattttgttgttatttttttttgttagtttttttgttttatatagttgtagagattagttaaatttatattattagtgagattttatttattgttatagatgtataaaataaataatttaaaattatacgtataaaaaattatataggaagtattgttaaatacgaaacggtgtttggttttttttgggttatatttgtataaatatgttattggtatgtgttttaaagttatgggaaatttttgtgttataattgttatgtaaaattattgaaagttatagaagtaattataatttttagttaaatatgattttaataatggttgttttaagattttgtgttatttatagataattgttgatttgttttaattttttttgaaaggtggtttataattagttataggtttttgataggtgattttaaacgtaggttttagataattttggagattgtgatattagaatagaggaaaaatttttaggattgttatagttgaaatgtttattaatgttaagtagagtaggtattaattgtatggattgaattaataatagaagatcgaaataatttttttatgattttttgtttaaaatgttgttgattttttgttttgttttttagagttaagaaaatttttaagttatttatttttttttttttttttttgagatagttttgttttgttgtttaggttggagtgtagtggtgtaattttagtttattattatttttgttttttgggtttaagtaatttttgtgtattagattttcgagtagttgggattataggtgggtattattatatttagttaattttttatatttttagtagagacggggttttgttatgttggttaggttggttttaaatttttgattttaggtgatttgtttatttcggttttttaaagtgttgggattataggcgtgagttattgtatttagtttatttatagtttttgataattgagtaaagtatatttttataaataaaagttggggtatatttgtttttttttattttatttatttagaatttggaaattatttgtgagtatttttaatttatggtaatatagttatttgtataagtgtagtaagaatttgtttttatttgtaataggatataattggagaaattggtaattttattaaggttttgattggagtggtatgtttttttttaaggaattaaaattaatatatagagttaataaaagttttttgggaaaattggttttatattttgtttatatagtttttgtatagtgtttttgatttgtgttaagtaaagaatgttattttttgataggtttaggagttttaagttatattgggattttaagaggagagaaatttatttaatttatataggtagttgatagtaataatttatggtttggtttgattttaaaaaaaagttttatttaagattttttatggagtaaagttttattaaagttaatttaaaaaggaggttatatggtaaataattatttttgttgtattttatataaataattaggttaagtataataagattaatgtttattttgtaaatgaattagttttataatgatttgtttttagtaaaaatgagggttggagagagaaaaattgttttaagaattatggtatatttgttattaagttttagttttattagttgtttttgagttttttttttataatttagattgattttgtttatttttgtgaatcgattaatgattttcggttatagttaagaagaaataagagggatggttaatttaaaaatttagattaatattttatttttgggtacgtattggaatcggttagtaatgttatgttagtttggttttaatagttgtttgttttatgggaagtttttttaatttaatttatttgggatagtttaatttattttgttttattgttgtggaatatattgttattgtattttttgtgtaggaatgtaggataagtttatttaatgtttttttaaattgaatatttattaatttttcggatattattttttgttagaatttagagttatgagtagtttttattatatagataatttttaattgagtttttttttattttgaatacgatagattttgttaggtaggaatattattttttttatttagtttgaagaatttatagaagattgatttttgttttttataatttttaggattaaggggatttttgtaaaagggaggggggaaaatatgttagaggtatttgaattagagtaattttattttgaatagagggtgggtaaaacgaggttgagattaggtcgggcgtggtggtttacgtttgtaattttagtattttgggaggtcgaggtaggtggattatgaagttaggagttcgagattagattgattaatatggtgaaattttgtttttattaaaaatataaaaattagttaggtatggtggtgtatatttgtaattttaat

SEQ ID NO: 21 - DNA, 5183 bp, Artificial Sequence
  chemically treated genomic DNA (Homo sapiens)
ggtttaagtaatttttttattttagttttttaagtagttgggattataggtatatgttattatgtttagttaatttttatattttttggtagagatagtgttttgttatgttgtttaggttggttttaaagttttgggttttagtaattaatttatttcggttttttataaagacgtgagttattgtaggaggttgaggtaggagaattgttgatatatttagttttttagaaaaaaatatttaatagagatttataaatagaagttatgtttgggttttaggtggtagtgagataagatggtagttttattttttaagattaagggttataggggaggggtgattttaaagggatgtgtaggataattgaaatatgataatattaaagttgttttgttttaagggtaggatttatgggaagtaggtgttttcgtattagaaatacgatatgaatgggaaattttagaggtttttcgagaattggtatttattaatttggtagattaggttttaagatggaattgttttgatatttatattatttgaaataatttggagtattgttggtagttgatgtgagattttggtttttgtttttttagtttaaaataatttaaataagagatataatagtaaaggagatgtagtatataataatttttgtaaaagaaaaagaatattttgaaagtgaagtgtagaataggtagagagaagaatttagggtaggttgtttataaagatgagatagtaaaagttggtattagggaggttttttttatggaaattttatatgattatttatgaggggttgggaagaggtgttgttagtaagtatgttttggttaaaagttattaaaagaaaaggagtgttaaaaaatttaggtcgtgttgggggtggaggtttatatttgtaattatagtattttgggaggagaggtttaagtttaggatttttagattagtttgggtaatatggtgaaattttatttttattaaaaatgtaaaaattaaatgggtaaggtggtatatatttgtagtttttattattcgggaggttgaggtggaagaattttttgggtttaggaggttaaggttgtagtgagtcgtgattgttttattgtattttattttgggttacggagtaagattttgttttaaaaaataaagttaatggttttttttggtggggaaggaagaagtggggtttgaatggggggtagggtatatatggggagattttggttgtagttaattttttgatttgagtggtattattttggcgtttaattttgtaatttttttttaggttatatttttttgttttttgtagttttaatgtttgatatattttaaaaggaaagaaagaaaaggaaggaataagtttgttatttgatttagattagatgtaattgttttagttgcgttttttatttttattttagttagtattttttaaaatgtgatatgtacgtatttttaaagggcggtattgaaataggataggtaattaaggaagtgatcgtgtttttgggatgtagtaagcgtggtgatcgtatagttaatataataagttttagtattcgaattgtaattgagtttatttaagtaaagttatttttagtggggatttttttttttagagagtatgcgtattttgattttatttatttttaaattgattttttgtttattataatagtaaaaagcgtatttcgggtggagatttaagaagttaatgagatttgcgatatacgagttagtatgtatagttatttacgtttgtaattttagcgttttgggaggtcgaggtgggtagattatttgaggttaggagttcgagattagtttggtcgatattgtgaaaatttattttcgttaaaattataaaaattagttaggcgtagtggtttacgtttgtaattttaatattgtggaaggttaaggtaggtggatagtttgaggttaggagttcgagattagtttggttaatatggtgaaattttattttcgttaaaaatataaaatgagttaggtgtggtagtaggtgtttgtaattttagttattcgggaggttgaggtgggagaattttttgaatttgggaggcggagtagtgagtagagattttattagtgtattttaatttgggcgatagagcgagatttcgtttttaaaataagtaaataaataaaaataaaaaaataaaaatataaaaattagttgggcgtgttggcgggcgtttgtaattttagttatttaagaggttgaggtaggagaatcgtttgaatttgggaggtggaggttgtagtgagttgagattgcgttattgtattttagtttgggggatagagtgggattttattttaaaaaaataaaaataaataaataaattaattaattaattaataaaataaaatagaaatagggttttgttatgttgtttattatgtggtgaatttttttaggtgttgagtaagattggagattagatatatattaatgttatttgtagtaaataaaggatatttgtttatatttaaagtttatggtgatattttggttatatggggatgtttggttattttgttttttatttttatgttagagtcgtttgttataatgtttggttatagttttttttttgaggtttagggattttaaagtagaagtagtaggtttttttcggttggaggaagagttaaagtttttatttttgggatttttggttgttgttatttggggtaaggggaggtttaggttgtggcgtgtatttttagaggattggtcgttttggtttttttgttttttgggaaggaagggttggttttgtagggttttatttagattttttagtattttttattatttgatgtttttggggatattaagttttgtgtagtttagattatgttttagtttagtgtttattttataggtatgcgttattatgtttggttaattttgtattttttagtagagatggggattatttatgttggtaaggttggttttgaattttcgattttaggtgatttatttgttttggttttttaaagtggtcgggtagggttgaattcgtttttttattagttattgttaattacggatgaatggtttttgtttgttttttgttttttagattttattagggtattttattgggaaatatggtaatagtttttgttatttaggggatagtatggtaggggttgggaacgaatgttgttgttaaacgataagatttagttgggtttagtggtttatatttgtgattttagtggtttgagaggttgaggtaggaggattatttgaagttaggagtttgagagtagtttgggtaatatagtgagattttataaaataaaataaaaaaaattagttaggtatggtggttggtgttaataagtttagttattggggaggttgaggttaaggttgaggtagtgagttatgattatgttatcgtagtttagtttggtgataaatgagattttgttttaaaaaaaaaaaaaaaaaaaaaagaggaaggtgagcgtagtggtttatgtttgtaaatttagatattttgggaggttgaggtggaggttcgagattagtttgggtaatatagtaaaattatgtttttatataaaataaaaaatgagttaggtgtggtggtatatgttattggtgttagttacgtgagaggttgaggtgggaagattgtttgagtttgggaggttcgaagttgtagggagtcgtaatttaggtattatattttaatttggttgatagaatgggattttgtttttaaaattaaaagattttagttcgaaaaataattgtggggtggcggtaaaagtttttgattggttttgattttagagtgaattaatgaattaattaagggtttgtttgttagtgagttttttttgaaatttagtttagaaattttttaatttagtaagatgaagtaggaggtagaaggaattaagggggtaataagtaggaggaaggaatgtttttatgagggtgatattttttttgagagttttaggacgattagtaggaagttaggcggggggtaggtaggaggattttagaaagttcggtttgaggggaggttcgtgggggtggtggggagtggtgcggggaaggtagaggttgagtagtaggtgaggttttttgggttttgggggttaagtttggggttcggggcgagtaagtatgagtggagaaggggttgttgtggttgggttggggtggattttttatttgcgtcgtttaaatattagtgtgagtgtatttatataaatatatatataattatatataatatgtgagtaatgggtaggattggttcggttttatttagtgttgttattattggttttatagttgtttatagttttagagttttgggtttagatttttgttagttttatttgtttaggttaaggtaagatgatggagtaagggggtgttagggtagtaaagttttttacgtgttttttttttatagggtttaggtttttggtattaggaggttgaatttaggttttggtttagattgtgtgtttttagtttttttttttttcgatattagaatatagtttggttttagtttttgggaaatatagaaaaaaatgggtgaatgatttagtgatagggtgttttgttttatataagatatagtgagtaggggttgggggaggggtttttggttgcgggaggtatattatatttatttaaatggtatttgtatttaatatcgtattttttttgggggatacgtggttttaatttgagttgttttttttaggatattagttttagttcggtttagtttagttatattttgttattcgtttttagttagtgtggttttaggttaagaggttgggtagggttaaggtggtaacgaggggagaagtcgggatatagttttttttgatttaaattcgggtagtttggagtgtagtttatattttatgtttagaatttttgtttcgttattgttttgttgttttttagatatgttggggttttgtatgttgttgttgttgttgttgttgggtttgaggttatagttttttttgggtattattttaggtaatgaggtttttcgagttgtttttatataatatatatatagggtattttttagtttaggttgatttgatttttgttttttttttggttagt

SEQ ID NO: 22 - DNA, 5183 bp, Artificial Sequence
  chemically treated genomic DNA (Homo sapiens)
attggttagggggagagtaaaaattaggttagtttgggttggggggtgttttgtgtgtgtgttgtgtaggggtagttcggggagttttattatttgggatgatgtttagggagagttgtagttttaggtttagtagtagtagtagtagtagtatgtagggttttagtatgtttggagggtagtaggatagtggcgaggtaggaattttgggtatggagtatgagttgtattttaggttgttcgggtttaaattagggagaattgtgtttcggttttttttttcgttgttattttgattttgtttagttttttgatttgaagttatattggttgaaggcgagtggtagggtgtggttgggttgggtcgggttggggttggtgttttgagaaaggtagtttaggttgggattacgtgttttttaggaagggtgcggtattgagtatagatgttatttgggtgagtgtggtgtgtttttcgtagttaggagttttttttttaatttttgtttattgtgttttgtgtggaataagatattttgttattggattatttatttatttttttttatattttttagaagttggggttaggttgtgttttggtgtcgagaggaggggaggttggaagtatatagtttgggttagggtttgggtttagttttttgatgttaggagtttgggttttgtgggaaaggggtacgtggggggttttgttgttttggtatttttttgttttattattttattttggtttggataggtggggttggtaggaatttgggtttagagttttagggttgtgggtagttgtggggttaatggtgatagtattgagtggggtcggattagttttgtttattgtttatatgttgtgtgtgattgtgtatgtgtttgtgtgggtgtatttatattaatgtttggacgacgtaggtggggagtttattttagtttaattatagtagttttttttttatttatgtttgttcgtttcgagttttaggtttggtttttaaaatttaggggattttatttgttgtttagtttttgtttttttcgtattattttttattatttttacgggtttttttttaggtcgagttttttggagtttttttgtttgtttttcgtttggttttttgttggtcgttttggggtttttagggaagatgttatttttatggggatattttttttttttgtttattgtttttttagttttttttattttttgttttattttgttgagttaggaaatttttgggttaaattttagaggagatttattaataggtaggtttttaattaatttattgatttattttaaagttaaggttagttaggagtttttgtcgttattttataattatttttcgagttggaattttttggttttggagatagggttttattttgttagttaggttggagtgtgatgtttgagttacggttttttgtagtttcggattttttaggtttaagtaatttttttattttagttttttacgtagttggtattaatggtatgtgttattatatttgatttattttttattttgtgtaaagatatggttttgttatgttgtttaggttggtttcgaatttttattttagttttttaaagtgtttggatttatagatatgagttattgcgtttattttttttttttttttttttttttttttttgaggtagggttttatttgttattaggttggattgcggtggtatgattatggtttattgttttagttttagttttagtttttttagtagttgggtttattggtattagttattatgtttggttaattttttttgttttgttttgtagagttttattgtgttgtttaggttgtttttaaatttttggttttaagtgatttttttgttttagttttttagattattgggattataagtgtgagttattgggtttagttgggttttgtcgtttggtaataatattcgtttttagtttttgttatgttgttttttgagtggtaagggttgttgttatattttttagtgaaatgttttggtaagatttggagggtaggaggtaggtagaagttatttattcgtggttggtagtagttggtgagggggcgaatttagttttgttcggttattttgggaggttaagataggtggattatttgaggtcgggagtttaagattagttttattaatatggataatttttatttttattaaaaaatataaaattagttaggtatggtggcgtatgtttgtaaggtgggtattgagttggaatatggtttggattgtatagagtttggtatttttaagggtattaggtggtagagggtgttaagggatttagatggggttttataggattagttttttttttttaggaaatagaaggattaagacgattaattttttgagaatatacgttatagtttgggtttttttttgttttaggtaatagtaattaagaattttaggaatggaggttttggttttttttttagtcggggaagatttgttgtttttgttttgaaatttttggattttagaggaagggttgtaattagatattatgataggcgattttggtatgaaggtaggaggtagggtggttaagtatttttatgtggttagggtgttattatagattttgaatgtggataaatattttttgtttattgtaagtgatattggtgtgtgtttggtttttagttttgtttagtatttgaaaaaatttattatatagtgagtaatatagtaagattttgtttttattttattttattaattaattaattaatttatttatttatttttatttttttgagatggagttttattttgttttttaggttggagtgtagtggcgtaattttagtttattgtaatttttattttttaggtttaagcgatttttttgttttagttttttgagtagttgggattataggcgttcgttagtacgtttagttagtttttgtatttttatttttttatttttgtttatttatttgttttagagacggaatttcgttttgtcgtttaggttggagtgtattggtgagatttttgtttattgtttcgttttttaggtttaagggatttttttattttagtttttcgagtagttgggattataggtatttgttattatatttgatttattttgtatttttagcggagatggggttttattatgttggttaagttggtttcgaatttttgattttaggttatttatttgttttggttttttatagtgttgggattataggcgtaagttattgcgtttggttgatttttgtagttttagcggagatgggtttttataatgtcggttaggttggtttcgaatttttgattttaagtgatttgtttatttcggttttttaaagcgttgggattataggcgtgagtagttgtatatgttggttcgtatgtcgtaggttttattagttttttaaatttttattcggggtgcgttttttattattataatgagtaaagggttagtttgaggataggtaaaattaaaatgcgtatgttttttagaaagaaaagtttttattgaagatagttttgtttgaatgagtttaattataattcgaatgttgaggtttattgtgttgattgtgcggttattacgtttgttgtattttaagaatacggttatttttttgattatttattttgttttagtatcgttttttggaaatacgtgtatgttatattttgaaaaatattggttgagatgaaaatggaaaacgtagttggaatagttgtatttaatttggattaaatggtaagtttgttttttttttttttttttttttttttgagatatgttaaatattaaaattgtagaaaatagaaagatatggtttaaagaagagttatagaattgaacgttaaagtaatattatttagattaagaaattgattatagttaggatttttttatatgtattttgttttttatttaaattttattttttttttttttattaaagggaattattgattttgttttttgagatagagttttgtttcgtagtttaggatggagtgtagtggggtaattacggtttattgtagttttaattttttgggtttaagagatttttttattttagtttttcgagtagtggggattataggtgtgtgttattttgtttatttaatttttgtatttttggtagagatggggttttattatgttgtttaggttggtttggaagttttgggtttaagtttttttttttaaagtgttgtgattataggtgtgagtttttatttttagtacggtttaaattttttgatatttttttttttttaatagtttttggttagaatatgtttattagtaatatttttttttaattttttatgaataattatgtaagatttttataaagggagtttttttagtgttaatttttgttgttttatttttatgagtagtttgttttgaatttttttttttgtttattttgtattttatttttaagatgtttttttttttttgtaaaaattattgtatgttgtattttttttgttgttgtgttttttgtttaaattattttaagttaagaagataagaattaaagttttatattagttgttaatagtattttagattattttaggtggtgtgggtgttaaggtaattttattttggggtttgatttattaggttgatgaatgttagttttcggagggtttttgagattttttatttatgtcgtgtttttagtgcgggagtatttattttttataaattttgtttttaggataaaataattttgatgttattatattttaattgttttatatatttttttgaggttattttttttttgtggtttttggttttggggggtaaagttattattttgttttattgttatttgagatttagatatagtttttgtttgtaagtttttattaaatgtttttttttaagaaattggatatgttagtaatttttttgttttagttttttgtagtggtttacgtttttataggaggtcgaggtgggttgattgttggaatttaggattttgagattagtttggataatatggtaagatattgtttttattaaaaaatgtaaaaattagttgggtatggtggtatatgtttgtagttttagttatttgggaggttgaggtgggaggattgtttgaatt

SEQ ID NO: 23 - DNA, 6802 bp, Artificial Sequence
  chemically treated genomic DNA (Homo sapiens)
aattattgttgttttattattgatttaaaagtaatattaagttttttgtttgtagtcggttttaggtttatatattttttattggttattttttgtgtatagttattggtttgttagtggtttcgtggtgaagtagagtttattaatgtttagggtattttaaggttcgttttttattgtattgttattggtagatttcgttgtttgttggggggggtttgttgcggagagaggttttttgggttggtagagaggagttggtggttgaggggtttgagttaaatttgtgttttcggttttagagaaatgtgtatgtacggttaattttttcgaaatgaatagttgagaggacggcggtgggagggggttttagagatggcgttttttaggtcgtagtaggggtcggtgaggtcggcggttttggaaaatgagagtcgtacgttttagaggaggtttttaggtacgtaggattgttgggtggatttgggattttttaaggaggtgtttatggttcgtatttttgttaaatattttttattaaacgaagttttggagtatttttttttttttttttttggttagggtagtttgaattttaatgtttttagttataaaagtagtattataacggtagtcggtgaatattttagattttaaaaaatttttagatatatttttgagattttaaaatgaataataataaaaattaataagtattttgataattttatatttttttttagatggataattataagggggatgttagaaaattataattaattagtttgggttttaatttttgttttaatatatggtatttttaatggtttaaatatggtggtgatgataatgataaaaagttaaaaaggttaggcgttgtgatatgcgtttgtggttttagttttttgggaagatggtttgagtttaggaggtcgaggtcgtagtgagttgtgattgtattattgtattttagtttgggtgatagagcgagattttgtcgtaaaataaaagaaaattaaatttaaattattttaaaggattttatgttttaaagtgttaggtatttgtaaggtatttggttgaagtgttagttgagatgggtgtgaagtgagtttatgagtttttgggggagaaagtattgtttttgagtgggttatgttttttatttttttttttttttttttattttgtaaaagtaatgagtttttgttggtattttttttatttttttgtaaacgttgaacgatggagttagaggtttgtttttaaatattgtttagaaattaaagtttttaaataaattaaatatttaagtgaattgaaatgtaaaatgtatttttttatttttttttttaaagttttttattgagttttaaataggagttgtttttgattttattggtattgaggtgtttgttagggtttttgtagtgggagatggagatttagggtttagggatttaattttagaaaaaagaatttttttaaaataatttttttaattaataagaatttttaagaaataaatgtttagaattatgtttgtggtttttttttttttttttttttttgttatgtagtttttattttggtatattatatataaagtaaaatatatttatttttagtgtagagtttaatgaggttgggtaaggtggtttatgtttgtaattttagtattttgggaggtcgaggtgggaggattatttgagtttaggagtttaagaatagtttgggtaatatagtgagattttatttatatagaaaattttaaaaattagttgagtgtggtggtgtatgtttgtaattttagttatttgggaggtcgaggtgggagaattatttaagtttaggaggttaaggcgtagtgagttatgatcgtgttattgtattttagtttgggtgatagagttagattttgttttaaaaataaaaaaagataataataaaaatagagtttaatgagttttgataaatgtatatagaatattttaattatttgtaaaagttttttaatgtattttttagttatttttttttaaaataatatttaatgtgattttttttattatagattagttttgtttggtttagattttatatgggtggaatatagtattttttttttgtgtttggttttttttattttgttttatgtttacgagatttatttatgttttttttatatgttagtaatttatttttttttattgttgagtagtattttataattttattgttgtatttttttgttagttttgtttttggatatttgggttgtttttagttttttgttattaagaaaaagttaatttgaatatttgtatataagtttttgtgtagatatattgtaatagtagtatgttgtagttggtttattagagcggattttgtgtattttttttaaatttggtttagcgattgttatattggtagtttgaaataagttatggggatagtataaattagagttgttttttttttggagcgttggttgttaaatatttattagtatattattggatatgtgtttttatttttttagagtaaatatttaggagtgagattgttggattgattgtatggtaggtttatgtttaattttatatgaaattgttaaattgtttttaaagtgtttgtgttattttatatttttaatagtaatgtatgaaagttttaattgttttatattattattaatatatagtattgttagtttttttaattttatttattggagttgggtatggtggtttatgtttgtaattttagagtgttgggagaacgaggttaggagttcgatattagtttgggtaatatagtgagattttgtttttaaaaaaaaaaaaaaaatttttttagttattaaatggtgaagattcgaatagaaaagtggagttggggttaggtgtggtggtttaagtttgtaattttagtattttgggaggtcgaggtgggtagattatttgaggttaggagttttagagtagtttggttaatatagtgaaatttcgtttttattaaaaatataaaaattagttaggtatggtcgtgggcgtttgtagttttagttatttaggaggttgaggtaggagaattatttgaatttaggaggcggaggttgtagtgagttaagattttgttattgtattttagtttgggtgatagagtaaggttttgttttaaaaaaaaaaaaaaaaaaaaaaaagaaagaaaagaaaagaaaagaaaaggggagttgggaaatggaaattatatgggaggttagtaggtagaatttttgtttttttttttatagatagagaaagttatgtgataaatatagattgaaatatgttgaggtttttttttatttatgatttttttttgattttttttattatattgttaaaggatgttaaatttttaaataggagaatgtagttatttgaaatataataggttatttatggtgttggggaaataattaaaaagagaatttcgtgttaatttaatgaattttttttataaagtagataagaatgaaaagtttttttttgttttttgttttattgagatagggttattttgttatttaggttggagtgtaagtggtaagtggcgtgattttagtttattgtaatttttgttttttgggtttaagtgatttttttgttttagtattttaggtagttgggattataggcgcgcgttatcgcgtttagttgattttttttttttgtatttttagtaaagacggggttttgttatgttggttaggttggtttcgaatttttggttttaagtgattcgttcgttttggttttttaaagtgttgggattataggtattagttatcgtattcggtaggaatggaaagttttataattgaataagtattatattagattgtgatgtatattataaataatttgttaaagaggttttaaagatagaaagaaattttattcgtttatgtagtaggtagatatagtttattataaatatatttttaaataataatttgtgtttaagaaatttgacggtattatttggtatatatattttattttaaatttatttggtaattagggtggttatttgtgttagttaattgtttttatttaaaggaaaacgaaaatttatatttttatgataagtaggtaataatttgaagttaggtacgtagattaaatttttacgaagatagggaaagataggggtgttatttttattgatgtttatattttaaagagatggttataaggtttttaagaaaaatatttcggggatgtaaaattggtaagagatttagtttttaaaaggatttatatatattttaaagggatagagaaaattttatagttataagttttttaaaggaaatgttttaagagagacgttttttttttttgatattagggaaaattcgatttttaaaaatttgtgtttattttataatatttttatatattgattggtatcgtgtttttttttaggttcgtatttttttttttatttggttatttgtgattagttttttatagttttaattaattttatttttaaaggaagttttttagatagtaggtcgttttttttaggtttagttttttagttttcgttatattagagattcgttgtttttaaaggttatgaattatagttttttagagttggtgaatatcgtcgattattggttttgattttaatttattttaaagatggtaaaaattgagatacgggaaaattataaaagggtgtttagggtattggtttaaaaagggtatttaaggattttttcgtttagatgttaaagttttaaggttagttttaaatgatttgtgttttgttttatacgtttatgttattgttggggttaaagttttaggtacgtaggttttgttttaattgcgtttgcgcgagttaggacgagcgtttgttttagattttgacgttttaggcggttttttttaattcggaatacgatttatatttcgttggttttgttttgatagacgtgattttgatttaataagggtggaaggttgagtttcgtagagttaataacgagagttcgagaggcgacggaggcggattttgtgaggaaataagaagagaggtttaagatggagacggcggcggttgtagcggcgtgataggtgagggcgggttcgggagggttcggtttttggagcggttgtcgggtacgggtagggagttcggatcgaaagtttagttttaggatggttgcgtttgggtttcggcgttttttgttcggaatcggaggagtggtttgattcggggcgagattatcgtcgatagcgggggtggggtgggtaataggaataggcgggtaaggttgcgggtgatggtttcgttcgttgttagtggtggtgcgtttgcgtagagtcggaagttttttggtaggcgggattcgatcgagtggtgtcgggatttcgttttaattttcgttaaggtgtttaatgatttttttttattaattgcggggagtgtgtggaaacgcggtttatttttcggtttttttattttggattagtgtttgatcgttttcgtcgggagaatgttaggattttcgtttttgtaatcgttttttatgattttttatttagtttagattagtaatatgtttgtgattttttataggttgttaaggagaattttggagttttttttttatttttattttttttttcgtaatattatattttttttttttttttgttatgataatgtttggtggtttattattatttttttagttcggtttaatgtttggttatttttatttttatttttttttttattatagtttttagtgacgtttgttatatttttttttcgtatagtatgtagtgattttttttttttatgaattttttattatagaggtttgggatttttattagttatttaataacggtgtttgtggttttaatattaatattatattttagggtttagggatgtttatagtgttttttaaggatatgtttggtgtaatttttattttttttaaattaagggtagtatttgataatttttttttttttattatcgtgtttgcgattttttttttattatagtaattggtatttttttcgttttttgttaaaaaattaggatattttgggaggttgaggcgggtggattatttgaggttaggagttcgagattagtttggttaatatggtgaaatttcgtttttattaaaaatataaaaaattagtcgggcgtggtggtatacgtttgtagttttagttatttaggaggttgaggcgggagaatggttttaatttgggaggtggaggttgtagtgagttgagattatgttattgtattttagtttgggtaataagagcgaaattttgttagaaaaaaaaaaaaatagaaaaaaaaaaaaaaaaaatttaggatattttgttcgtgttttttatgtatttgacggtttagtgtagtgtgtattgatttttttattggtttttagtatagagttttgtgtgtttttttattttttaagatagtatgttttgttttttttttttgttttttttttcgtaattttgtgtagtgaagttgagattttggtatttaagagtgagataagtaataggagggtttgagtagagaaggaattggaaggattttagatgtgagtaggattttttggattgtcgtgtgaaaattaggttgtagggggcgataggagtttggattttgaattttattttgttttttgttattttgtttttagattattattattggatttttgaatttttgtttgtttttttgtagg

SEQ ID NO: 24 - DNA, 6802 bp, Artificial Sequence
  chemically treated genomic DNA (Homo sapiens)
tttataagaaggtagataagaatttagaggtttaataatgatagtttagaagtaaagtggtaggggataaaataaaatttaaagtttaggtttttgtcgttttttgtagtttaatttttatacgatagtttaagagattttgtttatatttgaagtttttttagttttttttttgtttaggtttttttgttgtttgttttatttttgagtgttaaggttttagttttattgtatagggttgcgggggagagaatagggaagggggatagagtatattgttttggagggtagaggagtatataagattttgtgttggggattaatggggaagttagtatatattgtattgagtcgttaggtatataagaagtacgaatagaatgttttgggttttttttttttttttttttgtttttttttttttttgatagagtttcgtttttgttgtttaggttggagtgtaatggtatggttttagtttattgtaatttttattttttaagttgaagttattttttcgttttagttttttgagtagttggaattataggcgtgtgttattacgttcggttaattttttgtatttttagtagagacggggttttattatgttggttaggttggtttcgaatttttgattttagatgatttattcgttttagttttttaaagtgttttggttttttaatagagaacgggggaaatgttagttattgtggtgagggaggagtcgtaggtacggtgatgggaaagagaggattattagatattgtttttagtttggggaagatggaggttgtattaaatatgtttttaaagggtattgtggatatttttaagttttggggtgtaatgttgatgttaggattatagatatcgttgttaggtggttaatggaagttttaagtttttatgatgaggaatttatggggggggggggttattatatattatgcggaagggagatgtaataggcgttattagggattgtaatggggagaagggtggaaatggaaatgattagatattgagtcgaattggggaggtaatggtggattattagatattgttatagtaaaaggagaaggaaggtatggtgttgcggggagaaaaatggaggtaaagagggagttttaaaattttttttgataatttgtgaggggttataggtatattattggtttaaattgaatgagggattatggaaggcggttatagaggcgagaattttgatattttttcggcgggggcggttagatattgatttagaataaggaaatcggggagtgaatcgcgtttttatatatttttcgtagttggtaaggaaaggttattggatattttagcgggggttaagacggaatttcggtattattcggtcgggtttcgtttattaaagggttttcggttttgcgtaggcgtattattattagtagcgggcgaaattattattcgtagttttgttcgtttatttttgttatttattttattttcgttgtcgacgatggtttcgtttcgggttaaattattttttcggtttcgggtagggaacgtcggggtttaagcgtagttattttggagttgagttttcggttcgggttttttgttcgtgttcggtagtcgttttagaaatcgagttttttcgggttcgtttttatttgttacgtcgttatagtcgtcgtcgtttttattttgggtttttttttttgtttttttatagagttcgttttcgtcgtttttcggattttcgttattggttttgcgggatttagttttttatttttattgggttagggttacgtttgttaaggtaagattaacggaatgtgagtcgtgtttcggattaggaggggtcgtttgaaacgttaagatttggggtaagcgttcgttttgattcgcgtaggcgtagttgaggtaagatttgcgtgtttagggttttaattttaatagtggtatagacgtataaagtagaatataggttatttggggttgattttagggttttggtatttgggcggagaaatttttaagtattttttttgggttagtgttttaagtatttttttatgattttttcgtgttttagtttttattatttttgaaatgggttggaattagaattaatgatcggcgatgtttattagttttaggagattgtagtttatagtttttgaggatagcgggtttttggtgtggcgggggttgggggattgggtttaggaggggcggtttgttgtttgggaggttttttttaggaatggggttgattaggattatgaaaaattagttataggtggttaggtgaagagggaagtgcggatttggaagggagtacgatgttagttaatgtgtggaggtattgtggggtaaatataaatttttaaagatcgaattttttttggtgttaaaagagaaagacgttttttttagagtattttttttagaaaatttgtaattgtaaaattttttttgtttttttgagatgtatgtaagtttttttaaaagttaaattttttgttagttttatattttcggaatgttttttttaagagttttgtagttatttttttgaaatgtaaatattaatgaaaatagtatttttgtttttttttgttttcgtgggaatttgatttgcgtgtttggttttaagttattatttgtttgttatagagatatgagttttcgtttttttttggataaaggtaattaattaatatagatagttattttaattattaggtgaatttgggatgaagtatgtgtattaaatggtgtcgttaagttttttgagtataagttattgtttgagaatatgtttgtaatgggttgtatttgtttgttatataaacggatgagatttttttttgtttttgaaatttttttagtagattgtttgtgatgtgtattatagtttggtgtaatgtttatttagttataaaattttttatttttgtcgggtgcggtgattgatgtttgtaattttagtattttgggaggttaaggcgggcggattatttgaggttaggagttcgagattagtttggttaatatggtaaaatttcgtttttattaaaaatgtaaaaaaaaaaagttagttgggcgcggtggcgcgcgtttgtaattttagttatttagaatgttgaggtaggagaattatttgaatttaggagatagagattgtagtgagttgagattacgttatttgttatttgtattttagtttgggtgatagagtgattttgttttaataaaataaaaaataaaaaaaaattttttatttttgtttattttgtggagaggatttattgggttggtacgagattttttttttaattatttttttaatattatgaatggtttgttgtgttttaagtgattgtatttttttgtttggagatttagtattttttggtaatgtaatgggaaagattagaggaaggttataggtgagggggggttttaatatattttaatttgtatttattatatggttttttttgtttataagaaggaagatagaagttttgtttattggttttttatataatttttattttttaattttttttttttttttttttttttttttttttttttttttttttttttttttttgagatagagttttgttttgttatttaggttggagtatagtggtaagattttggtttattgtaattttcgttttttgggtttaagtgatttttttgttttagttttttgagtagttgggattataggcgtttacgattatgtttggttaatttttatatttttagtagagacgggattttattatgttggttaggttgttttgaaatttttgattttaagtgatttgtttatttcggttttttaaagtgttgggattataggtttgagttattatatttggttttaattttatttttttattcggatttttattatttaatggttaaaaaaattttttttttttttttagagataggattttattatgttgtttaggttggtgtcgagtttttggtttcgtttttttaatattttaggattataggtatgagttattatgtttaattttaatggataaaattaaaaagattgataatattatgtattgatgataatgtagagtaattggaatttttatatattgttattgggagtgtaaagtggtataagtattttagaaatagtttggtagttttatataaaattaaatatagatttgttatgtaattaatttagtaattttatttttaggtatttattttagagaaatgaaaatatatgtttaatggtgtgttggtaaatgtttgataattaacgttttaggaagaaaatagttttaatttgtattgtttttatggtttattttaggttattaatatgatagtcgttgaattagatttaaaagagatgtataaaattcgttttggtgagttagttataatatgttattattataatatgtttgtataaaaatttgtatgtaaatgtttagattagtttttttttaatagtaaaaaattggaaatagtttaggtgtttagaaatagaattgataaaaaaatataataatgggattatggaatattatttagtaatgaaagggaataaattattgatatataggaagagtatagatgaatttcgtagatatggggtaaaatgaaaaaagttagatataaaagagaaatattgtattttatttatatgaaatttaaattaggtaaaattaatttatagtgaaggaaattatattagatgttgttttgagggagaatgattgagaagtgtattaaagaatttttgtaggtgattggaatgttttgtatgtatttgttagaatttattgaattttatttttattattatttttttttatttttgagatagagtttggttttgttatttagattggagtgtagtggtacggttatggtttattgcgttttgattttttgggtttaagtaatttttttatttcggttttttaagtagttgggattataggtatgtattattatatttagttaatttttaaaattttttgtgtagatggagttttattatgttgtttaggttgtttttaaatttttgggtttaagtgatttttttatttcggttttttaaagtgttgggattataggtatgagttattttgtttagttttattgaattttatattgaaaatggatatattttgttttatgtgtaatatattagaataagaattgtatggtaaaaaaaaaaaaaaagaagaaggttataaatataattttaaatatttgttttttagaaatttttattggttagagaaattattttgaaaaaatttttttttttgaaattaaatttttagattttgaatttttattttttattgtaggagttttggtaaatattttagtgttagtggggttaggaataatttttgtttggagtttagtgaggggttttggggaggggaataggggagtgtattttatattttaatttatttaaatatttaatttgtttaaaaattttaatttttaggtagtatttgaagatagatttttggttttatcgtttaacgtttataaaaagatgagaaaaatgttagtaaaagtttattgtttttgtaggatgggggaaggaggggaagggtaggggatatagtttatttaaaggtaatgtttttttttttaaggatttatagatttattttatatttattttaattggtattttagttaagtattttataggtatttgatattttaaagtatgaagttttttaaagtgatttaggtttggtttttttttgttttgcgatagagtttcgttttgttatttaggttggagtgtagtggtgtaattatagtttattgcggtttcgattttttgggtttaagttatttttttagaaagttgggattatagacgtatgttatagcgtttggtttttttgattttttgttattattattattattatatttaaattattagaagtattatgtattaagataaaaattaaaatttaaattagttgattatagttttttgatattttttttgtaattatttatttggaaaaaaatgtaaagttattaaagtatttgttggtttttattgttgtttattttaaagttttagaaatatgtttgaaaattttttaaaatttgaagtgtttatcgattgtcgttgtaatgttatttttatagttgaggatattaaggtttaggttgttttaattagaggggaaaaggagagagtgttttaggatttcgtttgataaaaagtgtttaataagggtgcgggttatgggtatttttttaaggaattttagatttatttagtagttttgcgtgtttggggattttttttaaaacgtgcgatttttattttttaaagtcgtcgattttatcggtttttgttgcggtttggagagcgttatttttgggatttttttttatcgtcgtttttttagttgtttatttcgggggagttgatcgtgtatgtatatttttttgagatcgggaatataggtttgatttaggttttttaattattagtttttttttgttaatttagggagttttttttcgtaataggttttttttaataggtagcgagatttgttaatagtagtgtagtagaaggcgggttttgggatattttgggtattgataggttttattttattacggagttattgatagattaatagttatgtataggaggtggttaatgggaggtgtgtgggtttgagatcggttataaataaggaatttaatgttgtttttaaattagtgatgaggtaatagtaatt

SEQ ID NO: 25 - DNA, 15881 bp, Artificial Sequence
  chemically treated genomic DNA (Homo sapiens)
gtttttttagggttgatttcggtaagattgggttgttttgatatatcgagtttatataggagtttggatttatttcggtatagtacgggcgacgaagggggggaaagattaagttggatgttattcggtttttattagtaagttttattatgtttgcgtgagcgttatcggcgcggaaagaaagaaatcgcgaggtaaacggaagtatataggaggttttcgatcgtatttttttatgggagtcggtaggagtaattatagagtgtaaggtttagcgtagcgttttcgggcggttgagaggatttagttcggagtcgcgggcgggagtttaaggaaggatttcgtttaaagggtggtttatttatttcgattttttttcgtttcgtagtttttaacgtttcgttattttattttttttggtggattttgttacgtagtggcgtttagtgaagggagtagtgttttttttagattttttggttttttcgttttcgagggaagttaggattagggtcgaatgaaggggttttttatttttacgttttatttttgttttattttaaggttattgggaatatttttcgtagtaaattgttaatttaatgaagatttggagggagttaattgttttagtttatttattatatggttagttggtttatttaataaatggttattggatgtttattatgtggtaggtattgtttcgggggagaggtatagtaatttaataggtttataaatgtgtaattatgaattaagtattttgaagaaaaggaataatgattggtattaaagtagtatttttttgttgagggagtaagttagtagttttaggttttgaaaagtgataatgaaattgtttggtttttgtaatagtaattattaagtttagaagtagaaagtatttagcggttttttttttttttgtaaatttggtagaaggtatatattaggttttaagagagtttagtatagaaagattttagggtgttaaatattttaaatagattgtgttatataatttttataataattttaggagataggtggtattattatttttattttatagattaagaaattgaggttgtaggatgttaaacgatttgtttaatgttaacggtatttagtgaatttaggatataaatttaagtagattgattttagagttcgcgtttttttaatattataaaatattgttgttgtggtttggtaattataatagttaaaaaaattatggcgtatttattatatgttaggtatttttttaattattttatatattattttttttaattttgatagtaattttaggaggtatatattagtattagtatttaataggtgaggaaattgaggtataagagatgttaagtttatttatttgaagttatataggttgttatttttttgtggagttggaatttgattttaggtagtttaatattatagttttgtatttaattattatattatataaaggaagtaggggtatttgtagtgtagaggatggtgaggagatagaattgggttgagatataggaggaggtggtagtggaataggggttgaagaatcgtgagagtttggggtattttgtttgtataattttttaggaatacgcgtgggatttgagttgatattttgattatttttttttttgttgggtggtttttgggaatgagataataaatatattattattatttgttatattttttgaaaatttttttgttaaatttttagtattttttttttttttttagatttttaagtaattttattggtttttaggggtttatgttagtaatatggaaatatgaagatcgtgaatatggtttttttttatttaattaattttagttttttttattatatttggtgttatgtggttttgtgggggttttgtttgtttttgtttatttaaaaatatttaattgataaaaattgtttatatttaaggtgtataatatgatgatttgatatgtgtatatattgtgtaatgattattatagttaaattgattaatatatttattatttattattatttatagttattatgggggtggtgaggatatttaaaatttgtttttttattaaattttaataatatagtattattaattatggttattatattgtatattagatttttagagtttatatattttataagtgaaagtttgtatattaatgttgatatcgaggtgggaggatcgtttgagttgttttttgttttggatatgtttttgtttattaattttttttaagacgaggtatttagaattgaatgtaggattttaggtgtggtttggttttgtagagtaagtggtatgttatttttttttgtttagatattttatttttataaggaagttttaatgttattttggtttttttggaagttatgttaattgatgatatgttttttgattattattagtaaaaatttttgaattatttttataaatgttattgttattttatttttttttggagttatttgaagtttaaatttggggtttaattatgagatattatttttagttttggtaaaatatattttgtggaatttggttttttatattaggtgattaagatttttttgggaattaattgtttttttttgttatttagtttagtatataaagttttgtattatttatagattaatcgggttattttttatattttttttaaagatgattaataaaaatgttgaataggatagtattaagaatagaattttatattgtattgggaatttttttaggtgatatttagttgtttatttgtattatttgagtatagtttttttgttagtatggatgagtgtgttaggggagtggtcgtgggtagagggtgaagaaaagtttacgtttatttgttttttttttttgtgttttttttttttttttgtttagtttttttattggatgtttattattttttagtttttattttaagatggattttgagaaaggatagggtatgtgataataagtggtataagattgaagaaaagagtttgggtacggtggtttacgtatgtaattttagtattttgggaagttgaggcgggtggattacgaggttaggagatcgagattattttggttaatatggtgaaatttcgtttttattaaaaatataaaaaattagttaggcgtggtggtaggtatttgtagttttaattatttaggagattgaggtaggataatggcgtgaattcgggaggtggagtttgtagtgagtcgagattatgttattgtattttagtttgggcgatagggtaagatttcgttttaaaaaaaaaaaaaattgaagaaaagaggagggaagatgaatgtttgtggttaatttttaggtaggtgagtggaatagttattgggggtgattagcgaaaggatagacgttgttaataaagtaaggtaattatataatatatgttgtttatttgttttgtgtaaatgtgagtattaattattttattattagtttataaatattttaaatgtttttatttaaagttttgttgatggttgggagaggtggtttatttttgtaatttttgtattttgggaggttaaggtaggagtatcgtttgagtttaggagtttgagattagtttgggtaatatagtgaaattttatttttataaaaagtagaaaaattagtttagtatagtgatgtgtgtttatagttttaggtattagggtgattgaggtgagaggattatttgagtttaggaggtggaggttgtagtgagttatgattacgttattgtattttaatttgggttttagagtaagattttgttttaaaaaaaaaaaaaaaaaaaaaaggttttagggtttgttggggtttgggggtgaggggagggattttagaggatgggttaataggtgtagtaaattattatgttatatatatatttatgtaataaatttgtattttttgtatatatattttattttttttgtttgtttgtttgtttgttttttagataaaataaagaaaaaaaaataaggttttgttgatttaaaatttcggatgaaattgtagtgggatttgtgatttgtttttatattaggatatagtgttttggggtaaggaaatatggtagtgttcgaggtgttaaggtgggtaggtagattagttagtaggggttttattattatggtttgtatttaatattggttgtattttttaggagaatttttgggggaattattgtagttggagtataatgtagggggtttttgagaaaatttttaggttttaagtgatatatttagtttgttttatcggtttataggatttaagagaaaggtggatattgagagttaatttttgaggttaaattttaaatggagaaagttaatatttatagaaaatggggaagggtataagtatttttgtgggtttatatttcgatatttttatttgtaggggaaaaatgtttttttagaaaatgatttagtacggggaagttttgtttttatttttgttttgttttgttttttggggtttttttattattaagtttaattgtgtgtttttgagatttttttgtttcggaggataggagattcgaaaaacgttttttttggttagtttttttgttttgtgtttgttagtttttagtatttttttttttttttgtaagtttttttttttgtgttgattgtttttatagtattttaggtatgttgtttttttatttttgggaggatagtttgatgatttgtttgtttaggttagttttatttagagttttagtggttttagttatgttgagaaaggtttttttaaagatagatttaagatagtagtgttagaggttttaagtaaatgaagggcggggatagttgagggggtggaatagggacggtagtagggaattagatagtatgttgttgagaagaaaaaaagatattggtttaggttaggaagtaaaaaaagggaattgagtggttgtgaaagggtggggtttgtttagattgttttttttttttggattgtaagaatatgtttttagggttagtgtttgttgcgatcgagttttattttttaagttttggtattttaatgtatttgggaagttatttgtattaagttaggattgaggtgggtttggggtatggtaggggttgggtagtagtagtaatgtattttgtttgggatttttaaaaattagagagatagtatggttggtgttatttattagttagtggaggaggttgacggagggtgggagtgttattagtataaggttttggtagttttttttggtgattagagaggtcgaaagggtttttttcgataagggttgagggtgggcggaataggaagagaaaaatgtgatatgaggtgattattcgaataggtagtaaatgttagaaaggggtatttttggtaaatttagtggaaaagtaatattgtagggagtagttagataaaaataagtttttttgttaaatagtgtttgaagatttaatagggatatatgggttaatgaagtttttagaaaaagaaatattaagaggtagattttttgagaatatggtaaaagtttacgttttacgttatgaagttgatttttgtgagttagggaaaggtttggttaggttagggtgtaggttatttgttttgagttgtattaggttaaatgtcgttagggttagagttggtttattaaaggattgtgtggaagttgtgttaatttcgtggtaataatgggtaaaagattgggttaggagaaagtagtttttgttttagtttagatagtgcggttaatttttgaggttgtggtaaaggtttttttttttattattgttttttatgtgtatggtttgttttttttttgtttttattatttttttttttttttttttttttttaatttttttttttttttatttatttttttttttttatttatattttttttttattatatttttttttgttttgttgattattagattttgatatatagttagtatttaataaataattgtcgaattgtattgatttttttttgttttttttttttttcgtttttttttttttttttttttttttttatttttttttttttgtttgtttagtattttttttataaggtggttgtgagtagtaaatgtgtaaatatatgtaaagtttttaaaatagggtttggtaatagtaagtgttggattttagtatttgttataatttttattttgttttagatttgttaatgttttttagagggtttatttagagtaaataatatgatatttagaataaaagtgattggtgattttaattaagatatttttggataagttgtttagattttagtttttttggagttttagttatttgataaaataatgttattttttaaataagttataaaatgtaaatatttatggtaatttaaagtattatatttaaatagtgttttttagggtttgttttgtttattttgattttttttatatttaaattatttaaattgtttgtttgtgttgaagtttaaatttttattgcgtatggttattgatatttttgtttggaattttttttttttttttttgatacggagttttatttttgttgtttaggttggagtgtaatggtacgatttcgggattttagtttatcgtaattttcgtttttcgggtttaaataatttttttgttttagttttttaagtagttgggattataggtatgtgttattacgtttagttaattttgtatttttagtagagacggggtttttttatgttggttaggttggtttcgaatttttaattttaggtgatttgtttgtttgggttttttaaagtgttaggattataggcgtgagttatcgtatttattttggaattttttgtaaattttttatggtgcgaattaatgtaattttttatttagttatgggggattggtgtaattttaaattattattatgatttgttatttttatttgagtaaattttttatagagtttttttttagtggattagatttatattaggaagtgatttaggtataaagggaagatatagttttcgaaaattaaagtttgggcgttttttaaagagttattagatatttttttttatatttataatgatttgattgttgagatttgattgttaattattgaaaataaggaagaattagaatttttagtgatatagtgtttagtaagaagttagaaaagaggttttgatatatttgattttaaagttatttggttatgtatgaagttatttggggaggggaaggaggagggagaatttttttgaggattttgaaataattgggttacgtgtgatttttagtttttatggagatttatgtgtagtggttgagggtaatttgagagtattggaaatttagaagttttaatattaggttttttttttcgtttttagaaagtttttataagatgtttttaggattatattggttatttgaattttaaggagaagttttttttattgttttatttttttgaattgaaaataaattgtagtttgttagtttattttagaagaaggaaattttagagttaagagaagttaagttttagataagttggaagttggaatatattggagtttaagattattgatttaatgaaaaaaaaaaaagatttgtttgtagtaaaattagagttttaaaaatgattagaaatggattagaaaagagataaggataatgagaaagggggttttttaaaattatttggaattgaaattgggataatgtttttggaaattattttggtagtatgtattaaaatgtaaaatgtatatatttttttgattttggaaatgatgtttgtatagagattttaataatatgggaaaataattaggaataatgttaaataagaatattagatttttttttggaaaaaggtattttgaacggatggatggatggatagatatatatatatatgtatatatatatatatagatgttacgaaaaataggtaaattaattgaatgtgtaatatgattttaaatattataagaaatatatatagaaaaaaatggaaggaatatgtcgatatattaatgtttttggatgagtttatgaatgatttttttttttttatatttttgtatttgatatattttttataataagtatgttttattttattatattttgttttattttgagatgggggtttttttatgttttttaggttgattttgaatttttgggtttaagtaattttttaatattagttttttgagtagttgggattataggtgtattttattgtatttagttgcgtgtgttattttgatatcgatggaaaaaataaataaaatgtttaagttaaggaaaataaaaattaggttgaaaaagaaggttaaaagggtatataagtttagagtgaaagatagatattttagtagttatttttagagtagagggagaatattgaaagtattattattgatttgatttggtattgattataaatttgtagattggttttttggttttttttttattattagttggttagaatatattgtcgttaatgtaagataaaaagagatgatgaattatagagatttagaagtttttaaaattatagaagaaaaatgtaaaatgttaaaaatataaggttaggcgcggtggtttaagtttgtaattttagtattttgggaggtcgaggtaggtgttatggtgtgcggttgtagtttaagttatttaggaggttgaggtaagagaattgtttgaaattgggaggtagcgattgtagtgagttaagattgcgttattgtatcgaagtttggatgatagagcgagattttgttttaaaaataaataaataaataaataaataaataaaatatgaattgttgtggaagaattagagagttttaaggttttttgtaaatgattatagtaggagagtttttttggttagtatgtagttttcgaaaattgagtttggtttgatgtttttattataaatttggttttttgtagttttgattatgaagtttattataaaataattgggttttattggggttcgaataaaagtattttgggaatttaataagattaaaggttgttttgttgttgtgggtatgattttttttttttttttttttttttttttttttgagacggagtttgattttgttatttaggttggagtgtagtggtacgatttcggtttattgtaattttcgttttttgggtttaagtaatttttttgttttagttttttgagtaattgggattataggtgcgcgttattacgttaggttaatttttgtatttttagtagagatagggtttttttatgttggttaggttggttgtttttaaatttttgattttgttatttagtcgttttagttttttaaagtgttgggattataggtatgagttattatacgtggttatatgtaaattttaaatatgtaaattaatattgtatattttttatagatatttatatttgtaatgataatatgaaaacgtatttaggaatgataaatattaaatttaagatattggtaatttttaaggagggagaagattaagattttggagtatataaaggggttttgattatatagatagtattttagtttttaatacgtttttttttggttttaaggttaaggaatttttaattgaaattttagttagaacgtgaaggatgttttttgggattgggaagagatttttcgtaggttaaatttaattttttattagagatagttgataattttattatattttatagtgaagtattaggaagataggattgaaaaggtaagaaggaatgatgtaaattgtatagtttaaaagataagttggatttaggtttgttagtttgtttaagtaattgagaatttattttgagattaaaaaattaaaataatgtttatagtagtattgtttattattgaaagtaaataatttaaatgtttattaataggagaatgaataaatatattggaatgtatttattatatagaatattttatgtatataaaaatgaattaaaatatatgaagtagaattagttagataaataaattttaatatattatattgaggggaaaaaagtaagttgttggagaatgtgtattatatatatatatataaattttttttttttttttttttttttttcgcgatcgagttttatttttgttgtttaggttggagtgtaatggtaagatttcggtttattgtaatttttgtttttcgggtttaagggattttttcgttttagttttttgagtagttgggagagtagcgttggtttagttagtttttgtatttttagtagagatagggtttttttatgttggttaggttggttgtttttaaatttttgattttgttatttattcgttttagttttttaaagtgttgggattataggtttgagttatcgtatttggttatatgtaaattttaaatatgtaaattaatattatatattttttatagatatttatatttgtaataataatatgaaaatatatttaggaatgataaatattaaatttaagatattggtaatttttatggagggagaagattaagattttggagtatataaaggggttttgattatatagattgtattttattttttaatacgtgaggtaatatggtataattttaggattttgtagagttaagcggtgagtttaagattgtaatgttatagtttttgtattttttatttgaaatattttataatataaaataaagtatatttgaggttaggtgtagtagtttatgtttgtaatttttatattttggaaggttgagataagaagattatttgtatttaggagtttgagattagtttaggtaataaagtgagattcgtgtttttataaaaaaattaaaaattagttgggtgtggtagtgtatatttgtagttttagttatttgagaggttgaggtaggaggatcgtttgagtttaggaggtggaggttgtagtgagtggtgattttgttattgtattttattttgggtgatagagtgagattttgttttaaaaaaatagaaggtatatttgattaaagttttatatttatagtaagtaataagaattttagggatagagaagggtggatgttttatttaaatattgtgtttttattttattaataatgaaatatttaggaaaggaaataataagtgattttagaaatttattagttagatagaatttttttgggaatgatttaaagagggaaaatgtaagaaaatttggtaagattaagaagagtttttaagtgtaaaaaaagtatagttgatagttattagagatagattatttttattagtttggaggaatattgtagaggaaagagtttaggattttgaatatttttttattttttgtatttattattatttttttttttgttgaatatttttagaaaatggagaggagtttgttataattgttttttgatgatagttatggagaatgataggggttttaaggtagatggtattaattttattaaagattaaaaaataaataaacgaataaaaattttttcggtaggtagtgaaatattataaaaaaagtaagggttatagatgatatattaagagttatagatggatgaggttggataagttatataatttttgtgttagtttttttatttgtttgttgtgaggaataaatgaaataatgtttgtaaaatgtttgttaggtagaagttattgaaaggaatagaagttttattttatttttttaaggaaagatagggaatggttagaatttttttagttaattgagtagtgtttttaaggagaaattaagagaaaatattattttttggatattttggttaagtagttatttgaagtatagttgattggttattttattttaaattatattttatagattttttttaattataggttggttgtgtagttttttgaattttgttttggtatttttttttttttttttttttatttttattttttattttttttttgagattttaggttggagtgtagtgttacgattttggtttattgtaattttcgtttttcgagtttaagcgatttttttgttttagttttttgagttgttgggattataggcgtttgttattacgttcggttaattttttgtattttaatagagacgggattttattatgttggttaggttggtttttaatttttgattttaagtgattcgttagttttagttttttaaagtgttgggattacgggtatgagttattgcgtttggatttattatttttaatagtattttattttatgagcgaagataagagtttaagatggtttagtttattgattttgtaagtgttatttttattaattttttggtatattgtagtttgtatgatggttgtatttttgttaataagtttcgtttttttgaattttgttgttttatagggagttgggaggttgtaaaaggtggttttgtaaaaatttttgtatttataatttaataaaggggatattgtaatattggaattttatattttaaatgaagagttttgtgtttattttttttttttttttatttttttttttttataaataatagtggtgtgtgtgtgtgtgtgtgtgtgtgtgtgtgtgtgtttgtatgtttgagatatttaagttatttttatttttattttttattttgagtggagtttagggttagttattattgtgtatattttgtggttaaatcgattttgtaggttattgaaattgttttaaaaaaattggggtttttattggttaggtacggtggtttatatttgtaattttagtattttgggaggttaaggtaggtaggttatttgaggttaggagtttaagattagtttggttaatatggggaaattttatttttattaaaaatataaaaattagttaggtgtggtggtatacgtttgtaatttcggttatttgggaggtcgaggtaggagaattgtttgaatttaggagatggaggttgtagtgagttaagatcgtgttattgtattttagtttgggtaataaagtaagatttcgttttaaaaaaaaaaaaaaaaaatggggttttttataataagtatttatagaagttttattttttaattattttttaatttagagttgtgtgttatatattaattttttggaggatttaaaaatggatttttttttttttatattattgagtgatggattagtggtatttaaggaagagttattatatttttaggttgtgtgagtttggattggattataagaaataggagaaaagtagttaaagaaggtggtattaaattatggtaattttggtagatttttagtttaatgatttagaggtggaggttattttattttttgtttagaggggcgatggttagtgagagatttgtttatttttttatagttagagtagtattaaattttgtttaaatatagatatttgagagagaggaagatttttttttgtataaattggatttgttttaaaatagagaaagagtagaggtagtttttagaaggatttgttttataggaagtaagagtaggggataagaatgaaatagatggtgggtttaagtagggaatgtatttattaagagtttgtaataaaattaaagataaaatgttgtttgcgatttattcggttaagagaagtatattagatatggtttgttgggatgtttttgattttatttattggttatagtatttaatttatttagggttttattttttattttgtaatttgagtttttgattgtgaagaggtatttaattataatttgttataagaataattgtggtatgattatagggtttttaatgagttggtagtttttgagaatagagtagtattatttggttattattatttttgagtaaatgtataattgtaatgttaaaatgaatttttttgagtttagagttaaaattgagtgttgggaagggttgattgtaaatttattaatttgttattttagtgagagattatttaaattagggagttagggtgtgtggtagggtggagggaaaggtttgtatttttgtttaattttttttaaaatttaatttataaaatattgaattaatttatttttagaagatagtggtatatatatggtagataagtggtaaagcgattttttagaatatttttggtgtttttttgacgtattttcgtttttttagtatgagaatagaattttttatattataggaaagagtaaaataatagtgtggatagtttttaggttttgataaaatttatttttttgtttttttagtgtgagtaataatttgtttaaaaagtagaaaaaaattgttggttttatttattttgtttttacggtgttattaaaagtataaggagtttatttaaaaaatagatatatttttatttttatttttttattagaggaaaaatttttattattaattaaatttgaatggagggttggtggttttttcgttatttatttagtgtttttttgttgttgtttttgattttgttttttgagacggagtttcgtttttgttgtttcgattggagtataatggtataatttcggtttattgtaattttcgttttttgggtttaagcgatttttttgttttagtttttcgagtagttgggattataggtatttattattacgttcggttatttttgtatttttagtagagacggggttttgttatgttggttaggttggttttgaattgttgattttaggtgattcgttagtttcggttttttaaagtgttgggattatagatgtgagttatcgcgtcggtttagtgttttatttttatgatagtatttgtttttattttatttttttaatgaaagttcggaattagtaataatattatattgtgtataaattgtaagtgaataattgatatgaagtgttgtttggtgtgaataaaaaagttagtggtgattttgggaattttatttgtttttttgtgttttagttatttaaattgaatttttttggagtattgtaggtttggggaggttaaataagttgtgttttataaatgaatagaggtggtatttatattagtaagatagttgtattatttttgtatgatgttgtttaaaagaattaatttaagttaaatggggaaaaggttagaaaataataattattttttttttattaaaatttattaaaaaaaattatgtttttaattttagaataaattttttattttttgtagtttagttagtgggtgtgggtaaaattagttgggtagtagttagtgtgtgtttagaattgtaggtgtagtttttatatttttattagtttttttggttatagattttagtgggataatgtttgaaaaattatatttatcgtttaggaaattgggaattgaaagtttaatatttgttttagtggagttttggtatttgtattattttttttgggtatattaagattaatagttgtatagatatttttgttttttatagattttatatatattatataaaggtgaatagtgtaaagttatttttatattttattaagtatataggtgcgtgttatttaatatttagagtattttattgttttatataagaatttagtttatatgagtttataatatcgaattaatttttttttaatttagtgtgtatttattatatttgaaatttgatagagttgggggttgtgggaggaggttggtaggaagaaattattttgtgagttgtgtatatttttgttttatttgaaattaggtagttaggttgagggggaattaagagggatgaggattaatgttttgggtttttaggaatttttattattaatagt

SEQ ID NO: 26 - DNA, 15881 bp, Artificial Sequence
  chemically treated genomic DNA (Homo sapiens)
gttgttgataatgaaagtttttgaggatttaggatattaatttttattttttttggtttttttttagtttagttatttagttttaaatggaataaaaatgtgtatagtttataaaataatttttttttattaatttttttttatagtttttagttttgttaggttttaggtataatggatgtatattgaattggggggggattggttcgatgttgtgagtttatataaattgagtttttgtataaggtaatggaatgttttagatgttaaatggtacgtatttgtgtgtttggtaaggtgtagaggtagttttatattatttatttttatatgatatgtgtagaatttgtgaaaagtaaaagtatttgtgtagttgttgattttgatatatttagaagggataatgtaggtgttagaattttattgaggtagatattggatttttagtttttaattttttagacggtgaatataattttttaaatattgttttattggggtttgtaattaagggaattaataaggatatggaggttgtatttgtagttttggatatatattaattgttgtttaattgattttgtttatatttattgattgagttataaaggatagaagatttgttttaaagttgaaaatataattttttttggtgggttttggtggggggggggtagttgttgttttttgattttttttttatttagtttaaattagtttttttagatagtattatgtaaaagtgatgtaattgttttattgatatagatgttatttttgtttatttatgaaatataatttatttagtttttttaaatttataatattttagaaggatttaatttaggtaattgaaatatagaaagataaataaagtttttaaagttattattggtttttttatttatattaagtaatattttatattagttatttatttatagtttatgtatagtgtaatattattattaatttcgaatttttattggaaagataaagtgaaaataaatgttgttataaaaatagaatattaggtcggcgcggtggtttatatttgtaattttagtattttgggaggtcgaggttggcggattatttgaggttaatagtttaagattaatttggttaatatggtaaaatttcgtttttattaaaaatataaaaatagtcgggcgtagtggtggatgtttgtaattttagttattcgggaggttgaggtaggagaatcgtttgaatttaggaggcggaggttgtagtgagtcgagattgtgttattatattttagtcggggtaataagagcgaaatttcgttttaaaaaataaaattaaaaataataataaaaaaatattaagtaagtaacgaaaaaattattagttttttatttaagtttaattagtggtagggattttttttttggtgggggggtgggggtgggaatgtgtttattttttaagtaaattttttatgtttttggtggtatcgtggaagtagaatgaataaagttagtagtttttttttattttttaagtagattattgtttatattaggaaagtaagggagtgaattttattaaagtttgggggttatttatattgttattttgtttttttttgtggtgtaggaggttttatttttatgttggggagacgaaaatacgttaaaggaatattaggggtgttttggaagatcgttttgttatttatttattatgtgtatgttattattttttggaggtggattaatttaatattttgtaaattagattttgagaaaaattgggtaagagtgtaaatttttttttttattttgttatatattttgattttttggtttaaatggttttttattggagtgataaattgatgagtttataattagttttttttaatatttagttttagttttaaatttaaagaggtttattttaatattataattatgtatttatttaggagtagtggtaattaaataatattattttatttttaggaattattaatttattgagagttttgtaattatattataattatttttgtggtaaattataattaagtatttttttataattaaagatttaaattataggataaaaaataaaattttaaataaattgagtattgtgattagtaaatggggttagaagtattttaataaattatgtttggtgtattttttttagtcgaataaatcgtaggtaatattttatttttagttttgttgtaggtttttggtggatatattttttgtttagatttattatttgttttatttttgttttttgtttttattttttataagataggtttttttggaagttgtttttattttttttttgttttagaataaatttagtttgtataagaggaagttttttttttttttaagtatttgtgtttgggtagggtttagtgttgttttgattatgaggaagtaagtaagttttttattagttatcgtttttttgagtaaaaggtgaaatggtttttatttttagattattgagttagaggtttattagaattgttatgatttggtattattttttttgattgttttttttttgttttttatgatttagtttagatttatatagtttgaaaatgtggtagtttttttttaggtgttattggtttattatttaataatgtgaaaggaaagggatttatttttgagttttttagaaggttggtgtgtaatatatagttttgagttaaaaagtagttagagggtaaagtttttgtgggtatttattgtgaaaggttttattttttttttttttttttgagacggaattttgttttgttgtttaggttggagtgtagtggtacgattttggtttattgtaatttttattttttgggtttaagtaatttttttgtttcggttttttaagtagtcgggattataggcgtgtgttattatatttggttaatttttgtatttttagtagaggtggggtttttttatgttggttaggttggttttgaatttttgattttaggtgatttgtttattttggttttttaaagtgttggaattataggtatgagttatcgtgtttggttagtaaaggttttaatttttttaaaataattttagtagtttatagagtcggtttgattataaaatatgtataatgatggttaattttgagttttatttagggtgaagggtggaaatggaagtgatttgaatgttttaaatatatagatatatatatatatatatatatatatatatatatattattgttgtttatagaaagaaagaaatgggggaggagaaaaaatagatatagagttttttatttaaaatatggagttttagtgttataatgttttttttattaaattataaatgtaaagatttttatagggttattttttgtagttttttagttttttatggagtaatagaatttagaaagacgaagtttattaataagagtgtagttattatataaattgtagtatgttaaggaattaatagaaatagtatttgtagaattagtaaattaaattattttgggtttttattttcgtttataagataaaatattattaagaataataagtttaggcgtagtggtttatgttcgtaattttagtattttgggaggttgaggttggcggattatttgaggttaggagttagagattagtttggttaatatggtgaaatttcgtttttattaaaatataaaaaattagtcgggcgtggtgataggcgtttgtagttttagtaatttaggaggttgaggtaggagaatcgtttgaattcgggaggcggaggttgtagtgagttaagatcgtgatattgtattttagtttggagttttaaaaaaaaaataaaaaataaaaataaaaaaaaaaaagaagaagaatattagagtaaaatttagaaaattatatagttagtttatgattgggaagagtttatgagatatgatttaaaataaaataattagttaattgtattttaaatgattatttagttaaaatatttaagaagtagtgtttttttttgatttttttttgaaagtattatttaattggttaggaagattttggttattttttgtttttttttagggggatggaatggaatttttgttttttttagtgatttttatttgataggtattttataggtattattttatttattttttataataaatagatgaggaaattgatatagaggttatgtgatttgtttaattttatttatttgtagtttttggtatattatttatagtttttgttttttttgtggtgttttattgtttatcggagggatttttgttcgtttatttgttttttggtttttgatgaggttgatgttatttgttttggggtttttgttattttttatggttattattaaagagtagttgtgataaatttttttttattttttaggaatgtttagtaagagaggaaatggtggtaaatataggagataagagagtatttaagattttaagtttttttttttgtaatatttttttaggttggtaaggatgatttgtttttggtaattgttaattatattttttttgtatttgaggattttttttagttttgttaggtttttttatattttttttttttaaattatttttaaggagattttgtttaattagtgaatttttagagttatttgttgtttttttttttggatgttttattgttgatggaatgaaagtatagtgtttaggtggaatatttatttttttttgtttttagggtttttattgtttattgtgaatataaaattttgattaaatatattttttatttttttgagatagggttttattttgttatttaggatggagtgtagtagtaagattattatttattgtagtttttattttttgggtttaagcgatttttttgttttagttttttaagtagttgggattataggtgtgtattattatatttagttaatttttaatttttttgtagagatacgggttttattttgttgtttaggttagttttaaatttttggatgtaagtgatttttttgttttagttttttaaagtgtggggattataggtatgagttgttgtatttggttttaaatatattttgttttatattatgaaatattttaaatagaaagtatagggattataatattataattttggatttatcgtttagttttataaaattttaaaattgtgttatattgttttacgtgttaagaagtgagatataatttatataattaagatttttttatgtattttaaaattttagttttttttttttatagagattattaatattttgagtttggtgtttattatttttaggtatgtttttatattattattatagatgtaagtatttataaaagatatatagtattggtttatatgtttaaaatttatatatggttaggtgcggtaatttaggtttgtaattttagtattttgggaggttgaggcgggtggatgataaggttaggagtttgagagtagttagtttgattaatatggagaaattttgtttttattaaaaatataaaaattagttgggttaacgttatttttttagttatttaggaggttgaggcgggagaattttttgaattcgggaggtagaggttgtagtgagtcgagattttgttattgtattttagtttgggtaataagagtgaaattcggtcgcgaaaaaaaaaaaaaaaaaaaaagaaaatttatatatatatatatggtatatattttttagtaatttgtttttttttttttaatataatatgttaggatttatttatttggttagttttattttatatgttttaatttatttttatatgtataaaatattttatatgatgaatatattttaatatatttatttatttttttgttgatggatatttaggttgtttgtttttagtgataaataatgttgttgtgaatattattttgattttttgattttagaatgaatttttagttatttagataaattggtaaatttaggtttagtttattttttggattatgtaatttgtattatttttttttgtttttttagttttgtttttttgatgttttattatgaaatgtggtagaattattaattatttttagtgggaggttaaatttggtttacggaaaatttttttttagttttaagaagtattttttacgttttaattgagattttaattgagaattttttggttttgggattagaagagaacgtgttaagaattgaaatattatttatataattaagatttttttatgtattttaaaattttagttttttttttttttagagattattaatattttgaatttggtgtttattatttttaggtacgtttttatattattattatagatgtaaatatttataaaagatatatagtattggtttatatgtttaaaatttatatatggttacgtgtggtagtttatgtttgtaattttagtattttgggaggttgaggcggttggatggtaaggttaggagtttgagagtagttagtttgattaatatggagaaattttgtttttattaaaaatataaaaattagtttggcgtggtggcgcgtatttgtaattttagttatttaggaggttgaggtaggagaattgtttgaatttaggaggcggaggttgtagtgagtcgagatcgtgttattgtattttagtttgggtgatagagttagatttcgttttaaaaaaaaaaaaaaagaaaaaagaaaaaaaaattatatttatagtaataaagtaatttttaattttgttaaatttttaagatgtttttgttcgggttttagtgaaatttaattattttatgataagttttatagttaaggttataggggattaaatttgtgatgaaggtattaagttaaatttaattttcgaaagttgtatgttgattagggaaatttttttgttgtagttatttataggaggttttagggttttttggtttttttatagtagtttatgttttatttatttatttatttatttatttatttttgagatagagtttcgttttgttatttaggtttcggtatagtagcgtaattttggtttattgtaatcgttattttttagttttaagtaatttttttgttttagttttttgagtagtttggattatagtcgtatattatgatatttgtttcggttttttaaaatgttgggattataggtttgagttatcgcgtttggttttatgtttttagtattttatattttttttttgtggttttggaaatttttaggtttttgtgatttattatttttttttgttttgtattagcgataatatattttggttaattgatgatggaaggagagttagagagttaatttgtaagtttatagttagtgttagattagattagtggtaatatttttaatattttttttttgttttgagggtgattgttggggtgtttgttttttattttggatttgtgtgtttttttggtttttttttttaatttagtttttgttttttttggtttaaatattttatttattttttttatcgatattaaaataatatacgtagttgggtgtagtggggtgtatttgtagttttagttatttaggaggttgatattggaggattgtttgagtttaagagtttaaggttagtttgagaaatatagggagatttttattttaaaataaaataaaatatagtaaaataaaatatgtttattgtagaaaatatgttaagtatagggatataaaaaagaaaaaattatttataaatttatttagaggtattaatatatcggtatattttttttatttttttttgtgtgtgttttttataatatttgagattatattgtatatttagttaatttatttatttttcgtaatatttatgtatgtatgtatgtatgtatgtatgtatttatttatttatttattcgtttaaggtatttttttttaaaaaaagatttaatgtttttatttaatattatttttaattatttttttatgttattaggatttttatataagtattatttttagagttaaaaaagtatgtgtattttgtattttgatatatattgttaaaatagtttttagaaatattgttttaattttagttttaaatagttttagagagtttttttttttattatttttattttttttttggtttatttttaattatttttaaaattttggttttattgtagataaatttttttttttttttattgagttaatgattttaaattttagtatattttaatttttagtttgtttaaaatttaattttttttgattttagaattttttttttttagggtgagttaatagattatagtttgtttttagtttagggaggtagggtagtgagaggagtttttttttgagatttaaataattaatataattttaaagatattttgtgagaattttttaagagcggagagaagagtttggtattaaagtttttgggtttttaatgtttttagattgtttttagttattgtatatgaatttttatagaaattgaaagttatacgtggtttaattgttttagggtttttagaggagttttttttttttttttttttttttagatggttttatgtataattaagtagttttggagttaaatatgttaaggttttttttttagttttttgttgagtattgtgttattgaaaattttagtttttttttatttttagtagttagtaattagattttagtaattagattattgtgggtgtagaagggggtatttgataattttttggagaacgtttaaattttggttttcgaaagttgtattttttttttatatttaagttattttttgatatgggtttagtttattgaaaggaaattttataggaaatttgtttaaatggaaatagtaaattatagtgataatttaaaattgtattaattttttataattggatggaaagttatattagttcgtattataaggagtttataaagaattttagggtgggtgcggtggtttacgtttgtaattttagtattttgggaggtttaagtaggtagattatttgaggttgggagttcgagattagtttgattaatatggagaaatttcgtttttattagaaatataaaattagttgggcgtggtggtatatgtttgtaattttagttatttgggaggttgaggtaggagaattgtttgaattcgggaggcggaggttgcggtgagttgagatttcgagatcgtgttattgtattttagtttgggtagtaagagtgaaatttcgtgttaaaaaaaaaaaaaaaaaattttaaataaaaatattaatagttatacgtaatggaaatttggattttaatataagtaagtagtttaaatagtttgaatataaaaggagttagaatagataggataagttttaagggatattgtttgggtataatgttttaggttgttatgagtatttgtattttgtggtttatttggaaagtgatattattttattaaataattgaggttttagagaggttggagtttgggtaatttatttaaggatgttttgattggggttattaattatttttattttaaatgttatattatttgttttaggtaggttttttgggggatattggtaggtttgaggtagagtaaaaattatagtaaatattgagatttagtatttattattgttaggttttgttttaaaagttttatatgtatttgtatatttattgtttataattattttatggggaaggtgttaggtaggtagggaggaggaaatggaaagggaaaggaaaagggaaaagagcgggggaagaaaggagtaagaaaaagttaatgtaattcggtaattatttgttaagtgttaattgtatgttagggtttggtaattaatagaatagaggagggtataatgaagaggggatataggtagagaaaagaggatgagtgggaagaggaggaggttggagaggaggaaaggaaaggagaaataatgaagataagagaaaagtaagttatgtatatggagggtaatggtaagaggagaaatttttgttataattttaagggttggtcgtattgtttgggttgaggtagaggttgtttttttttggtttagttttttatttattgttattacgaggttggtatagtttttatatagttttttaataagttagttttgattttggcgatatttggtttggtatagtttaaggtaggtagtttatattttggtttagttaggtttttttttagtttataaaggttaattttataacgtggagcgtgagtttttattatgtttttagagaatttgttttttagtatttttttttttaaaggttttattgatttatgtatttttattgagtttttaagtattatttgatagaagggtttgtttttatttgattgttttttgtaatattatttttttattaagtttgttagaggtatttttttttaatatttgttatttgttcggatggttattttatgttatatttttttttttttgtttcgtttatttttagtttttgtcggaaaggattttttcggtttttttaattattagaagggattgttagggttttgtgttgatgatatttttatttttcgttagttttttttattagttgataaatggtattagttatgttgtttttttggtttttaggggttttaagtaaggtatattgttgttgttgtttagtttttgttatattttagatttattttagttttgatttaatgtaggtagttttttagatgtattgagatgttaggatttggaaggtgggattcgatcgtagtagatattggttttggagatatatttttatagtttagagaggaaggatagtttgagtaaattttatttttttatagttatttagttttttttttttgttttttgatttaaattaatgtttttttttttttttagtagtatgttatttggttttttgttgtcgtttttattttatttttttaattgttttcgttttttatttgtttgggatttttgatattattattttgagtttatttttgaaagaattttttttaatatgattggggttattgagattttagatggggttggtttgagtagataggttattaagttatttttttagaggtaaagggataatatatttaaagtattatgaagatagttagtatagggagaggggtttataggaaagaggagagatgttgggggttggtagatatagagtaaagagattggttaggaagagcgtttttcgagttttttgtttttcggggtagaggagttttagggatatatagttgaatttgatagtgaagggattttaaaggataaaataagatagaggtagagataagattttttcgtgttgagttattttttaagaaagtattttttttttatagataaaaatgtcggaatataagtttatagaaatatttgtgtttttttttattttttgtggatgttgattttttttatttaagatttggttttagggattaatttttaatgtttattttttttttgagttttgtaaatcggtaaagtagattaggtatgttatttgaagtttggaggtttttttaggggttttttatattatgttttaattgtaatgatttttttagggatttttttaggaaatgtagttagtattgaatgtagattatgatggtggagtttttgttgattgatttgtttgtttattttgatatttcgggtattgttatatttttttgttttaaggtattgtattttaatgtagaaatagattataggttttattataattttattcgaagttttaagttaataggattttatttttttttttttattttgtttaaaaaataaataaataagtaaataaaaaaaatggggtatatgtgtagaaggtgtaagtttgttatataggtatatgtgtgatatggtgatttgttgtatttattgatttattttttaagatttttttttttatttttaagttttaataggttttgggattttttttttttttttttttttttgagatagggttttgttttgaagtttaggttggagtgtagtggcgtgattatggtttattgtagtttttattttttgggtttaagtgatttttttattttagttattttagtatttgggattataggtatatattattgtgttgggttaatttttttattttttgtagagatggggttttattatgttgtttaggttggttttaaatttttgggtttaagcgatatttttgttttggttttttaaaatgtagggattataggagtgagttattttttttagttattaataggattttaaataaaaatatttaaagtatttgtagattgatgatagagtggttgatatttatatttgtataagatagatggatagtatgtgttgtatgattgttttattttattgataacgtttattttttcgttagttatttttaatagttgttttatttatttgtttgagggttggttataggtatttattttttttttttttttttttagttttttttttttttgagacggagttttgttttgtcgtttaggttggagtgtagtggtatgatttcggtttattgtaagttttatttttcgggtttacgttattgttttgttttagttttttgagtagttgggattataggtgtttgttattacgtttggttaattttttgtatttttagtagagacggggttttattatgttagttaggatggtttcgattttttgatttcgtgatttattcgttttagttttttaaagtgttgggattatatgcgtgagttatcgtgtttaggtttttttttttagttttatgttatttgttgttatatgttttgtttttttttaagatttattttggggtggggattgggaggtgataggtatttaatgggagagttaaataagagagagagaggagtataagggaaaagagtaagtagacgtaggtttttttttattttttgtttacgattatttttttagtatatttatttatattgatagaaagattgtatttagatagtgtaaataaatagttgagtgttatttgaagagatttttaatgtaatataaggttttatttttggtgttattttgtttagtatttttattgattatttttgaggaaaatataaaaagtagttcggttagtttatgaatggtgtaaggttttgtgtgttagattggatgatagaagagggtaattagtttttaaaaagattttgattatttggtgtgagaagttaaattttataaagtgtattttattagggttaaaggtgatgttttataattgggttttaaatttgaattttaaatgattttaggagaaagtggagtagtagtagtatttgtgaaaatggtttaggggtttttgttgatagtaattaaaaggtatgttattagttaatatggtttttagaaaagttaaggtgatattgaggtttttttatggaagtaaaatatttagatagaggaaggtaatatgttatttattttgtaaagttagattatatttagagttttgtatttagttttgagtgtttcgttttaggggaaattaatgagtaggagtatgtttaaaatagagaatagtttaagcgatttttttatttcggtgttagtattggtgtataaatttttatttataggatgtataagttttggggatttaatgtgtaatatagtgattatagttaataatattgtattattgaaatttgataagagagtagattttaagtgtttttattatttttatggtaattatggatggtgatggatgatagatgtgttaattaatttgattgtggtaattattatatagtgtatatatatattaaattattatgttgtatattttgaatataaataatttttgttaattaaatatttttaagtaaataaaaataagtaaaatttttataaagttatataatattagatatgatagaaagaattaaggttgattaaatgaagaggggttatgtttacggtttttatatttttatgttattaatataaatttttaaaggttagtgagattgtttaagaatttggaaagaaaaagaaaatgttggaagtttggtaaagaaatttttaggaaatgtagtaggtagtggtaatatatttattattttatttttagagattatttaataaaaaagggggtgattagagtgttagtttaggttttacgcgtgtttttggagggttgtgtaagtaagatattttagatttttacggttttttagtttttattttattgttatttttttttgtgttttagtttaattttgtttttttattattttttatattgtagatgtttttgttttttttgtatgatgtagtggttaagtgtaaggttatagtgttagattatttaggattaaattttagttttataaaaaaataataatttgtgtgattttaggtaagtaaatttaatattttttgtgttttagtttttttatttgttaaatattaatattggtatatattttttggggttgttgttaggattaaaaggggtagtatgtaaggtggttaggagaatgtttggtatatagtaagtgcgttataatttttttagttattataattattaggttataatagtaatattttataatgttaaaggaacgcgggttttagagttagtttatttgggtttgtattttagatttattaaatatcgttgatattgggtaaatcgtttaatattttatagttttaattttttaatttgtaaaatgagaataatagtattatttgttttttagaattattgtgagaattgtatgatataatttatttaaaatgtttagtattttgaagtttttttatgttggatttttttgagatttagtatatgttttttgttaggtttgtaaggaagggaagagtcgttaggtattttttatttttaggtttgatgattgttattataggagttaaataattttattgttattttttagaatttagagttgttgatttatttttttaatagaagggtgttgttttaatgttaattattgttttttttttttaaagtatttagtttataattgtatatttataagtttattagattattgtatttttttttcggaatagtgtttgttatataatgggtatttaataattatttgttgaatggattaattggttatgtgatagatgaattggaataattggttttttttaggtttttattgaattagtagtttgttgcgaaaggtgtttttagtgattttgaggtggaataggaatggaacgtggaggtggaggatttttttattcgattttagttttggtttttttcggggacggggaggttagaggatttgggaaaaatattgttttttttattgaacgttattacgtagtagagtttattaaaagagataaagtgacgaaacgttgaaagttgcggggcgggaggaagtcggggtgagtggattattttttaggcggagtttttttttaagttttcgttcgcggtttcgaattgagtttttttagtcgttcgagggcgttgcgttgagttttatattttatgattgtttttatcgatttttatgaggaagtgcgatcgggaattttttatatattttcgtttgtttcgcggttttttttttttcgcgtcgatagcgtttacgtaagtatggtaggatttgttggtgggggtcgagtaatatttagtttaattttttttttttttcgtcgttcgtgttatgtcgggatgggtttaggtttttgtgtggattcgatatattagagtaatttaattttgtcgggattaattttaaagggat

SEQ ID NO: 27 - DNA, 6239 bp, Artificial Sequence
  chemically treated genomic DNA (Homo sapiens)
cgtgagagagagggtttagatttagttttttgtaaatggatatttagttttttaagtattatttattgaagagattgttttttttttaatgtatgttttgggtgttttttttaaaaatgatttgattgtaaatgtatgaatttatttttcggtgtttttttttgttttattggtttatatattcgttttgatgttagtattatgtttttttggttattttatttttgtattataatttgaaattaggtaatatgatatttttagtttttttttgttttggtttttttttaggattgttttgtttatttggttttttttgtggttttatataaattttagtattattttttttatttttgtgaagaatgttattggtattttgatagatattgtattgaatgtgtagattgtttcgggtggtgtgggtattttaaaaatattgttttttttaatttataaatataaaatatttttgtatttttttgtgtttttttttattttttttatgaatgttttacggtttttattgtagatattttttatttttttggttaagtttattcgtagatattttgttttatttgtagttattgtaaatgggattatttttttattttttattttagaaatgttattgtttttatatgttgattttgtattttgtaattttattggattgattaattttaatagttttttttttttttttttttttggtggagtttttaggtttttttaaatataagattatattatttgtaagtaaggataatttgatttttttttttttaatttggatgaaggggtttaataattttttataaaattttttaattaatgttttgttttttgttttatgttttattttgagaattatttggtattttaatttttgaatatgttttgattttatagtagggattagatttttttttattggttttttttattgtaaatttaggtttttgatttattaatttttttgttattgtttgtttacgtgtttaagatttagttgatattatttttttttttttttttgtgggatgataattttgttttttttttggttattttagttgagttttgataagaagtaatggtatattttgtatatttaatttttgttttatttattttaatatttattaatttttatttatgttttaaatgaaagtaagttgtatggattatataaaatattttgtttttaaattttaattaatagtatttttataaaagttaattatgaaaagtatagatgttaaatgattaaaattatgttgaatataaaatgaattttataattatttttgtattatgaaatggtttttttgtattattgttatttaaagtagtaggagaaaaaaggtttattattttttttaatgtaatatgtttgttttgggtttatgttgtaaaagaattgttaagaatagataagtatttatatgtagtgttgttgttgttggatttgttttaaagaagtgagaataaaaatggtttagtaattattttatgtttatttgtttattggttagtgtaagttaagggaaatttattgagttaaagttagaatttagagagttttattattttgttttgtttgtgaatttgattttttaatacgattagtgaatttattttttgaaaagtaatattacgtgggtatttttagttttttattaaataagttagtatgtaagtgaatttgtatgaatttgtatatatttgttatttgttagagtatttgtatattgagtttgtgtttattattataaaattattatgaggaatagtttttgtatagttatgtgttatataatattttggttaataatgggttgtatgtgtaacggtggttttataagattaatagagttgaaaaatttttgttatttagtgatattatagtttaattttatagtgtaatatattatttatgtgtttatggtgatgttattgtaaataaatttattgtgttgttagttatataaaagtatagtgtatataattatgtatagtatattatattttataatggtaataaatgattatgttattagtttatattatgttattagtaaatattagtatagtatttattatattatatattttattgttattttagagtttttttttttagttataaaaaaagttaattgtaaaatagttttaggtaggtttttcgggaggtattttagaataaggtattgttattatagaagatgatagttttatgtatgttattgtttttaaagtttttttagtttttagtgggataagatgtggaggcggaagatatgatatcgatgtttgtttttgtgtaggtttaggttagtgtgtgtgtatgttttagtttttaataaagtttaaaaagttaaaaaagttgttttaaaaagaagaaagtttatagaataaggatatatagaaaatatttttgtgtagttttataatatattttgtataaaatattttgtatttgtgttttagttaagtattattataaaggagttaaaaagttttaaaatattaaaaagtttataaagtaaaagttatagtaaattaaggttaatttattattgaagaaagaaattattttaaataaatttagtgtagtttaagtatatagtatgtataaagtttaagtagtgtaatgttttaggtttttatatttatttattatttatttatttatacggagtaatttttagttttgtaagttgtatttatggtaagtgttttatataggtgtattattttttattttttatattatatttttattgtattttttttatgtttagatatgtttaaatatataaatatttattgttgtgttatagttgtttatagtagagtttttaatttttaggttatgggttggtttgtggtttgttaggaattgggttatatagtaggaggtgagttgtaggtaagtaagtaaagttttatttatatttataggggttttttattttttatattattgtttgaattttgttttttgttagattagtggtagtattagattttcgtaagagtatgaattttattgtgaattgtatatgtaagggatttaggttgtgtattttttataagaatttattgtttgatgatttattattgttttttattatttttagataggatcgtttagttgtaggaaaataagtttaggttttttattgattttatattacggtgagttgtataattattttattatgtattgtaatgtaataataatagaattaaagtgtataataaatgtaatgtatttgaattattttagaattattttttttattttttgtttgtggaaaaaattattttttaagaaattggtttttggtgtcgaaaaggttggggatcgttggtttgtagtatttagtatagtaaaatgttgtataggtttgaagtttaggagtaattgattattttatttagtatagttgtgtagtaagttatattatttggttgtgtataagtatattttatgatgtttttataattgtatcgtttaaggatgtatttttttaattttttatcgtggttgagggatgtatgattatatatatttttaatttttaattagttaggaattatatttttgtaattatttgattggatatttttggttgtttgtttattagtatagtaggtaggtttttaagaataataaatttataaattagattaaaatattggattatattaatggttggtgttattaggaatggagatttattaggaagagtttagcgtatgttggaggaaatttaggaaaaaaaaaaggttaaaagtaatatttgtgaagtaaggtgaaagcgtttggagttatttagttagaaatgagttgtggtataataattgttatagatatgtattagaatatgattaattgttgttcgtttttgttgaaatttgaaaagaaaaaagtttaagggtagtttaagtgatgtatgtttaatattgagaagaagagttatgatagttgatggataggatataagaatgtttattatgggatatattttttgggaagagaaaaagggtttttatatgtagtagttttttttgttatgaatgaggataggttttgttttaaggtagagggtttattagttggtttttataaggtttttttagaattgtaattttgagttattttagatgttgagattgaattcgatatagttaagtatttttttttttaggagttttagtagtgtcgaggaggtagtgttattagtagcgacgatagtatttattttaattgaagattttatttaaaggtgagttaggttagtgtggatttgggcgttttttttttttttagtttttattgggtttaggtataggagttttgagggatcggcgattatagtatttttttttcggttattaatataagttttgatagaggatggttggttagttggtgttaggtgggagggattcgttacggagacgcgtttaaggagggatgagttgcgttattattatttaggtttttttttcgttattcggcggggtcgttcggatttaggtgttgttaggtacgtttggcgttcgttattttagagtagcgtttcgttgcgtacggtttttttttagtttcggttttcgcgggagggcgcgtgggatgatgcgcgggtttttgtgttttttttaagttttagtattcggagtcgttttagtcggtatcgcggtagttatagtttgggagagagaaaggaaagagggagggcggcgggaaaggttcggcgcgggaggagggcgggtgaggagggaaggagcgagggggagggagtttttttttttagcggtgtagttagtttttttttagcgggcggcgatttcgggttttttttcgcgttttttcgtagaggttcgttttttttttcgtttatcgtttttgcgagcgcgggcggcggcggtgggcgtgtgcgcgcgtgaaggacgtcgtttttttttcgtttttgcgttcgtaggcggcggttggcggtcggtttttcgttcgggtagcggcggcggcggcggcggcggttttcggagtttcgttgcgaagatgtttaaagttacggtgtttttttgtttcgtttcgttttgtttttcggttatcgttagtgcggtttcggggatcgcgagtttcgtttcggattattggatcgacggttttaatagggatgcgttgagcgattttttcgaggtggagtcggagttgggacggtaaggcgcgggtttcggttggggaagttcgcggcgtgtattgggggttgtttttttcgtagcgacggttcggagggtgcgggagtttgttttcgtgtttttcgatttttttttatttagttagtgttttgagagagagttaatttttatttaggtgcggttcgagttttttttattttattagagcgtttaggtcggtgtagttgtaggattagttcgatttttttttattttttttttttttcgtaggttgttattttttttgggtgatagtttttatcgtacgtgggttttgtttttttaattgatatttttgtttacgattatagtttgttagagggttttgtttgtttagttattgtttagggtgggggtcggagggtgtttttttaaattaagatagaattattaagttagatttttttttttttttttcgttaagttttttaaagtaagtgatacgagaaattaaatttaaatattagtttttttgtagagtttgtttaggagtgaagggagaaatgaattatttaagagagttgaaggtagaataatgaattagtgtggttttaaagagaaagtagtatatgggatttaggtagtggtaattagtgagaatgttgttgtttttttttttttatgggttggagtgatttatttaaattatatatgtaatagattatttttttaggattgtagatatgttttttattttttttttgaagatttaaataggtagtagtttggttttttgtatgattttatatgttttcgtatttgtatttattgaaaattatagtttttttttttttattttttttttttttgttttttttttttgttatttataggtaaggagatttatttttaatatttattttagatttaggttttttagtatagggaatttgaagatgtaattttaacggttgataagttgtagtttttgtatttattatttttttgtaattttattttttattttttttttgttggaaata

SEQ ID NO: 28 - DNA, 6239 bp, Artificial Sequence
  chemically treated genomic DNA (Homo sapiens)
tatttttagtaaaaagagaatgaaaaatgaaattgtaaaggagtagtaagtatagaagttgtaatttgttaatcgttgaaattatatttttagattttttatattaaagagtttggatttaaaataagtgttgaaaataaatttttttatttatggataatagagagaaaagataaaaaaaaaggaagtaagggaaagaaaattataatttttaatggatataaatacgaaagtatatggaattatgtagaaggttaaattgttatttgtttggatttttagaggagggataggggatatatttgtaattttagggagatggtttgttgtatatataatttaaataaattattttagtttatgaaagaagggaagtagtagtatttttattaattattattgtttggattttatatgttgttttttttttaaagttatattagtttattattttgtttttaatttttttaaatgatttatttttttttttatttttgagtagattttgtagggaagttagtatttaagtttaatttttcgtgttatttgttttggagagtttgacgaggggaaggaggaggaatttaatttaataattttgttttgatttggaggggtatttttcggtttttattttaaataataattagataaataggattttttggtaagttataatcgtgagtaaagatattaattgggaaagtagggtttacgtgcggtgggagttgttatttaagggaagtggtagtttgcgagaaggagggaaggtgggagggagtcgggttgattttatagttgtatcggtttaggcgttttggtggggtgggaaggattcgagtcgtatttgaatgaaggttagtttttttttaagatattaattaggtagggagaaatcgaagggtacgaaggtaggttttcgtatttttcgagtcgtcgttgcgagagggataatttttagtgtacgtcgcgggtttttttagtcggagttcgcgttttatcgttttagtttcgattttatttcgaagaaatcgtttagcgtatttttgttggagtcgtcgatttagtaattcgggacgaggttcgcggttttcggggtcgtattggcggtgatcgaagagtaggacgaggcggagtaggagggtatcgtgattttgagtattttcgtagcgggatttcggaagtcgtcgtcgtcgtcgtcgtcgttgttcgagcgagaagtcggtcgttagtcgtcgtttgcgaacgtaggagcgagagagaggcggcgttttttacgcgcgtatacgtttatcgtcgtcgttcgcgttcgtagggacggtgggcggggaagggggcgagtttttgcgagagggcgcgagggggaattcggagtcgtcgttcgttggagggagattagttgtatcgttgaggagagaggttttttttttttcgttttttttttttttattcgtttttttttcgcgtcgagtttttttcgtcgttttttttttttttttttttttttttaggttgtggttgtcgcggtgtcggttagggcggtttcggatgttggagtttggggaaggtataaggattcgcgtattattttacgcgttttttcgcggggatcggagttggagggagatcgtgcgtagcgggacgttgttttgggatggcgggcgttaggcgtatttggtagtatttgggttcgggcggtttcgtcggatagcgagagagggatttaggtggtggtggcgtaatttatttttttttgagcgcgttttcgtggcgagttttttttatttaatattagttaattagttattttttgttaaagtttatattggtggtcggggagggagtattgtggtcgtcgattttttagggtttttgtgtttggatttagtgagagttggaggaaaaggaagcgtttaggtttatattgatttgatttatttttgagtgaagtttttagttggaataaatgttgtcgtcgttgttggtggtattgttttttcggtattgttggagtttttaaaagaggagatatttggttgtgtcgagtttaattttagtatttgaagtggtttagaattatagttttagaagggttttgtggaagttaattagtaaattttttgttttaaggtaggatttgtttttatttatgatagggaagattgttatatgtaaaagttttttttttttttttaagagatgtattttatgataagtatttttatgttttgtttattagttgttatggtttttttttttagtattaaatatatattatttaaattatttttgaatttttttttttttagattttagtaaagacgaataataattagttatgttttgatatatatttatgatagttattatattataatttatttttggttaaatagttttaggcgtttttattttattttataggtgttatttttggtttttttttttttttgagttttttttaatatgcgttaaattttttttagtaagtttttatttttgatagtattaattattaatatggtttaatattttaatttaatttatggatttattatttttaaaagtttgtttgttatattggtgaataaataattaaaaatatttaattaagtagttataggaatgtgatttttagttgattggaaattgaaaatatatatagttatgtattttttaattacggtgagaagttgaagagatgtatttttaggcgatgtagttgtaagaatattatagggtgtatttgtatataattagatagtatagtttattatatagttatgttggatggaatagttaattgtttttaggttttaaatttgtatagtattttattatattgaatattataggttagcggtttttaattttttcggtattagggattagttttttggaagataattttttttatagatagggggtggggaagatggttttgggatgatttaagtgtattatatttattgtgtattttaattttattattattatattgtaatatatagtgaaataattatataatttatcgtaatatagaattagtggaagatttgagtttgtttttttataattagacggttttatttgggggtgatgggagatagtgatagattattaggtagtagatttttataaggagtgtataatttagattttttgtatgtgtagtttataatagggtttatgtttttacgggaatttaatgttattattgatttgataggaggtagagtttaggtagtaatgtgggagatggagagtttttgtaaatatagatgaagttttgtttgtttgtttgtagtttattttttgttgtgtggtttagtttttaataggttatagattagtttatggtttgggggttgggaattttgttgtaggtaattgtaatataataataagtatttgtgtatttaaatatatttaaatataggaaaggtataataaaaatatggtataaaaggtaaaaaatggtatatttgtatagggtatttattatgaatgtagtttgtaggattaaaagttgtttcgtgtgagtgagtaagtggtgagtggatatgaaggtttaggatattatattatttagattttatatatattgtatgtttaggttatattaaatttatttagaatagtttttttttttaatggtaaattaattttagtttattgtaatttttattttataaattttttaatgttttaaaattttttgatttttttatagtaatgtttagttgaaatataaatataaggtattttatataaaatatattgtaaagttgtataaaaatgttttttatgtatttttattttataagtttttttttttttaaaataatttttttaattttttgaattttgttaaaaattaaaatatatatatatattagtttaggtttatatagagataggtatcgatattatgtttttcgtttttatattttgttttattgaaagttggaagggttttaggggtaatgatatgtatggagttgttattttttatgatgataatgttttattttggaatatttttcgaaggatttgtttgaagttgttttatagttaattttttttatagttagaggagaaaattttaaaataataataaaatgtatagtgtagtaaatattatattagtatttattggtaatatagtataaattagtaatatagttatttattattattataaagtataatgtattatatataattgtatatattatatttttatatgattggtagtatagtaggtttgtttatagtggtattattataaatatatgagtaatgtattatattgtaagattaggttatgatgttattaggtgatagaaattttttaattttattagttttgtgggattatcgttatatatgtagtttattgttgattaaaatgttgtgtgatatatgattgtataaaaattattttttatgataattttataatgatgagtataaatttaatgtataaatgttttaataaataataagtatatgtaaatttatataaatttatttatatattagtttgtttggtgaaagattgaaaatgtttacgtgatgttattttttagagaatagatttattaatcgtgttgaaaaattaagtttataagtaaagtaagataataaagttttttaaattttagttttgatttagtaagttttttttggtttgtattgattagtggataaatgggtatgaaatagttgttaggttatttttatttttatttttttgaggtaagtttagtagtagtagtattgtatgtaaatgtttgtttgtttttagtaatttttttataatataagtttaaagtaagtatgttatattaaaggagatggtaagtttttttttttttgttattttaggtaataatggtgtaagaaagttattttatggtatagaggtgattatagaatttattttatatttagtataattttagttatttgatatttatgttttttataattgatttttgtaaaaatgttattaattgaagtttaaaaataggatattttgtataatttatgtagtttatttttatttgagatatagataaaaattaataaatattaaaatagatgaaataggaattaaatatataaaatgtattattattttttattaaaatttaattgaaatgattagaaaaggaatagggttattattttataaaaagaaagagagaagtgatgttaattgaattttgaatacgtaaataaatagtaatagaggagttaataaattagaaatttagatttgtaatgggaaaagttaataagaagaaatttaatttttattataaaattaagatatgtttagaagttagagtattagatagtttttaaggtgaggtatagaatagagaataaaatattggttaaaaaattttataaaaagttattaggtttttttatttaaattagaaaggaagaagttaaattgtttttgtttgtagatgatgtgattttatatttaaaaaagtttaaagattttattaaaaaaaaaaaaaaaaaaaaaattattagaattgattagtttagtaaagttgtaggatataaaattaatatatgaaaatagtagtatttttgaaatagaaaatgaaaaagtaattttatttataatagttataaataaaataaaatatttacggataaatttaattaaagaagtgaaagatgtttataatgaaaatcgtaaaatatttatgaaagaaatggaagaggatataaaaaaatgtaaagatattttatgtttatggattggaagaaataatatttttaaaatgtttatattattcgaagtaatttatatatttaatgtaatgtttattaaaatgttaatgatattttttatagaaataggaaaaataatgttaaaatttatgtaaaattataaaagaagttaaatagataaagtaattttgaggggaggttagggtagggggaagttggaggtgttatattatttggttttaaattataatataaaggtaaagtaattaaaagagtatgatattggtattaaaacgaatatataggttagtaggatagaagaaagtatcgagaaataaatttatgtatttatagttaaattatttttgagaaaggtatttagaatatatattagggaaaggatagtttttttaataaatagtgtttggaaaattggatgtttatttgtagaagattgaatttagatttttttttttacg

SEQ ID NO: 29 - DNA, 6418 bp, Artificial Sequence
  chemically treated genomic DNA (Homo sapiens)
gtgtttaaatagtataaaatttaattagtgtaagtgttaaaagttgttatagtattttaaaaaattttaaaatattagacgttgaaaataagttggtggaaatgaattataatatattgttatattttaaaggtattggtattattagaaataatttgtaataattatagatatagattttgtttatttttagtgtgatattttgttttaaatagattttatttttgtatatatatatataaatgtatatataatttaaatatattaatatatatttttttatttatgtataagaggatattgtattttaattagagttaaaagttaaatatattgtttgaaaaattgttagaatgatattattaatattttattttgtagatattgaagatggaaaaaagaatattatagagattatttggtttattagtttaggaagttattatttaaaatattttaatattggaatttttaaagtatagtcgtagagtttattattaatttattttaattgatggagatgtaaaaattaaagtgatttgagattatgagttttatataagttataggtgaaggttaggggttgtgatttttagtttttagtttgttatttgttttggtagatgaggatttttaaatagatttatagtatgttttttatgggttattgtgttttatagtgttttgtttgattagttgtatgtgattgaggtagtaaagttttttcgcgtttgtaatgtttgtataattatttattaagataggttttttttatttagtatgtttttttttatttgattttattttattgttagtatttaggtttttttggatagttttaaataaatttttaattttatgatgtttatatattttttaaatttttaagatggtaataatgttttttgtttttttgttatttaagtaaagtttttgtgagttttgcgggttggttgaaagttgaggaggtgtaaatgtttgttaattattttttttaaaggaaatatttgagggaatagcgtaaatgtgtttagttgtttataatagatatttatgtaagggagttaaaatgatagataattttttaattttgatggaatattttaatgaatttttttatttagttttttttttttttttttattttatttattttttgtggttagttgtattttatattgtagtttaattaaaatataaattatttgtgtttttttgtagataaagtataattggatttatttttgttaggggataatttattatggtttttatttaatatagttttagatggtttttagtggtagaaataaattaatgtatatttttattaggtgttgtatttatttaattgattgttaaagtgatgagaagttaggaaattatttaaaagagaggtttattttttttagtttaataatttatatattaggtaggtttgttttattagtgggatgtttttagaaaatattaatagtttttagttgggtggaaaattaaaatttttggggtttgataaaattagtagatttgaatttgaaagtagagttaatgtttttattttattttttattattcgtttataaaatattattttttaatatgttagttttatttggtggttagtggtttgaaattgaaagtgggataagtaagcggagaaatttggatatgagtgagtttgtttttttaagttggtgtgttattttgtggaagggttttttttaagagtaggggggttttaatgattatttattaatgttcgttgggtgattattgagtgtttttttatttagtttattaagttttgtatataaaaagttagaataagttttatttagttttgttaaagttaattaggagtaaaatgttttatttgaatttattttgtttttgtttttttattttgttaatgtagttttgtttaaatgagtgtttttattgggtcggttagaatatttgaaattattaatttttttgtattgaatagttggtggtaggttagagtagatggggtaggaaagtatttggttgggtgtattgtttttaattaggattaatgaggttttagtttttttgaattaatttatttaatatttattgtgtgaagttatagtgtattataatagtttgttagaagtcgagaggaaagttgagaagatttgtggaaaggttttaatttaaattttttttttattaatgtagagagtttttttgaattgtagtttatgttagtagattgttggtttttgttgttaagttaggtttgaatagaggaaaaatttgtattttatgaaaggtttgtggtggatataagtgaaaaatattttggaattatataatattataatgtttttttaatgaatgatttaaagttgttagaaaataatttatgtatttgtttttgtgggagtttagtattttgttgttgattaaatttattggtttggaaagtgttgatttagatgattttttttaaaaaattgttttaaaaatggattgtgtttttaatttagtgatatatattaatcgatgaggtttttttgaggaagtatttaattggtgagtaatgtattttttgttattgggatatattttagttttataaaatatgtttttttatgatagtgttttgtattggagaaaatttttgtaatatgtattgtttttttttatttatttgtataaatgtatttattatgttattgattgtttatttttattatataatttggatgttagagattttggttttatattttttttttatttatttatttatttatttttatgaacgaaaagttattttgtttgagtaattgtgtagaattatatatttaggtttttttatttagggagaattgttaaatggggttttgttttttttgtttttatggattaaagaataagaggaggaaattggttttttgagaaaatgttgaattagttttagatgtatatatatttagttaggtttcgttgtagttagatttttaggtgagaatttttagggatttaggttttgttgatgtggattaatttaaagtggtaattattgtagttagataatagtttaaaaagtttttttatatatagaaaagatatataattatatagtatatggaagtttaattgtttgagttgcggtttagggatttgtagtgtatcgatattaagattttattttaaagtcggatattatttagtttttttaaaagtgtattgtattttgttatatgattttttattttagaagtgatttattatgtatattgatgaaaggttgggttttttattgtgaaaatgttttttttttaatataagtatagtattaaaaaaaaaattagtggtatgtagtattaagtggttttttaaaaatattttttttaaaaatgaaagtttattaatttaggatgttggattttataaaggtttttatagtaggatttaattgattattatatttatgtttgttataaagttttttattataagaatgtttgagtttggtgtttaattgtattgaaatttattatagagaattttattataagtgatatttaattaagatgaataaaaagattggttttataaatagggtgtagtatattattagtgatagaatagagtaatcgttatgaattgtggtttttttataagttgtttttgataatgatggatttttgaggggttcgttggataaagtagttttttttgggtatagtatttaggggttgtagaagtttttattgattgatattgtttattaagagaatatatttttagtttgtgcggagagtgtgtgtgggtatgttttgaaataggttgtgtgtatttttgggaagaggtgtaggaagattgagtaggtagaagttagagttattgtttttgtttttagaaatttttggagatagtaagtagtgtggaaatttatttgataagggttaaaagtatatggaaagtgtagagtaagtaaaggatatgttgaggattgaaggaatagtaagagttaacgggaatgtttttgtttattatgtttattgagtttgtaggttgattagaggattttgagtggaattgtttttgtgttgatagtggattgtgtatacgatggaaaggtaaagtttgaggtagttattttattatgtgttttgttgttgaaataaatatagatttaggaaagatttgtaagtgtaaaattgagaaagagttttaggagagaatagtattttttttttgtttggtattgttgtgtgtttagaaaaggtatgtaaggtaggtaggcgtgtgttttttttatgaggtagggatgttttataaaggattaaagagggattgttgagaagaaaatagttagttttagataaagtattataataaaggtttttagttttatatattatggtgtttattaaagtttaatagggaagagtttattgaatttggttgggtatgtgttatttatgggaaggataaatatttaggggtgtgtaaagaaattaggaattaggaggatatgattgtttagtttttgaaaaggttttataatgaagattttgtttttattttttatggatttttatgtaaggtagaggaaagtaagttgaaaatgtttggagtatattaattcggggattttagggggttaaaagtattcgagtaaaataaaagtggtcggtttagtttttaaaaagtgttttattttatatatattattgagaagttgataaaaggaatgattttgatattttgtgtaggatgataaattggtataatatataaagttttataaaaatgtttgtaggttgtttgggatttttagttgaataaataggttttgagttttgtatttttttttttttaatatagtttttaattatggttatgaaaatgagaagatgaagggaagttttttattgtgaggggtggtagggggttaggtttatatttttattttttggtaaaataagggttaattttgaataggatgggggtggtggtgaataaattattcggtatttagtttattattttgaattttattttttgttttttggtgttttgaaatttgtagagagaggtggagtgttaaggggagggtaggggttgtgatattttgtatatatatttttgttattgttttgtttaaagagatagggttgggtttaaggttatatgtgtttttgttattttttatatttttgttttaagtgtaattcggagtgttagttttttatttgtttttgtttggtaggcgtacgcgtttagtattttgttttcggcgatgtcgttttagtttttttgatggtttttttttttgttgttatttattttagaataggaggtatgagttcggaacgcgtttgtttttaggagatagttattttttgtgtggtacgttggatttaaggatgtttggtgagttagttttgttttgtgttttttttgtttttttaatgaagaaagtttattttttattatgtatggaaaatattttttgttttatagcgtgttgtatttgatgtgggtaggaagaggttgggggtgatagaggtgtgattggaaggtagtataaagagaattataaagattttgatatatggaggggtatagggtgtggagtttttgtttttaaaatttgggagatgtattttaaaggttgagggggtcgtatagttacggatgtttgtcggagtaatttatttgagggttttagtttaagtaagaagtattgtttttgtttagaattttgtgattattatttgtatttggtgttttggaaattttatttgtggagagagtttttagattatggtagaattttggaataagatttttttaaaaagttgtttatgttagagaaagtgaaggaagttttggaattataaggaattttagttttgttttaaattatagtttttagatgttattagataaataattgaaattagttaattaaaataaaaagtttgttgaattagtgaagtttttgttttggaaatttagtgtatgttagttttttttgaaaaatattatttttggagtttggagtgtttttgtgatcgttgttagtgaaggttttgtttgtggagaaggttggtcggggaaagggttgtttcggttgtttttaagaattgtttaaattgttttgtgtttaatttggagttttttatttttagataaaaaagatagggtagatagagattttttagttggtcgatttatgtggattatttgggtaggataggtagaagaggttgtgtttggttatagagtttgtatattttatagatggtgttttgaaatattatttgttagttttttgtaattatagttgtgtgtaggtattgttagttgtttgaagaatgtttttttttttaggatgtgtttcgtttattttaattattattgatatata

SEQ ID NO: 30 - DNA, 6418 bp, Artificial Sequence
  chemically treated genomic DNA (Homo sapiens)
tatatattaataatgattaggatggacgagatatattttaaagggaaaaatattttttaaataattggtaatatttatatataattgtggttgtagaaaattggtagataatgttttaaaatattatttgtgaggtgtataaattttgtgattaagtatagttttttttgtttgttttatttaaataatttatataaatcggttagttggaggatttttatttgttttgttttttttatttgaagataggaagttttaaattaggtatagggtaatttagatagtttttgagaatagtcgaaataatttttttttcggttagttttttttataagtagagtttttattggtaacgattatagaaatattttaggttttaaaaataatattttttagaggaaattgatatgtattaaatttttaggataagagttttattaatttagtaggttttttattttaattaattgattttaattatttgtttgatgatatttaagggttgtgatttaggataagattgaaattttttgtagttttaaagttttttttattttttttgatataaatagttttttaaagagattttattttaggattttgttataatttgaaaattttttttatagatgaaatttttaggatattaagtatagatgatagttataaaattttgaatagaaataatattttttatttgagttaaaatttttaagtaaattatttcgataaatattcgtggttgtacgatttttttaatttttaaaatatattttttaaattttaaaagtaagggttttatattttgtatttttttatgtattaagatttttgtggttttttttatgttattttttaattatatttttgttatttttagtttttttttgtttatattagatataatacgttgtggggtagaaggtattttttatgtataatagaaagtaagttttttttattggaaaaatagagagaatatagaatagggttaatttattaggtatttttgaatttagcgtattatatagaaagtggttgttttttaaaagtaagcgcgtttcgggtttatgttttttgttttggaatgagtggtagtagagaggagggttattagaggggttggggcggtatcgtcggaggtagggtgttgggcgcgtgcgtttgttaggtagagatagatggagagttgatatttcggattgtatttggagtagaaatgtggaggatgataggagtatatgtggttttgaatttagttttgtttttttaggtagaataatgatagggatgtgtgtgtaaagtattataatttttattttttttttagtattttatttttttttgtaagttttagagtattaaaaagtaaaaagtgaaatttagaatgataagttaaatgtcgaataatttatttattattatttttattttgtttaaggttaatttttattttgttaaaagatagaaatgtagatttggttttttattattttttataataaaaggtttttttttatttttttatttttatagttataattgggaattgtattaaaaaaaaaaaggtatagaatttaaagtttgtttatttaattggaaattttaaatagtttataaatatttttataagattttgtatattgtgttagtttattattttgtataaagtattagaattattttttttgttagttttttagtagtatgtgtaaaatagaatattttttagaagttgagtcgattatttttattttattcgagtgtttttaattttttgggattttcgggttgatatgttttaaatatttttagtttatttttttttattttgtatagagatttatgggagataaaaataaaatttttattgtaaagtttttttaaaagttgaataattatgtttttttgatttttgatttttttgtatatttttaaatgtttattttttttatgaataatatatatttagttaggtttaatggatttttttttattaagttttaatggatattatgatatataaaattagaagtttttgttatagtgttttatttaaagttggttattttttttttagtagtttttttttagttttttgtaaaatatttttgttttataggagaaatatacgtttgtttgttttgtatgttttttttaaatatataataatgttaggtagaaggaaaatattgtttttttttaaaatttttttttagttttatatttgtaaattttttttaggtttgtgtttgttttaataatagggtatatgatgaggtagttgttttaggttttatttttttatcgtatgtataatttattattaatatagaaataattttatttagggttttttgattagtttgtaagtttaatgaatatgatagataggagtattttcgttaatttttgttatttttttagtttttaatatgttttttatttattttatattttttatatgtttttagtttttgttagatggatttttatattatttgttatttttaaaaatttttgaaaatagaggtaataattttgatttttatttatttaatttttttatatttttttttaagagtgtatataatttgttttaaagtatatttatatatatttttcgtataaattaaaaatatatttttttgataaatagtgttaattaataagaatttttatagtttttaaatattgtatttaagaagggttgttttatttagcgaattttttaaaaatttattattgttagagataatttgtaaaaagattataatttataacgattattttgttttgttattaatagtatattgtattttatttatgaggttaatttttttgtttattttagttagatgttatttgtaatgaggttttttgtaatggattttagtatagttaagtattaagtttaaatatttttatgatagaaagttttatagtaggtatgagtgtgataattaattaagttttgttataagggtttttatggaatttagtattttaaattagtagatttttatttttaaagagagtatttttgaaaagttatttaatgttatatgttattgattttttttttagtattatatttatgttagaaagaaaatatttttatagtgggaaatttaattttttattaatatgtatggtgaattatttttaaaatagaaaattatatgataaaatgtaatatatttttgagaaaattggatgatattcggttttaaaatggggttttaatatcggtatattgtaagtttttaaatcgtagtttagataattgaatttttatatgttgtgtgattatgtattttttttatgtgtaaaaaggttttttaagttgttatttgattatagtaattgttattttaaattgatttatattaataaaatttggatttttggagatttttatttaaaagtttgattgtagcggggtttagttgaatgtgtgtgtatttgagattagtttagtatttttttaagaaattagttttttttttttattttttaatttatggaggtaagaaaagtagaattttatttggtagttttttttgaatagggaaatttggatatgtagttttatatagttatttagatagaataatttttcgtttataaaaataaataaataaataaataaaaggaggatatggagttaagatttttaatatttaaattgtataataaaaatagataattaataatatgatgaatgtatttatgtaagtgaatggagaaaaataatatatattgtaaaagttttttttagtataaaatattgttataaggaaatatattttataaaattaaaatatattttaataataaagaatatattatttattaattaagtatttttttaggagaattttatcggttaatgtatgttattgaattaagaatatagtttatttttaaggtaattttttagagagagttatttaaattaatattttttaaattagtaagtttagttaataataaaatgttgggtttttataaaagtaaatatataagttgttttttgataattttagattatttattagaaaggtattatggtattgtatgattttaaggtattttttatttatgtttattataaattttttatgaaatataaattttttttttgtttaaatttgatttagtaatagggattagtagtttattgatatgggttgtagtttaggaaagttttttatattggtgaagggagaatttgagttaaagtttttttataggtttttttaatttttttttcggtttttagtaggttgttgtgatatattgtgattttatatagtgggtattaagtgagttaatttaaaggagttgaaattttattgattttaattgaaagtaatatatttaattaaatatttttttattttatttgttttggtttgttattaattatttaatataagagaattaatagttttagatattttaatcgatttaataaaggtatttatttaagtagggttgtattaataaagtgaaaaaataagggtaaaatgggtttaaatggagtattttatttttagttggttttaataaagttgaataaggtttattttgattttttatgtgtaagatttgataaattgaatgagaaggtatttaatgattatttaacgagtattgatgaatggttattaagatttttttgtttttagaggagatttttttataaagtggtatattagtttgaaagggtagatttatttatgtttagattttttcgtttgtttgttttatttttaattttagattattggttattaaatgaggttgatatattggaaaataatgttttatgggcgagtggtaaaaaataaaatggaggtattagttttgtttttaaatttaaatttgttagttttgttagattttaaaggttttgattttttatttagttggaagttattagtgttttttaaaggtattttattgataaggtaaatttatttaatgtgtgagttgttgggttaagggagatggattttttttttggatgattttttaattttttattattttgatagttaattaaatagatataatatttaataaaaatgtatattaatttgtttttgttattgaaagttatttgaaattgtattaaataaaagttataatagattgttttttgataaagataaatttaattatattttgtttgtaaaaaaatataaatggtttatgttttagttaggttataatgtaagatatagttaattataagaaataagtgggatagagggggaaagaaaaaattaagtgaaaaagtttattgaagtattttattaaggttaagaggttatttgttattttagtttttttatataaatgtttgttgtaaataattaaatatatttacgttatttttttaaatattttttttgggggaaatgattggtaagtatttgtatttttttaatttttagttagttcgtagaatttataagaattttgtttagatgataaaagaataggagatattattgttattttaagaatttgaagggtgtataaatattatgaggttaaaggtttatttagggttgtttaaaagagtttaagtgttagtaatgagatggagttaagtaaaagaaaatatgttggatagaggaaatttattttaataggtgattatatagatattatagacgcggaaaagttttattgttttaattatatgtaattagttagataaagtattatagaatatagtggtttatggaggatatgttgtaggtttgtttagaaatttttatttattagggtaagtggtaggttgaaagttagaagttataatttttagtttttatttatgatttatgtaaaatttatggttttaggttattttgatttttgtatttttattagttaaagtaagttaataatggattttacgattgtattttgaagattttaatgttaaaatattttaaataatgattttttaaattgataaattaaatagtttttatgatatttttttttttatttttaatgtttatagaataaaatattagtgatattattttgatagttttttaagtaatatatttgatttttaattttggttgaagtataatgtttttttatatatgaataaaaagatgtgtattagtatatttaagttgtgtgtgtatttatgtgtatgtgtataaaaatgaagtttgtttaagataaaatattatattgaaagtaaataaaatttatatttgtaattattataaattgtttttgatagtgttaatgtttttaaaatatgataatatattgtagtttatttttattaatttatttttaacgtttaatattttaaaattttttgaaatgttataatagtttttaatatttgtattgattaaattttatgttatttaaatat

SEQ ID NO: 31 - DNA, 6071 bp, Artificial Sequence
  chemically treated genomic DNA (Homo sapiens)
tattatttgttttttggtttgttaaatttaatttagtgggtagtatgttaggaaaggggtttagtttaaaaggataatatgttttgtgggagaaaataatatgtagttattgttaaatgttttaattttgtattattttgttgtttgttttttgtgtttatataaataattgttttagtttatttattagaataaatattataatgagaaggtcgatgttttagatttttttttttttttattagtaaataaatttaagtgttttattttggttattgttttaaattaagattgtaattttaaataggtaataagtttttagttttaaattttagatagaattttaaggataatttaaagttgttattgatttttgatgaattgtattgtgattttgataaagttattgttttgttagtgaagggtattttggtagtttttataagttaatagtttaggaaattaagggggaggttattgatttttgtttgttgagagtttagtagtgtaatttagttttaaagtaaaattttgagtttatagtattttaaattaaattatttaataatttggaaaatttaaagtaataattttaatgttttaagtttagttgtatagagtttttattataaggaatatagggttatttttgttggaagaaatgtttttttggttttttttttttatattttatttattttggagtttaaaaaggtattaaagttaggttttatggtgtgtgttttttgttttaggtatttagaagtttgaggtaagaggattatttgagtttagttatttaagataagtttgggtaatatggttagatttgtaattttagtagtttgggaggttaaggcgggcgattatttgaagttaggagttggagattagtttatttaaaatggtgaagttttatttttattaaaaatataaagaaattagttaggtgtggtggtatatgtttgtaattttagttattggggaggttgaggtaggagaattatttgaatttaggaggtagagtttgtagggagtcgagattatgttattgtattttagtttgggtgataagagcgagattttattttaaaaataaataaataaaaaaagatattagaatttgaaaagtttttggtagttaatattttacgtgatagtttttatgaaggtaagtttttaggtagagtaatgtgattatatttagaataggttaggagttgtagtatttgaagagttttttttagagttttttaatttgttttttcgttttaagtagtggagaaattgaaaggtagggaagttagtaaaggggaagagttgagatttgaaatagagttttttttgattttaaattaagtgtattttgatttgaagtttggagttagtatatgttgggaatgttgattagtattgttatagatattgtcgttttgaggtgagtatatgtgttgttaatttttttttttggtatttaggaagaatgggggtttttttttgtggttttattgatttttttattttgttattgtatatattgagaaataaagttaaatagtaaaaggagtttgtagtttaatgtgagatttattttttttttatttgttttaattttattaagttgtttttttttatttttagggttaatgttataatgaaattggaaataagtttttttgtattgtgaatgtgaattgaggtttttataagtaaattgtgtttttgtttttttaagtagagaagtatggtaaataattataagtgttttgtcggggttttaggttttttatttatttttttttagttttggttttgttttttatgtttaaagtaagggaggataatagatttggtgtgtgtgtgattgattttttagaaatgttaatttttatttttattttggagaatgaattgaagtgtttttttgtttttttatttaagggaattatttttaataataaatttttttaagtgggtttggaggggggatagagaattggtgatttgttttggtaattatgttgttttttggagttagttttaaatattttagtaaaaatgtttaaggttttttaatttttttggtttgttttattttaatgtattattttattttatttttttatattttgtacgtataaattaatagatatttttaattgaataagtgaaaatagtgggtgagtttaaagatagatgtttcgttttttttattttgatgattatttttaaaattttaatgtgtatttgatataaaatttaatgttaatttatatatttatttttttttttaagtatagaagttttagaatattttaaatttagtaatttttttaatatattatcgttgtttaggattttgtttttattttgtttgttatatttttagttaaaataatagttattattatttttaaagttattaatttcgatttattaatatatttattgaattatttggttattttgtatatttattataattttttttttaggttaataatttatttttgttaagtgtatttgttaataatttttggagaatttgtaagtagtatattttttttgttgatttgaagatatttttattttatttttatttgaatgatagttaaatgtggttagagtgtaaaggttgatagttattttttattagtatttgggagtggtgatttttttttttgtgttttgtttgtttgtttggtttgtttggtttttgagatggagtttcgttttgtcgtttaggttggagtgtagtggtataatttcggtttattataattttcgttttttaggtttaaacgattttgttgttttagtttttagagtagttgggattataggcgtttgttattacgggtttggttaatttttgtattgttattagagacggggttttgttatgttggttaggttggttttgaatttttgattttaggtgatttgttaattttgtttatatgaggaagttttttataaattttagaataatatttgtaaagatggtggtagggtattaatgttaataattttggtaattatattgggtttataagtaaatattttaatttttagtatttatatattgaaatatttaagtataagggagtgtaatgtttttagtttgtttttaagtggtttagataaaaatataggtagatagagaaaaagaaagtgatttttataaatggatgaattaattggtgaatttagttaaatgatattaatagaattatttgaatagttttgtaaataaaaatgtttttaaatttgaataaaagaaagtattgagtttattaataaaaaaatatgtatatgaaattaagtgttaatttaggattttttgaagaagtaaattgagttgtgtgttgaataataataatgaaatagtcggtggatgttagtgataagaatattttagtgtaaaggtttaatgatgggaatgaatttagtatgtttaaagaatagaaaaatggtcgatgtagatataatgtagtggacgaagagaagagggtagagagataggagatagaagtttatgtagagtttttaaagttagtataaagttttgtaatttaatgaatttggattttattttgagtgatgggtaattattgaatagttggggtagtaatgtgatttgatttatattgtataaagattattttttttgttatatagagaaagaattttatagggtatggttggaagtagtaagattagaagtgaaaagtgataagtttggtttagttttatggtagtgaatatagtagaggatagatgatttgttatattttagaggaagttaagttttttgaatttgttgatagattgaatgttgagagggagaggggtgtttttaaataattgttaaatttgttttttttattatttatttatttatttgaatatttaggtgtttattgtgtgttaggtattattttaggtattggagttatattaatgagtaaagtaaagtttttgtttttatggagattaaattttagtagaagagataggtagtaaagatgattaataagtaatatatatgtagtttaaaatgtatgtttatgtatatttaggatgttttttaatgttataaaaaatgaaagcgttaaggagaaagggaaagggtttaaggagatttaggttagtttgaggagggtagttaaggaggatttttattgaaaggtgattattttaagaatgtaaagagatgatggatgtaagtgtttagtattgtatgtgatatattgttttttagtttttgagtattattttttttttttttttttttttttttttttttgagatggagtttcgttttatcgtttaggttgaagtgtagtggcgtgattttagtttattgtaatttttgttttttgggtttaagtaattttattgttttagttttttaagtggttgggattataggcgtgtattattatgtttggttaatttttatatttttaatagagatagggttttattatatttgttaggttggtttcgaatttttgatttcgtgattcgtttattttagttttttaaagtgttaggattataggtttgagttattatattcggttttattattattattattttgatatagggttttaattttttatttaggttggagtgtagtggtgttattatggtttattgtagttttgattttatgggtttaggtagttgttttattttagtttttcgaatagttaggattagaggtatttgttattatatttggttaattttttttatttttttttttttgtagaggtggggttttgttatgttgtttaggtgggttttaaatttttgggttaaagcgatttttttatgttggttgtttaaagtgttgggattataggtaagagttattatattagtttttgtttagatattatgatgaagattgaggatggtagtttttgtggagtataattttgattgtatttgtgatgttgtatttattttttggaatataagtagattattaggtgaatggttaaagaatttggaataagtttgaaagaaatataggttttggtaaggtaatggaaaggtatgtgtgaaatatttatttttaatagaggattaatttaataatagaaatatatttttttttagaaataatttgttttaaaggttaggtatggtggtttacgtttgtaattttagtattttgggaggttaaggcgggtggattatttgaggttgggagttttagattagtttgattaatatggagaaatttcgtttttattaaaaatatagaattagttaggcgtggtggtatatgtttgtaattttagttattcgggtggttgaggtaggagaatggtttgaattcgggaggtagaggttgtagtgagtcgagattgtgttattgtattttagtttgggaaacgagtgaaattttattttaaaaaaataaataaataaaaatttttataaaaagttgttttttttttaagtagggaagtttgattttattggtattttgagatggaggtttttgggtaaaagaagaattttatgggggtattttgagatgagtatgattaatttagttaagagatggggaaggtttaagttttgttttttgtaggtggaatggagaagggtaaagggtttgaattttggttgtgtggtgtgaagaatgattggttttaaaatagatttaaaatgaaaagattaaattgattaatgttttttatgtttttaaaaaatgtggttgataaagcgtttttgtgtttttaaagggagtttggatgaataggttttggtattgtatgtattgtattaaatatttggagtggtaaaataatttttaaaatatttttagtaattttatttttattttatttgtaggatgaaaaagtaaatttggggattgttgattaaattagtaaattatatggttgtttgcgtagattgattgttatgcgaggtagttgtgttattttttttttaggatatgttgttgtatttgatgttagtgttttgaaatatttattttttagttaatagtaggtgaagtaattatttttagttattatggt

SEQ ID NO: 32 - DNA, 6071 bp, Artificial Sequence
  chemically treated genomic DNA (Homo sapiens)
attataatgattagaaataattgttttatttattgttgattagaaaataagtgttttagaatattggtattagatataatagtatattttgaaagaaaaataatatagttatttcgtatagtagttagtttgcgtaaataattatatggtttgttaatttaattaataatttttaaatttatttttttattttgtagataaaatgaaaatgaagttgttagaaatattttagaaattattttgttattttaaatgtttaatataatatatatagtattaaagtttatttatttaggttttttttaaaagtataaaaacgttttattagttatattttttaaaagtataaaaaatattgattagtttaatttttttattttaaatttgttttaagattaattattttttatattatataattaaaatttaaattttttgtttttttttattttatttataagagataaagtttagattttttttattttttgattagattgattatatttattttaaaatatttttatgaaattttttttttgtttagaagtttttattttaaaatgttaatgaagttaggtttttttgtttaaaaagaaaataattttttataagagtttttgtttgtttgtttttttgagatggagttttattcgttttttaggttggagtgtaatggtataatttcggtttattgtaatttttgtttttcgggtttaagttatttttttgttttagttattcgagtagttgggattataggtatgtgttattacgtttggttaattttgtatttttagtagagacggggtttttttatgttggttaggttggtttggaatttttaattttaggtgatttattcgttttggttttttaaagtgttgggattataggcgtgagttattatgtttggtttttaaagtaaattgtttttagggaagagtatatttttgttattaaattagttttttattagaaatgaatgttttatatatatttttttattgttttgttaggatttgtattttttttaagtttattttagattttttagttatttatttggtgatttgtttatgttttaaaagatgaatgtaatattataggtatagttaggattgtgttttataaaaattattatttttaatttttattataatatttagataggaattggtatggtggtttttgtttgtaattttagtattttgggtagttaatatgggaagatcgttttagtttaggagtttgagatttatttgggtaatatggtaaaattttatttttataaaaaaaaaaaaataagaaaaattagttaggtatggtggtaaatgtttttagttttagttattcgggaggttgaggtgggataattatttgagtttatgaagttaaggttgtagtgagttatgatggtattattgtattttagtttgggtgaagagttaagattttgtgttaaaataataataataatagggtcgggtgtggtggtttaagtttgtaattttagtattttgggaggttgaggtgggcggattacgaggttaggagttcgaggttagtttggtaaatatggtaaaattttatttttattaaaaatataaaaattagttaggtatggtagtgtacgtttgtagttttagttatttgggaggttgaggtagtagaattgtttgaatttaggaggtagaggttgtagtgagttaagattacgttattgtattttagtttgggcgatagagcgagattttattttaaaagaaaaaaaaaaagaagaagaagaagaagtagtatttaaaaattgagaaataatgtgttatatatagtattgaatatttatatttattatttttttgtatttttaaaataattattttttagtgaggattttttttgattattttttttaaattaatttggatttttttaaattttttttttttttttttagcgtttttattttttgtaatattaaaaaatattttaaatatatataaatatatattttaggttatatatatattatttattaattatttttattgtttgttttttttattagaatttaatttttatgagggtaggggttttgttttatttattgatgtaattttaatatttagaataatgtttagtatatagtaggtatttaaatatttaaatgaatggatgaataataaggaagatagatttgataattatttgaaaatattttttttttttttaatatttaatttattaataagtttagaaaatttaattttttttaaaatataataaattatttgttttttattatatttattgttataaagttgggttaaatttgttattttttatttttggttttgttgtttttagttatgttttataaaattttttttttatatgataggaagaatgatttttatataatataaattagattatattattgttttaattatttaatggttatttattatttagaatgaaatttaaatttattggattataaagttttatgttggttttaaaagttttatatgaatttttgttttttgtttttttattttttttttttcgtttattatattatatttatatcggttatttttttattttttgaatatattgagtttatttttattattgagtttttgtattggaatatttttattattgatatttatcgattattttattattgttatttagtatatagtttaatttatttttttagagagttttaaattaatatttaattttatatatatatttttttgttaatgggtttagtatttttttttatttaaatttagaaatatttttatttgtaagattatttaaataattttgttaatattatttagttaaatttattaattaatttatttatttataaaaattattttttttttttttatttatttatatttttatttaaattatttgagagtaagttggaaatattatatttttttatgtttaaatattttagtgtgtaaatgttaagagttaggatgtttatttataagtttagtataattattaaaattattaatattaatattttattattatttttatagatattattttaaaatttatgagggatttttttatataaataaggttggtagattatttgaagttaggagtttaagattagtttggttaatatggtaaaatttcgtttttagtaataatgtaaaaattagttaggttcgtggtggtaggcgtttgtagttttagttattttggaggttgaggtagtagaatcgtttgaatttgggaggcggaggttatggtgagtcgggattgtgttattgtattttagtttgggcgatagagcgagattttattttaaaaattaaataaattaaataaataaataaaatataagaaaagaaattattatttttaagtgttaatggaaaataattgttaatttttatattttaattatatttaattattatttaagtaaaggtgaaataaagatatttttagattagtaaaaagagtgtattatttatagattttttaagaattattaatagatatatttggtaggaatgaattattaatttagaaggaaaattgtgataaatatgtaaagtgattagataatttaataaatatattggtaaatcgaaattaatagttttaaaaataatggtaattattattttggttgggagtgtaataaataaaatggaaataaaattttagatagcggtaatatattgaaaaagttattgaatttgaagtgttttaagatttttgtatttaaagaaaaaaatggatatatgaattgatattagattttatgttaagtatatattaaaattttaaaagtaattattaaaataaggaaaacgaaatatttatttttaaatttatttattatttttatttatttaattaagagtatttattgatttgtgcgtataaaatgtgagaaaatagaataaagtagtatattaaaatgaaataaattaaaaaagttgaagagttttaaatatttttattgaagtgtttgaaattgattttaaaaaataatataattattaagataaattattaattttttgttttttttttagatttatttaaaaagatttgttgttagagatggtttttttggatggaaaggtagggaaatattttaatttattttttaagataaagatggaagttaatatttttagaaggttagttatatatatattaagtttgttgtttttttttattttagatatgaagaatagagttaggattggggaaaggtaagtgagaagtttggggtttcgataaagtatttgtggttatttgttatgtttttttatttggggagatagaagtatagtttgtttgtggaaattttagtttatatttatagtgtaagaaaatttatttttagttttattgtggtattagttttaggaatgagagaggataatttaataaaattaaaatagatgaaaagaaaatgagttttatattagattgtaaattttttttattatttaattttgttttttagtatgtataatgatagaatgaaagaattagtaaggttatagaaggaaatttttattttttttaagtattagaaagaagggttaatagtatatgtatttattttaagacgataatatttatagtaatattgattaatatttttaatatgtattagttttaaattttaaattaaagtatatttaatttggagttagagaaggttttgttttaaattttaattttttttttttattgatttttttattttttaatttttttattgtttaaaacgaaggagtagattaaaaagttttgaaaaaaattttttaaatattataatttttaatttattttaaatataattatattgttttatttagaggtttgtttttataggagttgttacgtaaaatgttggttgttaggggttttttaaattttagtatttttttttgtttgtttgtttttgagatggagtttcgtttttgttatttaggttggagtgtagtggtatgatttcggttttttgtaaattttgttttttgggtttaagtgatttttttgttttagtttttttagtagttgggattataggtatgtgttattatatttggttagtttttttgtatttttagtaaagatggggttttattattttggataggttagtttttaatttttgattttaggtgatcgttcgttttggttttttaaattgttgggattataggtttggttatgttgtttaggtttgttttgaatgattgggtttaagtaatttttttgttttaggtttttgagtatttgagataagaggtatatattatagggtttggttttagtatttttttaaattttaaaataaatagaatataaagaaagaaagttaaaaagatattttttttaatagaaatggttttatgttttttatgataaaagttttatgtagttaagtttaaaatattgaaattgttattttaaattttttaaattattaaataatttaatttaaaatgttgtaaatttaagattttattttaaaattgggttatattgttaaatttttaataggtaaaagttaatgattttttttttgattttttgggttattgatttgtaaaggttattagaatattttttattgatagggtagtgattttgttaaggttataatataatttattaggagttaataataattttggattgtttttgaaattttatttagagtttgaagttgagaatttattatttgtttgagattataattttgatttagaataataattaaagtggaatatttaagtttgtttattgatgaaggaagaaagaagtttaaaatatcgatttttttattgtggtatttattttaatgagtaaattagaataattatttgtgtaaatatagagaataaataataaaataatgtaaaattaaagtatttaataatgattgtatgttgtttttttttataaaatatattatttttttaaattaggttttttttttaatatattgtttattggattaaatttaataaattaaaaagtaagtgatg

SEQ ID NO: 33 - DNA, 6109 bp, Artificial Sequence
  chemically treated genomic DNA (Homo sapiens)
  unsure (214, 2796..2797, 4347)
ttataattgaagtaggttttttgttatgggggcgggagggttgtgggggaggaggttgtgggggaggaggttgtggttgattttagggggcggcggtggggttgggagagtttttttttttttttaaagtattttttcgaagaggggtcgtatttgtagggatgtcgatttgagtttaatttaggaagagttttttagtagtaacgcgtttgtntcggaggcggttatggttagaaggcggtgtggggattttattgtttttttgggttggtttttttacggtttagggatttcgtaggggttatagttgttcgttcgtgtttgtttatttttacgggtattataggagagtttaaacgtggacggttttattaaatttttattatatttttatttagttgattttgttatttttttattttatagttggggaaacgggttaagatatttgtttaagcgtatttagtatagataggaaatgttgagtgtgaattaggggtttgtgatttcgagatttttagtggggtttcggttgttttatcggagatttttggaagttgaggtggtgagcgggatcgggggatattttcgagggaagttggaatcgcggttttttttttggaatttaggggattcgtggatttggatgagttttatttggtattgtgtcgtgtttttaattaaaatttagttttttttgtaattaagaacgtgggtatttttttagggtgttagtcgcgtttgtgtcgttgatatcgatagagttgttttagggttattttggtgggttttaagtagttacgttttgggagggtttagggttttataaaagatttttttcgttttttatttattattacgttttttaatgcggtttttacgttttattattttaaattatggtttaatgaaaagtatagtgtttattatattagaatgttttaacggggtggtagttgtattttggtaaaatgggttttttttataattttgtgaatttatttgtttattagatgtttaaggagtttatatatcgggaaggtgaagatttcgattttagtttcgtgtttttattggggtgttttcggtttgcgtttcggttcggattttttaggtagatttgttttttttgggggtggtaggagcgtttagtaattgtagttttagagttttggaattttgtattattttgtattaggtttttttaaattattttagtttttcggttatggtatttttttcgtggttttgggtttgtttagtcgtgttttgagttggggagtggttgagtatttagttatgagtcgttttatttgtattgttttgaatattcggggtaggtttttttttgtttttattttcggtttttattttttttgtggtttattttaattgtttatattttatttaggattagaaagtcggggtaaggttttttcgtatatgatattgtttagtattttttggagcggtttcgcgatttatatttttttttttaggttttgtgattggggatggtatttttgtgggtttttttttttttttgtaaagtgggttggtatgagatttatataaaattatattattatttatttattgatttatttatttatttatttatttatttatttatttatttatttatttatttatttatttatttatttatttatttatttatttatttatatatcgatttatttatttatttatttatttatttatttatttatttatttatttatttatgtatttatttatttatttatttattaatttatttatttatttatttttttattttttatttatttatttatatatttatttatttatttatttatttatttatatatttatttattatttatttatttatatatttatttatttatttatttatttatttatttatttttttatttatttatttatttatttatttatttatttatttatttatttatttatttattttttcgtttatttatttatttatttatttatttatttatttatatatttatttatttatttatttatttatttatttatttatttatttatttatttatttatttatttatttatttatttatttatttatttatttatttatttatttatttatttatttatttattatttatttatttatttatttatttatttatttatttatttattaatttatttatttatttatttatttagtagtgaagggtgtgtgtgttgggggtgggggggtttttatatgttagaagagaaggtaaatataagatattttgtttgaaggaaggtttttttatttatttttatatggcgttattttttttattgtttttttatttttttttagttttttggttattttatagatttattaaagtttgttttagggtttttttgtttatttagggatagtttttttaattgttttatgggttttatatgttgggttatgttgatggaacggggtttttataggttttagagagtaggattaggggttgttttggatatcgaaagaattttagtaggttttaatagggtttttaggaaggaaggaaaggttttttttgtttcgagaggttgggtgttggttgtagatagtagaggtttttgggagaagtcgaggttttttttgttgtttttatttttgtagttattttttttttagttttttattttttggtcgtttagttttgaaagttatagttaacgtttgtttttttataagtattaattgttcggtttgggggagaggaggtcggtagtggggaggtggggagtggnntttatattttaggtaagacggggttaggcggggagtttagggttttattgcgaaagtggaagtgttttatttgtggggggcgtaggtgtaggtttcgaatatttgttttagggttgggggtagggttgtttgttttttatttcgggtggggggagttattatttttatttagggtgttgttttgttgttttacggagtgggggttgtgttttttgagatttttagtttttcgattttgagatttttattgtatatagttggggaataggtattgatatagattaattttagttatatgtttacggtggtttcggtttatgtggcggtttagagtttttgttgtttttattttcggaaacgttgtaggagttgacgtcgttaggatcgtgtattttgtataaatgaggaaattaggagggttagggtttttaggatttttattgtgaattttattttgagttagagtatagggaatagtaggggacgtggggatcgaatgatggtattaggggatgggtttcgggttggtaggaatgttttttttagttttagttttgggggtagaacggtcgattatttagggtaggggaggtttcgggtgggtttggcgtttgggaagttttttagtaggaataaatatatttttattgtaagttggatatatacgttggtatgtagtttgttgttattaattcgagaaagatattcgattattgggatagggagattcgggatatttggagattttgcggggaaggagtcggtttttatttttgtacggtttgaattattaattgcgtgtaaacgtgatttaaaatttaaattaaattaaattaaaatagtatagaagttcgtgagtcggttcggggtttgcgggttttatatttttggtttgtttgaggtcgggaaatttttagttatggtattagaaaagttatcgaattagggttgtagggtcgaagggttattgtttttttttaggaagtttttgttttttgatagttgttagggagttttagaaagtggtttttttttttagtatttgggatgtgttttatttttttagtttaacggtcgttagaaaggggttttaggattttttttagggtttaagtagttttaagagtgttttgaggtggtttttggaattttttagattggagaagttatttattttcgattttcgtaaattttaggttgtttatcggaggcggtcgttggggcgtggggtgagggtttttttgaggtattttcggagagtgggggagttttgttgtttttatagagggttaggagttttgtgtacgaggttaagtagagagagagggttttttttttagtaggcgggaggtattttgaggataggttaggtgtttaagaatttcggagtaggggttgaggagaggttggttagaggtttcgttttgtttaagggtatagttagtagatataggaatacgggtagggtggtttttggagcgggggtaaattaaaaggggtgttggggaaagttcggttgattgaaggttagcggagagggaggatatttntagatattttaggttgaaggaagggttaagttttggggggaagatgggtgggcgggataggttaagggttttgggttaagatggagttgtttttaagtttgtatatttgttttggggtcgaggaaatatatgtttagtggttacgttgtagggtttagggtgggtgggacgttattagagttgtttggaagaaggaagttgttgaaaggttaaatcggaatggttcgagggaaggtcgcgtaggttagggttttagatggtttttgttagggaagtggcgggcgtagttgtaggttttcggtttcggtattattacggggatatagttggttgttttattcgtaggttgtagggagattttttttagtttgtagttttaggttcgtttcgcgttatatgagttttagggtttttattttttttttagggtagaggatatttagttggtggtcgggagggtttcggttttttagggatagaggtttaattttaggacgttttagttggtttagtttttttttttttttttaaggttgtaggaggtcgggaaaggtagttttggtagaggtttgttttgggttttaggttggtttttgagggtggttttttttatgtcggttttaagattgagggatagggtagttagtttagtttcgggatttatttgtggttttatgttttagacgtattttgtgttggagagcggttttttggtatttgtcggttgtttcgtatttcggggttttaggaagggcggtttaagtaagaggttcgaggggaaggtggtggggtgggggtagagagcggtagtcggtgtcggggttgtgattttttagagtttcgcggggtttgtttagtttagttgatagtgtcggtacggatggtcgtgttgatttattttagatattaatagggttattttataggtaggttttgtatagttggggtaggtgggttggtgagggtttggtaggtgttagttaggtgttttagttttatttagaggtagatgttggagggcgggtttgtttattttcggtaaggaagggtgggttgggtttttttggggggtggaaggttcgtagtcggggaaatgaaggggggggttttagaaaaagagtttttttttttttggaatggtttttcgggtgtgatattttatagtaggttggatgaggaaattgaggttagaggggagggtattggtttaagatttcggtgaggaggaaatggatttaattttgggtttttgttcgaggaacgattttagttagggtagtgggggtttacggggaatttgggtttgtttttttgggggtttcgggttttggggaggggtttagtttagtaggacgttagttattgttgatattttttattcgagtttgcgaagttttaggataaggattttcggacgttgggggttgtagttgtaggttggtggtttcgatttttagtggttttcgtggttatatttttagtagtcgtcggaatttttaggagtttatagtttttcgtttcgcggggtttttattgaggtcgttaggtttaaggtttgattgtatttttgatatttatatatagaattcgggatcgaggggtgtttttatttttggagattatattttttgagtaggttttggcggcggttgtttgaggttgtttttatttgtagttgttcgtggggttttagggttattttttataagggttttagatgtgagtaggaattttttaatttcgggtgttcggaatgtaaagg

SEQ ID NO: 34 - DNA, 6109 bp, Artificial Sequence
  chemically treated genomic DNA (Homo sapiens)
  unsure (1763, 3313..3314, 5896)
tttttgtatttcgggtattcggggttgggaagtttttgtttatatttggggtttttgtgggggatggttttggggttttacgggtagttgtaggtgggaatagttttaggtagtcgtcgttaggatttgtttagggaatgtggtttttagagatggggatatttttcggtttcgggttttgtgtgtgagtgttaggggtgtagttagattttggatttgacggttttagtgagagtttcgcgagacgggagattgtgagtttttgaaggtttcgacggttgttgggagtgtggttacgagggttattgggaatcggggttattagtttgtagttgtagtttttagcgttcggggatttttgttttgggatttcgtaggttcgggtggggggtattagtaatagttggcgttttgttggattggatttttttttagagttcgaagtttttagaagggtaggtttaggtttttcgtaaatttttattgttttggttggaatcgtttttcggataggggtttagggttgggtttattttttttttatcggggttttgggttagtgtttttttttttggttttagtttttttatttaatttgttgtgaggtgttatattcggagggttattttaggaggagaagggttttttttttaggatttttttttttattttttcggttgcgggttttttattttttaggagaatttagtttatttttttttgtcgggggtgagtaggttcgttttttagtatttgtttttgggtggggttggggtatttggttggtatttgttaaatttttattagtttatttgttttagttgtgtaggatttgtttgtggggtggttttgttgatatttgaggtgagttaatacggttattcgtgtcggtattgttaattaagttgggtaggtttcgcgaagttttaaggagttatagtttcggtatcggttgtcgttttttgtttttattttattatttttttttcgagttttttatttgggtcgttttttttgggatttcggggtgcggagtagtcggtagatgttaggaggtcgttttttagtatagggtgcgtttgggatatggagttataggtggatttcgaggttgaattggttgttttgttttttagttttgaagtcggtatgaggagggttatttttaggggttaatttggagtttaggataggtttttattaggattgtttttttcgattttttgtagttttgagggaaagaggaggggttgggttagttggggcgttttggagttgggtttttgtttttggaaagtcgaggttttttcggttattaattgggtgttttttgttttggggagggggtgggagttttggggtttatgtgacgcggggcgggtttggggttgtaggttggggaaggtttttttgtagtttgcgggtgaggtagttagttgtgttttcgtgataatgtcggggtcggaggtttgtagttgcgttcgttatttttttgataggaattatttggggttttggtttgcgcggttttttttcgggttatttcggtttgattttttaataattttttttttttaggtagttttggtgacgttttatttattttgagttttatagcgtggttattgggtatgtgttttttcggttttagggtaggtgtgtaggtttgagggtagttttattttggtttagagtttttggtttgtttcgtttatttattttttttttagggtttggttttttttttagtttggggtatttgngggtgtttttttttttcgttagtttttagttagtcgagttttttttagtattttttttagtttgttttcgttttaggggttattttgttcgtgtttttgtgtttgttgattgtgtttttgagtaaggcggggtttttgattagtttttttttagtttttgtttcggggtttttgggtatttgatttgtttttaaagtatttttcgtttgttgggaaggaaattttttttttttgtttggtttcgtgtatagggtttttggttttttgtggagatagtagggtttttttatttttcgggggtgttttagaaagatttttattttacgttttagcggtcgttttcggtgagtagtttggagtttgcgggggtcgggggtaggtggtttttttagtttgggaaattttagaagttattttagagtatttttgggattatttagattttagggagagttttaggatttttttttagcggtcgttgggttgagagagtgaggtatattttagatgttgggaaaaaaagttattttttaaagttttttgataattgttagagggtaggagttttttgggaggggatagtgatttttcggttttgtagttttggttcggtggtttttttgatgttatggttgggggtttttcggttttagataggttagaggtgtggagttcgtagatttcgggtcggtttacgggtttttgtgttattttggtttgatttgatttgagttttaggttacgtttgtacgtagttaataatttaagtcgtgtaggagtaaaagtcgatttttttttcgtagggtttttaggtgtttcgggtttttttgttttaatagtcgagtgtttttttcgagttggtgataataagttgtatgttagcgtgtgtgtttagtttatagtggggatgtgtttgtttttgttggggaattttttagacgttaggtttattcggggttttttttgttttgggtggtcggtcgttttgtttttaggattgaggttggaggggatatttttgttagttcggggtttattttttggtgttattattcggtttttacgttttttgttgttttttgtgttttggtttagggtgggatttatagtgagggttttgggggttttgatttttttggtttttttatttgtgtagggtgtacgattttaacggcgttagtttttatagcgttttcgggagtggagatagtagaggttttgagtcgttatatgggtcggggttatcgtgagtatgtggttggggttggtttgtgttagtgtttattttttagttgtgtgtagtgagagttttagagtcggggaattgagggttttagggggtatagtttttatttcgtgaggtagtaggatagtattttgggtgagggtggtggttttttttattcggggtaggagataggtagttttgtttttagttttgaggtagatgttcgaggtttgtatttgcgttttttatagatgggatatttttattttcgtaatgaggttttgagtttttcgtttggtttcgttttgtttggggtgtgggnnttattttttatttttttattatcggtttttttttttttaggtcgggtagttggtgtttgtggggaagtagacgttggttgtggtttttagagttgggcggttaggagataaggggttggggaggaagtggttgtagaggtgggggtagtaggaggggtttcggttttttttagggatttttgttgtttgtagttagtatttagtttttcggggtaggaggggttttttttttttttttaaaagttttattagggtttattggggttttttcggtgtttaagatagtttttggttttgttttttgggatttataggagtttcgttttattaatatggtttagtatgtggggtttatagggtagttggggaaattgtttttgggtgggtagaggggttttaaggtaggttttggtgaatttgtaggatggttagagaattggaggagggtgagggggtagtgggggagatgacgttatgtgggggtgggtgaggaggtttttttttaggtagggtgttttatgtttgtttttttttttagtatgtaggaatttttttatttttaatatatatattttttattgttggatgaatagatgaatgaatagattgatgaatgaatgggtgggtgggtgagtggatgggtgggtagatgatgggtggatgggtgggtgggtggatgagtgaatgggtggatggatgggtggatagatgggtgagtgggtggatagatgggtgagtgagtgagtgggtggatgggtgggtggatggatagatgtgtggatgggtgggtggatggatagatgggtgaatgggcggaaagatgggtgaatgggtggatggatgaatggataaatgggtaaatgggtgggtggatggagagatgggtgaatgggtgggtaggtggatggatgggtgtgtgggtgaatgaatggtggatgggtgtgtgggtgggtgggtggatagatgggtgaatgtgtggatgggtggatagaggatgggaggatagatgggtggatgggttgatggatggatggatggatgggtgtatagatggatggatgggtgaatgggtgggtagatggatagatgggtggatgggtcgatgtatggatggatgggtagatgggtgggtggatgggtggatgggtggatgggtgggtggatgggtggatgggtgggtgggtggataggtggattaatgaataagtggtaatatggttttatgtaagttttatgttagtttattttatagaggagggaggaggtttataagggtgttatttttagttataaagtttggagagaggaatgtaagtcgcgaagtcgttttagaggatgttgaatagtgttatgtacggaggagttttgtttcggttttttggttttgaataaggtgtggatagttggggtgagttatagagggagtgggggtcgggggtggaggtaggaaaaaatttgtttcgggtgtttaaggtagtgtaggtgaagcggtttatagttggatgtttagttattttttagtttagggtacggttgagtaaatttagaattacggagaaggtgttatggtcggagggttggggtgatttggggaaatttggtataaagtggtgtaggattttagggttttgagattgtagttattgggcgtttttgttatttttagaaagagtaggtttatttggggagttcgagtcgaggcgtaggtcggagatattttaatgagagtacggaattggaatcggggtttttattttttcggtgtgtggattttttgggtatttagtaagtaaataagtttatagaattatgaaggaaatttattttattaaaatatagttattatttcgttagaatattttggtgtagtgagtattgtgttttttattaagttatgatttaaagtggtgaggcgtgggaatcgtattaggagacgtggtggtgagtggaaggcgaggggggttttttgtggagttttggatttttttaaggcgtggttgtttggggtttattaaagtggttttggggtagttttatcggtgttaacggtataggcgcggttgatattttggggaggtgtttacgtttttggttataggaaaggttaaattttggttagagatacgatataatgttagatgaaatttatttaagtttacggattttttgaattttaaggaaagaatcgcggttttagtttttttcgaaggtgtttttcggtttcgtttattattttagtttttaggagttttcggtgggatagtcggaattttattgagggtttcgaagttataggtttttggtttatatttagtattttttgtttgtgttgggtacgtttgggtaaatgttttgattcgtttttttaattgtaaagtaagaaggtaatagagttagttgaatgggggtgtggtgaggatttaataaaatcgtttacgtttggatttttttatggtgttcgtgaaggtgggtaagtacggacgggtagttgtgatttttgcgagatttttgagtcgtgaaggggttagtttagggggatagtggaatttttatatcgttttttggttatggtcgttttcggngtaggcgcgttgttgttagaaagttttttttaaattgagtttaggtcggtatttttgtagatgcggttttttttcggaagagtgttttggaagggagaaagggtttttttagttttatcgtcgttttttggagttagttatagtttttttttttatagtttttttttttatagttttttcgtttttatggtaagagatttgttttaattgtga

SEQ ID NO: 35 - DNA, 6092 bp, Artificial Sequence
  chemically treated genomic DNA (Homo sapiens)
attttatagaaaaggagagggagtttttaaatttgataatatttttattatttttattttaaaagatgtgttttttaaagaagttataaaaaggaaaattaattttaatatattatacggtaaataaataaaattaataattttttttgatgtttattttgtgttgttgttatattattaatgtttttgattaaagtgatttatttaattgtatttggttaattttttttagagataaatgaagtattagttaaatatattttaaagttaatttatttaaagttggagtattagttgtttttggttaagaaagtgtagttaattgatgttttaaaagtaagtatatgtgtcgtcgtggattggtgattattatttgaagttataggatttttaaaattattaatattttaatattatattggattgaattttgaatattaaggtgtttttgtttttaattttaaataggaattatagatttatgagggaaatacgaattttttgatattagaatattattgtattttagaagaggtagattatttataggaagaatataaaaagtaatttgtatattttgaaagattttatggttagtggattattttagaatattttgttatatttttttttaattggttattttttaaggattatgtaagagaagttgggtagaaagataaaaagattatattagttatgatttatgaattagttatgaattagttgataataaatttattgtatagaatatttttgtattttgttaagttatttttaatatttaatttttttatttgataaaatgtaagtatattaagaaataagtatattgtgatgaattaatttatatatatgaataaatttggtataaaatgaatgtaatttatgaatttttagagtttagattgtattttatataaataattgttatgttttgttgttattgtgaattataaaaatgtagtatttaaaatttttaaggtaaaatttaataaaggatatatagtatttgtgttgtgttaatttatagtttaaaattttggtggtgagaagttgaatgttttataaattgtattgaaatagagtaagggaggtgaggagagggaaagaaggagtgaggaaggaagaaatagtttaagaaaaataattttgttagtaatttttatataagatttgttgtatatagtatattatttatattgtttttataattaggtgagatatttaatttttataatagttttgtaaggtaggtggtattatttttattttttatatgttttaattgaaatttgagtttaaggaatttgttgttatttagtaagttagtgattatgtttgtattagaatttttttattttaaaatgtatgttttttatattatgttaagttttttatagttattgtagagttaattggtattattagtatatatggatttttaagtttgtttattgaattttttattatatatttagagatttttttataaattgtagttatatttaatgttttaatttttattatatgataagtatatgattttttttatttttataataatttatgagattggttgtatataatattattgattgtaaaatttagatagttttgtaaattaaagttttttttataaataatttgatagtaaaattttgatttaatttgaattaatttaataataaaatttgatttaaattgatatgaggttttatatatattttttgtttgtttgtttgtttgttttttgagatagagtttcgtttggttttttaggttggagttagtggcgcgatttcggtttattgtagtttttgttttttgggtttaagtaatttttttgttttagttttttgagtagttgcgattataggtgtgcgttattatgtttagttaatttttttgtatttttagtagagatagggttttattatattggttaggttggtttttaatttttgatttcgtgatttgtttattttagttttttaaagtgttgggattataggtatgagttatcgtgtttagtttaaggttatattttttttattttatttagtgtaaatatttattcgtatattttgtgttagaaatagtattatgttttgttattggatgttgttatttagtttttttggggttaatattatagtatattttttttattatttttttaaaataggaaaaattttgaaatatattttgtattaagttttttggataaaagattgatagtttgaattatttttgttttatatatgagaaaatttaaggtgaaatgatttgtttagatttttgaatttaggattatttgtttttaagttaaattttaagaatggttaatatataggtggaatattttaatttagataagttgttaaaaatagaatttgtttagattatgttaaaatggttagtttggtggaaaaaatatattatttgttgtgatgttatatatattgatagtagtttaaaaatggttagtagttgattgtttgaattaatagtttgtaattaattgttaagagggttattaggtagatgatttatattttgaaatttgttttaaaatttttttaaaatgattatttttaaaaatatggtttttaggtttgtgtatgttaaattatggaattataggtgtttaaaaatagattattaagtaattattttagtgaaatattgtgttattaaatataattaattattgataggaaatttatgttttttttttaaaggtatgattattgatttttttatagataaatttaagtttaaaggtattaatgtaaaaattaaagtattttttttattggaaattttggatagttatgattaaaatgtattgattttatttttcgatgtagtatgatatataaataaggtaaagttttaaagaagtggtttgtttaaatgaaaaatgttaaaagagaattagaagttaattgtgtatgtattttaattttaaatgtttttttatatttaaaaatatttgagatataatggttttttaaagtaatgtttttattttttttgataaattgaattttttaaaattaaaagagtttttttatttttaaaatataagtagaatgatttaaataggattttaatgaatttttggtaagtggttgttttaatttttaaattgagaagtaatatgtggaaaattaaaatatatttaaatgtattataaggtatataaatatataaatatgtagatcgttttataggttttaaaatgtatttttatatattattttatttgatttttataattgttgtaaaatttgttaaattatataagaaaattgatttttagtgaaattttgtgattaagaggatatgttaatattttgtaaagttgggattagaatttaagtattggtatttgttttgtgttttggttattatgtatgttgttagttagtggaaataatttattaattgttttttttaggagataggattgatttgtaattgatattttttttgtttggtagtgttttatgattttgttgtagtttgtggaaatgttggatttggtttagtgttataaattgtagttaggaaataagaagagtttatatagagtcgggggattttaattagatatgttgtaattagtggagttatttagcgtgttttaagtgaagagtgtagaaatagtgatgttattttagatttttttatattagtattttttagatttttttttattatatatgatattaaggttatagaagttttgtgtattaattttaatttatatttattaattttaagggaatattgaaaggttttaaaatggtatatagataatggaaaataagttttatgttttaagaagggtagatttacgaattttttagaaaatagtgttttttaatgatatgttattatatttattagttatgtgtaagttttgtatatttttatatttatatataaatataaaaatttgttaaaggtacgtatagttaagagagttttattttaataaggttatattgtttttattatgtttaaaaaattttatttttgaaaggaatataattatatttaggttattagaacgttattgtgttttttgttggttgttatagtttggggaaaaatagaaaaaaattaatgattgtatttgaatattttgtaatgtattgttatttattatatatattaatagtagtttaaggtgttattttaaattaattgtatttttattaggaaaaataaaaagtataaaatataatttttggttattatgaataaacgtttaaatgttaagatgatattatagttttgatatttgagtattgtattattatgtgagtttcgtgttaaataatttatgtatattatttaattttaataattatatgattgtagttattagtttttattaatatataagaaaacggagaatcggagatattgaaaaacgtgttttagattttagatttttggaaaaagttatttaagttaattagacgttttagagttaaaggttgggtaatttaaatgatagtcgttaaagtttaatttcgtttaattttttaaaaggtttagagttagttttcggatagtttcgtttattaggtggtttagtttaaaataatcggaagcgtcgggttttaaattttattttttttcgtttcgcgtaggcgttttttttcgttttagttagtttgttttttttttttgtttcgtttttgtttagttttttttggtttattttttattcgtttgcgattttgtcgttttgaatgacgttaaggtcgcgagcgtttttattggtttattttaatagtcgcgggatatttgaattgtaagaatagtcgtcgtttcggcgggttgttcgttgtatttttgggcgtttttggttcgttacgttgggtagtgtttgtttgcgtttttcgtaattttttcggttttgcgtggtttcgagttgggtgagcgagcgggcgggttggtaggttggtttgggttgcgatcggcggttacgattattttttggtcgggtcggtgcgagtggtcggttgggtagagtgtacgttgtttggcgtcgtaggttgatttcgtcgtttattttcgggagtagtgatgttgggtaattttgcgtcggggtttgcgattcgcgaggcgggttcggcgttgttagtattgtagtagacggcgttttaagaggattaggagaatattaattcggaaaaggtagcgttcgtttaataatcgcggattcgggtcgcgttggcggtattgaagttcgggaattcgcggggtttagcgtagtagtagaggtcgaagacgagacgggtaaagggatgcgggatatttgtaggagggtgggtcgagtagggtttggtattggtttagtaggtagagaagagtggcgagaaggtatgttttgggtttttggaagggggttagggtttggagtgtagttggtgttggtgtgtggtttgttatagtaggagtttttttatattagtattaggatttcgttaatattgtgtgtatgttgtcggtttgttttttatagggggtatttgtttgtatataatggggttaaattaagttttaaaacgtgtagttttcgtttagtttcgcgtttttttttttatttttaaattttaggtattgttgtaggattttgatttttattttttttacgtttaagagatgatttttattttagaaaagcgtgtataaaatattttgtttttggtaaatttcgttattttagtcggatttgttttgttgttttattttcgggcgatagtggtgaattaataatttttttgttgttttttttaaacgtgttacgtattggtttgttattcgattttttttgtggttttgataagttttgtataattttatttagtgttatttattgatagtttttgtgggaatgtttgtgataaatgggaatatttttttttttttgaatattgaaatttttttttgttttagaaagtttaatttttgatagagtatttgggagaaaaagtaaaggttaatatttataagagaaagaatgtaagattagtaggtttaaagttagttattaatttttttttagg

SEQ ID NO: 36 - DNA, 6092 bp, Artificial Sequence
  chemically treated genomic DNA (Homo sapiens)
tttaaaaaaaaattaataattggttttgagtttattagttttgtatttttttttttatgggtgttggtttttgtttttttttttaaatattttattaggaattaaattttttgggataaagaagagttttagtatttaaaagagaagggatgtttttatttgttataggtatttttataaaggttattaatagataatattaggtggaattatgtaaaatttattagggttataagaagggtcgggtgataggttaatacgtgatacgtttaggaaagatagtaaaaaaattgttggtttattattgtcgttcgagggtggagtaatagagtaaattcggttaaaatggcggaatttgttaaaagtaaagtattttgtatacgtttttttaaagtagaggttattttttaagcgtgaggaggataggggttagagttttatagtagtgtttggggtttaaaagtggagagaaaggcgcggagttgagcgaagattatacgttttagagtttggtttgattttattatgtataggtagatgttttttatagagagtagatcggtagtatatatatagtgttggcggggttttgatgttaatatgggagaatttttattgtggtaaattatatattagtattaattgtattttagattttggtttttttttaaaagtttaggatatgttttttcgttatttttttttgtttgttaagttaatgttaaattttgttcgatttatttttttgtagatatttcgtatttttttattcgtttcgttttcggtttttgttgttgcgttagatttcgcgggttttcggattttagtatcgttagcgcggttcgggttcgcggttgttggacgggcgttgtttttttcgggttgatatttttttggtttttttggagcgtcgtttgttgtaatgttagtagcgtcgagttcgtttcgcgggtcgtaggtttcggcgtagagttgtttaatattattgttttcgggagtggacggcgggattagtttgcggcgttaagtagcgtgtattttgtttagtcgattattcgtatcgattcggttaaagaatagtcgtagtcgtcggtcgtagtttaggttagtttattagttcgttcgttcgtttatttagttcgagattacgtagggtcgaggaggttgcgaaaggcgtaggtaggtattgtttagcgtggcgagttaaagacgtttagagatgtagcgagtagttcgtcggagcggcggttgtttttgtagtttaagtatttcgcgattattgaaatggattaatgaaagcgttcgcggttttgacgttatttaaggcgatagggtcgtaggcgagtgaagggtaaattaaaggaaattgagtaggggcggggtaggagggagaaataaattggttggggcgggagaaaacgtttgcgcggggcggggagaggtaggatttagggttcgacgttttcgattattttaagttgagttatttagtgagcgaggttgttcgaaggttgattttaagttttttagggaattaaacggaattaaattttggcgattattatttgggttgtttagtttttagttttgggacgtttagttagtttaagtgattttttttaaaggtttaaaatttggggtacgttttttagtattttcgatttttcgtttttttatgtgttaatagggattaataattatagttatatggttgttaggattaaataatgtgtataaattatttaatacggagtttatatagtaatatagtatttaagtgttaagattgtaatgttattttaatatttaggcgtttatttatagtaattagaaattgtgttttatgttttttattttttttaatgaagatgtaattaatttaagatggtattttgaattattgttgatatatataataaatagtagtgtattataaaatatttaaatatagttattaatttttttttatttttttttaagttgtggtaattaataaaaaatataatgacgttttagtgatttagatataattatgttttttttagaagtaaagttttttaaatatagtaaaaataatatgattttattaaaataaaatttttttaattatacgtgtttttaataaatttttatatttatatataaatataagaatatataaagtttgtatataattaataagtataatagtatattattaagaagtattgttttttaaaaaattcgtgagtttgttttttttgaaatataaagtttattttttattatttgtatgttattttaaaattttttaatatttttttgaaattaataaatatgaattaagattaatgtataaaatttttgtagttttaatgttatatatgataaaaagagatttagaagatattagtgtaggaaaatttaagatggtattattatttttgtattttttatttgaagtacgttgaatagttttattggttatagtatgtttaattaagatttttcgattttgtgtaagttttttttattttttggttataatttatagtattgagttaagtttagtatttttataaattgtagtagagttataaaatattattaagtaaaaggaatattagttgtaaattaattttattttttagaaaaaataattggtaggttatttttattagttggtaatatatatagtaattaggatataaagtaagtattagtatttgggttttggttttagttttataaaatattagtatgtttttttaattataaaattttattgagaattagtttttttatatgatttgataaattttataatagttgtgaagattaaataaggtaatatataaaaatatattttgaagtttataaagcggtttatatgtttatgtgtttatgtattttgtaatatatttgaatatattttaattttttatatattattttttaatttaaaaattaaaatagttatttgttaaaaatttattaaaattttatttaaattattttatttgtgttttaaaaataaaaagatttttttagttttagaaagtttaatttgttaaaagaaatagaagtattattttaaaaagttattatattttaaatatttttagatataaaaaagtatttgaaattaaagtatatatatagttaatttttaatttttttttaatattttttatttaaatagattatttttttgggattttattttatttgtatgttatgttgtatcgaagaatgaaattaatgtattttggttataattgtttagaatttttaatagaaggggtattttagtttttatattggtgtttttaaatttaaatttatttatgaaaagattagtgattatgtttttaaagaaaaaatataaattttttgttagtgattagttatatttaatgatatagtattttattaaagtaattgtttgataatttatttttaagtatttgtaattttatgatttaatatatataaatttaaaagttatgtttttaaaaatagttattttggggggattttaaaataagttttaagatataaattatttgtttaataatttttttaataattgattataagttattaatttagataattaattattggttatttttgaattgttattagtatatataatattataataagtggtatattttttttattaagttgattattttgatatagtttaggtagattttatttttaatagtttatttgaattaaaatattttatttatatgttgattatttttgggatttgatttgaaggtaaatagttttaggtttaaagatttgggtaaattattttattttgagtttttttatatgtaaaataggaataatttaagttgttaattttttatttaaaaagtttgatgtaagatgtattttagaattttttttattttaggaagataatgaaaggaatatattatggtattaattttaaggggattgagtagtagtatttaatagtaaaatatagtattatttttggtataaaatatacggatgaatatttgtattaagtggaataaaaaagatataattttgggttgggtacggtggtttatgtttgtaattttagtattttgggaggttgaggtgggtagattacgaagttaggggttggagattagtttggttaatatggtgaaattttgtttttattaaaagtataaaaaaattagttgggtatggtggcgtatatttgtaatcgtagttatttaggaggttgaggtaggagaattgtttgaatttagggggtagaggttgtagtaagtcgagatcgcgttattgattttagtttgggagattaagcgagattttgttttaaaaaataaataaataaataaataaaaaatatatataaaattttatgttagtttaagttagattttgttattaaattaatttagattaagttaagattttgttgttaaattatttatgaaaaaaattttggtttataaagttgtttggattttgtaattagtgatattatgtatagttaattttataagttattataaggataaaagagattatgtgtttgttatgtaataaaggttaagatattaaatatagttatagtttgtgagaaagtttttggatatgtaataaaaaatttagtaggtaggtttaaggatttatgtgtattagtgatattaattggttttatagtgattatggaaggtttggtatagtgtaaaaggtatgtattttggggtgagaagattttaatgtaggtatgattattaatttgttaggtgataataaattttttagatttagattttagttaaagtatatgaaaaatgaagataatattatttattttgtagagttattgtaaggattaaatattttatttgattatgaagatagtgtaaatagtgtgttatatataataggttttatgtaaagattgttaataaaattgttttttttaagttgttttttttttttttattttttttttttttttttttattttttttattttgttttaatataatttgtgaaatatttagttttttattattaaagttttgaattataaattgatataatataaatattgtatattttttattaaattttgttttaaaaattttaaatgttgtatttttataatttataatagtaataaaatatgataattatttgtgtgaaatatagtttaagttttaaaggtttatagattatatttattttatattaggtttgtttatatatatagattaatttattatagtatatttattttttaatatatttgtattttattaagtaaaagaattaaatattaaaagtagtttgataaaatatagaaatattttgtgtaataaatttgttgttaattgatttatgattggtttatgaattatgattgatgtaatttttttatttttttgtttagttttttttatatgatttttgggaaatagttagttgaaaagaaatatggtaaggtattttagaatggtttattaattatagagttttttaagatgtgtaggttgttttttgtattttttttgtaggtgatttgttttttttagaatatagtgatattttggtattagaaagttcgtattttttttatgaatttgtaatttttatttaaaattaaaaatagaagtattttaatatttaaaatttaatttaatgtaatgttaaagtattgataattttagaaattttatgattttaaataataattattagtttacgacgatatatgtatttatttttaaagtattaattaattgtatttttttagttaaaagtaattggtattttagttttgggtggattagttttaaagtgtgtttgattgatattttatttatttttagaaggagttgattagatgtagttagataaattattttgattagaaatattaataatgtaataataatataaaataaatattagaaagaattattaattttgtttgtttatcgtatgatatgttgaggttaatttttttttttgtagtttttttagaaagtatattttttaggatggagatagtagaaatgttgttagatttaaaaattttttttttttttttataaaat

SEQ ID NO: 37 - DNA, 6862 bp, Artificial Sequence
  chemically treated genomic DNA (Homo sapiens)
tgtattagattttttattttaaagtgatttttaagaaaaaaaaaataaaatgtagttataggtagtttttggacgtttttttatttgttaagtatttttttgtttcgagttttttagttatagtgtattggacgttatcggaaggttgtagttgttatttggtgttttattatcgttgagaaggtggaatggttacggttcggttttgttattttttttagtcggatagtcgttttattacggattttagtagggtcgagtatatttttttttgttcgtttttatagatgaatatgttatcgttttagtagtataattcgttttattacgtaaaaaagtagtttttatttattcgtagggaaggagtatgttcggtattatagttggattggtgttcgagttaagcgttttgggaggttcgtatgcgtttcggaatcgtaatgcgcgttttttttaagttttacggtaaacgcggacgtagggtaattacgtggcggtggaatcgaggttcggcgggaatgcgcggaatgcgcggcgcggtttcgcgcggttttcgagttacggtttagggttcggcggcgcgcgttttcgttttttttttttattttttttagtcgtatttcggttttggttttgttatttagaattcgttgggtaagtcgtgtttcgcgtgaatatatagaaggggtttggggatcgagcgcggtttattagttttttagattttgaggatttagaattttttaaggggttcgaattcgagttttgtttttagtttttaaggtacgggttttagggattttaggggaagggcgcggggtattaggtacgtaattcgttttttcgtatttggaaaaaaattttttttttttttttttttttgtttgttgagtgtgcggataattagaattttaaggcgtttcgtaataacgatttcgttgtttttttatttatttttaagtgttaaagcgagggatggaagcgtttttaagcgttttaagggtattgaggagcgagttggagaggcgcggggatgcggggtttttttcgtagtttttcggaaagggcgggggagggcgcggtaagtttcggagtggggtatgtcgtgggagtttacgagggttttagcgcggatttttcgtcggaaaatcggttttcgcgagtcgtcgtcgtaggttttttaggtttcgcgagtttcgtagcgaagttttgcgttttcgttcgacgcgggggtttgtttagtttcgggtgggtcgcggttaggtttgattgcgggggagagggtcgaacgtgattttcgaggttatttttagttagtttttttttttgtggtcggaagtggtttttttttcgatttgggcgtttattttttattatttggtttgagaggggttggggttagtcggaaggttagggaatttttggtggatttgggggtttatattgtttagggtattagtcgatgcgttttgaggggcgggagtcgaggaattagaatcgtttttaatttttaagagttgcgtttttagtttcgggattttagatgcgtcgttggagttagggtcgtttttttatttgttgggtttgcgttttaattttagcgtatattttgtcggtagttttcggagttaggggaggggtttcgttttttcgtagttcgtcggatagacgattggggtacgggaggggcggtggtagggtggtttgtgtgtggttgaaattaattgatttggagcggaaacgtacgtttgcggttggggcgatggggggggggtgcggttgtttatgtgtcgagcgtgtggttgtttttggtgggtattggggtcggagttcgtttcggtttatttcgtagttttggggcgtttgggatcggcgttacgtaagcgaagtagagttgttatagtacgtgggtcgttacgcgtattttaaaagtaaatagtgtgggggaaaggagagttagagcgttttcggagtataggggtcggttttcgaaagcgttttttcgggcgatttaagggtttaataatggaaaattcgcggagtttgagttaagtttttttaagtcgtcgttaggtatgcggttgtaggtgattttatttgggtgcgttcgttcgttagtcgttttggtggaaaagcgggtgcgggaggtcgttggcgaaaggtcgggattggtttttgtattattcgtttttaatttaagtttcgagtttcgcggcgcgtagtcgcgttgagtttcggggtttgcgtcgcggcgcgtcggtttttgaatgaacgcgtttttttttttcgttcgaatgaaggtttttatagttagggacggtggcgaatacgcgtttgtagcggaattcgtttttttttgatcgattattcgtttaggtcgcggttatcggggcgggggttagggggcgaggaaagcgtgaaggtgattttagttaattttggatttttttttaaataacgtggttattttttcgattgggttatttgttttttgtttttaaatggttattaagaaataagaatagagtattttaaatgagtttagaattcgtagtttttgtttcgtggtgggttttaagaagatagtgtaaagtaaaattgtaatcgaaaagttttttaaagttgtttttttttttggaaaaaataaaattaaaatgttttttttgcgttttttgaagtaatgatttttaaaagtttagaggtattggttttttcgggggattcgggggtcgttaagtagggtttttttaggtgggggttgggtagttggcgtttttcgtcgggttttaaattttagcgtcgggttttaaattttagcgtttttttcgcgggtttttggacggttttttacgttcgttaatcgggtttgtaattttgcgttcgtttttgagtcgggaaattaacgaagtttttagtcgagatttgttcggttcgtttagtaatagcgtcgcgtttttattggtttatgttaattttagttttttttgttttgcgttcgggatgggggggtgaagtttttttttggatttagagtcggttgtgtcggagtgggcgagtttttttatgttttgttgtttttagtcgatttcggttcgtttcgcgtttcgggttgggttagggcgtacgcggggttcggggtttttcgttttacgggatgggagaggtcgggtgatagtttcgggttttataaattatttaggcggtcgtcgggtcgggattttatgaatgaaaaagtagttgggtcgtttttgtgcgcgggttgatgttatgaggtttggttatgcgggggttaacgcgattgtgggtgttcggggagtgggggggggtacgatcgtaggtgttttttgttggggtaatttatcgttttttatgcggaattcgggggtaattatttttttaggattcggaatattagtaattttaattttcggcgggggagggggcgcgggaggaatttattttgaaaggtgggggtggggggggtcgtattttgttgtgagtattttggcgaaggggagagggttttttttattagttttttttgagtttttattgttaagagggtacggtggtttgatgatattgaattatatttaaaaggaagtaaatgaatagtttttttaatttggggtaggtattgtaaaaataaaaataaaagttaagatagtaaaatgtttttttattttttaatgtattaaagagatagaatttgtaattttaaaaattgtgtattttaatttatatttgtttaagtttgcgataatattggggatttttttatgtaattacgaatatttatcgattttgttaaaaattagattagtatattcgtttgtttaattgataattgttttgaattatgtcggtttttgttagtttttttacgtttacgaatttagttttagggtaaattttaaaggtgaagggacgtttatatttttaataaaattaattaggaattttcggtggttttgttttaggtagaggggattaatatttttagtaatttaattttttttttaattaaaaaaaatgagttagaatggagattattgttttttagttttttatttagaggtgtgtttttttcggttaaattgtcggtacgggaagggagggggtgtagttggggattttcgtaaggatcgattggttaaggtaggaaggtagttcgaagagtttttaggttagaaggataagatgaaggaaatgttggttattattttgggttgttgttggaattttcgggtatttattttattttattttttgagcgagcgtatgttaagttgaaatttttttaatttttaggggttatttttttgggtatttgtaacgacgtttttgtgcgtcggaatgaaatttgtataggggttgtgtgttcggtttttttcgtttttgtatgttaaattagtttttgtaatttatacgtgttaatgaaaatgaaagaagatgtagtcgttgagattttttggtcgtttgttcgttcgtgggtgttttcgtggcgtttttggaaatgcgtttattttgtcggtttggatatggggtgtcgtcgcgttttagttattttttttcgtggtttttttaggttgcgtgtggtttgtcggtttttttagttgttttttattgtagagttatttttattttattttttaaatttcgggggatttattcgaggcggacggggttttttgtattttttttttttggcggggagaaaggttgtagcggggcgatttgtatttttatgaaaatcggattataggggtaatttcgtcgtagggtaggcgcggcgttttagggatggtttttgggttttgtttttcgttgttttcggcgtttggcgttcgcgttttttttttttgcgttcgttttcgtttttttttcgtttttattttttgtcgggttttgatttttgtttaataatagtaacgttatacggattataggggagttttgttgaagttgtaaagttttggagtttttagagggttgtcggcgtagtagtagcgagtagtagagttcgtacgtttcggcgaggggtagaagagcgcgagggagcgcggggtagtagaagcgagagtcgagcgcggatttagttaggatttatagttttttttagttgtttaggaagagttttagttatggaatattagtttttgtgttgcgaagtggaaattattcgtcgcgcgtatttcgatgttaatttttttaacgatcgggtgttgcgggttatgttgaaggcggaggagatttgcgcgttttcggtgtgttattttaaatgtgtgtagaaggaggtgttgtcgtttatgcggaagatcgtcgttatttggatgttggaggtgcggggttgggggcggtttttttaagatttttttgtaatttgttgtttagatttacgtttttttgttatttattttttttttttttttttcgttagaattttgaagtttgtcgtggtgtttttagggattcgtatttttaaaataaaaattgcgggtattttttgaaggaggaaggggtgggggtgggggtgttagaagtagcgtttcgtgggaggggagaagggggttcgggaggggtgttttcgggagaagttagtgttaggggtattttaatgggttcgagggtgcgggttggtaggttgggtgcgttttgtgtttttcgtttgcgttttagttcggttgcgttttagcggtcgggagtcgttaatttcggggggagggggtatagatttgatttttaaattaatatttatggatacgtatgtaagggtcgttcgtgttagtattatgcgttatttttgtttttttattgtaaagtaaaagtgtttattaataattgggggtagggtgggggcggggagcggtcgtcgggcgttggggtcgtagttaagggtcgcgcggttgtcgggagttcgcgggaggggcgtagggacgcggtatgggtagttttggggggacgtcgttagggaagggggggtttttgtttaagtagcgagtttcggggcgtttcgaacgggtagtttgggtcggagagtacggcgagttgtaaggtcgcgtggtttttaagacgttagggtttgattttcgtttgtagggatatcggtttggaggatttttttcgagcgagtcgggggtttgggagtatatttttagattttcggtgggcgtttgaggggttcgtaagtattttaaaataatttttgaaagtgcggcgtggtgtttttgcgagagggaaacgtcgttcgcgtttagggggaagggggggtttcggagtttgaatttttggggtttttttcggagtttgtaacgaatttttaattttcggtttgggtaaagggtcgttcgagggttatttttagggtttttttatgtatttagttatttttttaatatttttaaatattttttgaaaagatgacgtttggggaaatgcggcgcggcggtttgggacgttatttttgtgtttcgtaggcgcggcgtttaatttcgcggttcgtttcgcggtttcgtattttagttggtgtcgatttttagttagagggattacggagttttagggcgggttagggtttcgggggtcggtagttcgcgtcgtcgcgtacgtcgtttagttgtgttcgttttcgtttttatcgtgttagtttcgcggggatttttttttttagtttcggggagggtgggtattggggacgcgcgggggagggggcgtattacgggaagtttttgtcgtttttagtttcgatttttcggcgttttttagatttggcggttttgttaagcgcgatggggggtgcgggggcgtgcgggggggcggcgcgatttggcggcggcggttacgggtttcgtgttttcgtagg

SEQ ID NO: 38 - DNA, 6862 bp, Artificial Sequence
  chemically treated genomic DNA (Homo sapiens)
tttacggaggtacggggttcgtgatcgtcgtcgttaggtcgcgtcgttttttcgtacgttttcgtattttttatcgcgtttggtagggtcgttaggtttggagggcgtcgaggggtcggggttgggggcggtaggagtttttcgtgatgcgttttttttttcgcgcgtttttagtatttatttttttcgaaattgaaagggaaagttttcgcgaggttggtacggtgggggcgggagcgggtatagttgggcggcgtgcgcggcggcgcgggttgtcggttttcgggattttggttcgttttggagtttcgtggtttttttgattgggggtcgatattaattggggtgcggggtcgcggaacgggtcgcggggttgggcgtcgcgtttgcgagatataaaggtggcgttttaggtcgtcgcgtcgtatttttttagacgttatttttttaaaaaatatttaaaaatattaaaaaaataattaagtgtataaaaaaattttgaaaatgattttcgggcgattttttatttaggtcgggggttgggagttcgttataggtttcggggggagttttaggaatttaaatttcggggtttttttttttttttgggcgcgggcggcgtttttttttcgtaagggtattacgtcgtatttttaaaaattattttaaaatatttgcgggttttttaggcgtttatcgaaggtttgaaaatgtgtttttaggttttcggttcgttcggagaaggttttttaagtcgatatttttgtagacggggattaagttttggcgttttgggggttacgcgattttgtagttcgtcgtgtttttcggtttaggttgttcgttcggggcgtttcgggattcgttgtttgaataaaggtttttttttttttagcggcgtttttttaaaattatttatgtcgcgtttttgcgtttttttcgcgggttttcggtagtcgcgcggtttttagttgcggttttagcgttcggcggtcgtttttcgtttttattttgtttttaattattaataaatatttttgttttgtaataaaagagtaaagatggcgtataatattggtacgagcggtttttgtatacgtgtttatggatattaatttaaaaattaaatttatgtttttttttttcggagttggcggttttcggtcgttgaggcgtagtcgggttggggcgtaggcgggggatataaagcgtatttagtttgttagttcgtattttcgggtttattggggtgtttttggtattggtttttttcgaaggtatttttttcggatttttttttttttttttacgaaacgttatttttagtatttttatttttattttttttttttttagaaaatattcgtaatttttattttgaaaatacggatttttagaaatattacggtaaattttaaagttttagcgggagagaagggaggggggtgagtagtaaagaaacgtgggtttgggtaataagttgtagggaagttttaagagagtcgtttttagtttcgtatttttagtatttaggtggcgacgatttttcgtatggacggtagtatttttttttgtatatatttaaagtagtatatcgagggcgcgtaggtttttttcgtttttagtatggttcgtagtattcggtcgttgaggaggttggtatcggggtacgcgcggcggatggtttttatttcgtagtataggagttggtgttttatggttggggttttttttgggtagttggggagggttgtgggttttggttgggttcgcgttcggttttcgtttttgttgtttcgcgttttttcgcgtttttttgtttttcgtcggagcgtgcggattttgttgttcgttgttattgcgtcgatagttttttggaggttttaggattttgtaattttaataaaatttttttgtagttcgtgtgacgttattgttgttaagtaaagattaaagttcggtagagaatgggagcgggaggggggcgggggcgggcgtagggggagggggcgcgggcgttaaacgtcgggagtagcgaggggtagagtttaaaagttatttttgaggcgtcgcgtttgttttgcggcggagttgtttttgtagttcggtttttatagaaatgtaaatcgtttcgttgtagttttttttttcgttagggaagaggggtgtagggggtttcgttcgtttcgagtgggtttttcgggatttagggggtgaggtggaggtggttttgtagtaggggataattaggaaggtcggtaggttatacgtagtttggggagattacgagaaggggtgattggggcgcggcgatattttatatttaagtcggtagaatgggcgtatttttaagaacgttacgagggtatttacgggcggatagacggttaaagaattttagcgattgtatttttttttatttttattaatacgtgtaaattgtaagaattaatttagtatgtaaggacggggaggatcgggtatataatttttgtgtaagttttatttcggcgtataggggcgtcgttgtaaatgtttaagggggtaatttttaaaagttaaagggattttagtttagtatgcgttcgtttaaaaaataaaataaaataaatgttcgaaaattttagtagtagtttaagatggtggttagtattttttttattttgtttttttagtttggagatttttcgggttgtttttttattttgattagtcggtttttgcgggggtttttaattgtatttttttttttttcgtgtcggtaatttaatcgggagaaatatatttttgaatggaaagttgagaaatagtgatttttattttgatttattttttttaattaaaaaagaaattaaattgttggaaatattagttttttttgtttgggataagattatcgaaggtttttaattggttttgttgggggtgtagacgtttttttatttttagaatttgttttgggattgaattcgtgagcgtgagggggttggtaggagtcggtataatttagaataattattaattaaataaacgagtgtattgatttgatttttagtaaaatcgataggtgttcgtggttatatgagagggtttttaatattatcgtaaatttaagtagatgtaaattaaaatatatagtttttaaaattataggttttgtttttttggtgtattaaaaaataaaaggatattttattgttttaatttttgtttttatttttatagtatttgttttaaattaagaaaattgtttatttatttttttttgaatatagtttagtgttattaaattatcgtatttttttaatagtaaaagtttaaagaaaattgatagaaaaagttttttttttttcgttagggtgtttatagtaagatgcgattttttttatttttattttttagggtgaatttttttcgcgttttttttttcgtcgggaattaggattattaatatttcgggttttgggggggtaattattttcggatttcgtatggggagcgatgggttgttttagtagggagtatttacggtcgtgtttttttttatttttcgagtatttataatcgcgttggttttcgtatagttaagttttatagtattagttcgcgtataagggcggtttagttgtttttttatttataaaatttcgattcggcggtcgtttggatgatttatggggttcggagttattattcggttttttttatttcgtggggcgaggggtttcgagtttcgcgtgcgttttggtttagttcgaggcgcgaagcgggtcgaagtcggttaggggtagtagggtataaagaggttcgtttatttcggtataatcggttttgggtttaggagggagttttatttttttatttcgggcgtaagatagaggaaattggaattagtatgagttaatgggggcgcggcgttgttattaggcggatcgggtagatttcgattaggaatttcgttgatttttcggtttagggacgagcgtaaaattgtaagttcggttagcgagcgtaaagagtcgtttaggaattcgcgggggaggcgttggaatttggggttcggcgttggaatttggggttcggcggggagcgttagttgtttagtttttatttgggggaattttgtttggcggttttcgggtttttcgagggggttaatatttttgggtttttgagggttattgttttaagaagcgtagagaaagtattttgattttattttttttaaagagaaaagtaattttaaaaaatttttcggttgtagttttattttatattgtttttttaaaatttattacgaagtaggaattgcggattttgggtttatttaaagtgttttgtttttattttttggtgattatttggagataaagggtaagtggtttagtcgggagggtaattacgttgtttgaaagaaaatttaaaattaattgaaattatttttacgtttttttcgttttttggttttcgtttcggtgatcgcggtttgggcggatggtcggttaggagaaagcgaatttcgttgtaggcgcgtgttcgttatcgtttttggttgtgggaatttttattcgggcgggggaagggagcgcgtttatttaggaatcggcgcgtcgcgacgtagatttcgggatttagcgcggttgcgcgtcgcggggttcggggtttgggttgggggcgggtggtgtagggattagtttcgatttttcgttagcgatttttcgtattcgtttttttattagggcggttggcgggcgggcgtatttaggtggggttatttgtagtcgtatatttggcggcgatttgaaaggatttggtttaggtttcgcgagttttttattgttaagtttttaagtcgttcgggaaaacgttttcgaaagtcggtttttgtgtttcgaaggcgttttagttttttttttttttatattgtttgtttttggggtgcgcgtggcggtttacgtgttatgatagttttgtttcgtttacgtagcgtcgattttaggcgttttaaaattgcgaggtgggtcggggcgaatttcggttttagtgtttattagagatagttatacgttcggtatatggatagtcgtattttttttttatcgttttaatcgtagacgtgcgttttcgttttagattaattagttttagttatatatagattattttgttatcgtttttttcgtgttttagtcgtttgttcggcgggttgcggggaaacgagattttttttttagtttcgaaggttgtcggtaaggtgtgcgttggagttaaaacgtaaatttaataggtaggggggcggttttggttttaacgacgtatttgggatttcgaggttgaaggcgtaatttttgagggttaaaggcgattttaatttttcgattttcgttttttaaaacgtatcggttggtattttgagtaatatgaatttttaaatttattagggattttttggtttttcggttggttttagttttttttagattaagtggtggggagtaggcgtttagatcgagaagaaaattattttcgattataggagagaaagttggttgggggtgatttcggaggttacgttcggttttttttttcgtagttaggtttggtcgcggtttattcgaggttgagtagattttcgcgtcggacggagacgtagggtttcgttgcgggattcgcggggtttaggaaatttgcggcggcggttcgcgggagtcggtttttcggcggaggattcgcgttgaggttttcgtgggtttttacggtatgttttatttcggaatttgtcgcgttttttttcgtttttttcggaagattgcggggaggatttcgtattttcgcgtttttttagttcgttttttaatgtttttggaacgtttgaaagcgtttttatttttcgttttggtatttgggggtgggtggagggatagcggggtcgttattacggggcgttttagagttttggttattcgtatatttaataagtaggggaggggagggaaagggagtttttttttaggtgcggggaaacgggttgcgtatttaatgtttcgcgttttttttttggggtttttggagttcgtgttttaagggttgggggtaggattcggattcggattttttagggaattttgggtttttagggtttgagggattgatgggtcgcgttcggtttttaagttttttttgtgtgtttacgcggggtacgatttgtttagcgagttttgggtggtagggttagggtcggggtgcggttgggagaggtgaggggaggaggcgagagcgcgcgtcgtcggattttgggtcgtggttcgggaatcgcgcgaggtcgcgtcgcgtatttcgcgtattttcgtcgggtttcggttttatcgttacgtggttgttttgcgttcgcgtttatcgtaaggtttagaaaaagcgcgtattacggtttcggagcgtatgcggattttttaggacgtttaattcgagtattagtttagttgtggtgtcgaatatattttttttttgcgggtagataggggttgtttttttacgtaataaggcgggttgtattgttggagcgatagtatgtttatttgtaaagacgggtaggaaggagtgtgttcggttttattggaattcgtaataaggcgattgttcggttgaagaaagtgatagaatcgggtcgtgattattttatttttttagcggtggtaaagtattaaatagtagttgtagtttttcgatggcgtttagtgtattgtggttggaaagttcggagtaagaaggtgtttaataaataggaaaacgtttagaaattgtttatagttatattttatttttttttttttgagggttattttaagataaagaatttagtgta

SEQ ID NO: 39 - DNA, 5032 bp, Artificial Sequence
  chemically treated genomic DNA (Homo sapiens)
  unsure (3903)
tgaagagattgatgtattttatatttttaaagtaaattgaataaatttaagaattattatttgtatattttgttataaaatgggtttggaaaaatattaatgtatgtatttataatatttaggggaggatttgataaagagtaggataatattagttttagtttttaattaaaatgtttgttttatttttttaatagaatttgtatatttatttgatattttttgtaagttttatagtgttgatgtattaaattttttttaagattgagagattttttgtggttgaattttttattttaaaattaattttgggggatgttattgttaatatatattggtaatttaattatttgattattatataaaaagaatttattttggatttaaagttttgtatattttattattaattttggtagaatttatattaatttttatttcgtaattgttatattaggaggtaaatatattagtttgagaaatgtggattttagttgtattttatagtagtatttgtgttatagtatgaattttagtaagtacgttagattattttgttgatttgaggttaatgtaaagatatttgtaaatgtttttgtagtttttataagatagattggaataggtaaaaataagaggattaaaatttttaggttattgaagtaaggttattttttattatagaattttttacgttaatatatattgtttaattattggttttttaagtttattatttgtggtttttttttttttttttttttttttttttgagatggagtttcgttttgttatttaggttggagtgtagaggtgtggtttcggattattgttagttttgttttttgggtagaggattttttgttttagttttttgagtagttgggattataggtgttcgttattatgtttggttaattttttgtatttttagtagagacggggttttattatattagttaggatggttttgattttttgatttcgtgattcgtttgtttaggttttttaaagtgttgggattataggtgtgagttatcgcgttcggttttttttttttttttttgatatggagttttattttgtttgttatttaggttggagagtagtggcgtgatttcggtttattgtaatttttgttttttaggtttaagtaatttttttgttttagtttttcgaatagttggaatttaggtacgtgttattatatttaggtgatttttgtatttttagtagagaaggggttttgttatattggttaggttggtttcgaatttttgacgttaggtgatttattcgtttcggttttttaaagtgttgggattataggtatgagttattgtattcggtttatttttgttttttaataggtggaataagttaaaatttggttttatagtaatttttttaaatgtaaatattaagtaaattttagtggttaatatttaggatgatagtcgggatgggttatttatgaggtgttaaagttatagtattgatttttatttttttagattgatagattagtggataatagttttattgtaggaaattttttgttgttggttggtattaattttatgggataagggtatggtttgtttttgttgttttgttaggattattttcgattttatgttgaatgtgttattgagaaataatagatggaaaggtattgtattaggttgtaagaaattgtatgaatttcgttttttttttttttatattattttgttattttttttagttatttaataattttaaaattttttatattttatgttttattgtttaaagtatatattattttgtttaaattgtattgattataatttatttaatggttttttttagttttaagggagaatgggaaatttaatttttattttagttaaattaggggttttattgttaataaagaaggagaatatagatattaaaggagggatatttttataattttttttattatttaatataattttatttattttataaggtttggtataagtattatttattttgtagtttttttatttgttttttagtttttagatagaaatttaattatttatttttttgaagttttttgtaagtatatgatttgtgtatttgttttggttttattttgaattgtaagttttgaaaataatagatgttgataaggttgtagagaagaggaaatattgatatagttggtgggattgtaaattagtttagtttttgtgaaaagtagtttggagatattttaaagaagtaaaaatagaattattattcgatttaataattttaatattgggtatatatttaaaggaaaataaattgttttattaaaataatatttgtattcgtatgtttattatagtattatatataatagtaaaagtatagaattagtttagatgatcgttaaaagtggattggatttaaaaaatatggtatatatatattatagaatattatatagttataataaagaataaaaatacgttttttgtagttatatggatgtagttggaggtcgttattttaagtaaattaatgtagaaatagaaaattaagtattaggtgtttttatttataagtgagagttaaatattgggtaaagatggatagaaagatgagaataattggttgggggtagttatttatatttgtaattttagtattttgggaggttgaggtgggaggattatttgagtttagtagtttaatattagtttgggtaatatagggagattttattttttaaaaaaaaaaaatttaagatgcgaataatagatattggggattttaaaagcggggaggggggaataggggaaaagtgttgtaaaatgatttattgggtattgtgtttattatttgggtgatgagtttaattaaagtttaaattttagtattataaaatatatttatgtaataaatttgtatatgtattcgatgaagttaaaataaataaatagtaataataaaatataaatggtaagttttgagttgtggatttttatgtatatgtggttttatatgttatttatttttgtatttttttttttttgagacgttttcgttttttaggtagttgggattataggtgcgtattattatgtttagttaatttttgtatttttagtagagacggggttttattatgttgtttaggttggtttcgaattttcgtgatttatttgttttggttttttaaagtgttgagattataggcgtgagttatcgtgtttagttaagaattttagttttgagtaaattaatagtgttgaagaaatagtttttttttggtggtatattttggaaaaatattttataatgttagtgagtgagtaattataggttttgaggaattggttgattattttggggtgtgttattattgttggttatatgagataaaattggcggtggttggaaagagtaatatttaaaatgtttgagaggtatatgtaatttatttaggttttattatgtaaataaaatatgagtaattaggtaagtattttttggttggttaataattattttatagtagttgtatgagttttttgtagtggtatggatgttggtttatagcgatgtttgaaattaaatttatagatgaagattttaaaggattttattttattaataagaagattattttatttttaaagtttatttattaaaattataaaatcgatattaaataaatattttatattgatagtgaagattttgatgtgtttgttttaagtagagaaattattgaaaaaaaaaaaaaaaaaaaaaaagagataaggttttaggtcgggcgcggtggtttacgtttgtaattttaattttaggaggttaaagcgggtagatcgtttgaggttaggagtttaagattagtttggttaatattgtaaaattttntttttattaataatataaaaattagttgggcgtggtggtgtatgtttgtagttttagttatttaggaggttgaggtaggagaatcgtttaagtttaggaggaagagtttgtagtgagatgagtttattatatgtgtttatagcgtggatgaaggattaaagattggtttcgagtatataagaagataagatttggttttggtttttcgcgtttcgtttttgttaggaattttcgtaggggatcgggaagcggttggttatggagaggcgttttttattttaggggtttttttattttatttttatttggggagttatttcgtgggagagaggatgggaggtcgggttttttttatggggagaaaagtttttagttagtttagttttttttttttttagtttttttttttgtttttttttacgtttttcgttttttatttggagttggggtttcggcgttttttcgagcggcggtagggcggtagggtcgggaaggagggaaaggagattggaggtcgtgatattagttttggttttttcgttttttgttttttcgttatcgtcgttttttaaattggcgcggaatcggtttttttatagtatttcgtttttataatttttttttttcgttggtttaggagggaggcgggacgtggtgggcgttgtttaagttttattttcggtgtacgggggagagggtggaggatttagaaaaattcgtttgaggaagatgtgtttttttgcgcgtttaaggtgttaggagtgtttggtaaatttttggatattcgcgttttagttgtatatttagttgaggaaatgtaggtttgtatttaaaatgaattattatgagttagttaatatagtatagaagatggtagggttatagggtttaggttttttcggagggattgagtttttatttgcgaattagcgttttattggtatttggagaatgtgaatgataatgtatttgattgcggtttttttttttttttttttagaggttttatatatttgaaagaagagaatgttaagacgaaggtaatattatttgttttagagatatgttttaaattagttgttgtttttaatttattaattatattttttttttaaaaatttattatagt

SEQ ID NO: 40 - DNA, 5032 bp, Artificial Sequence
  chemically treated genomic DNA (Homo sapiens)
  unsure (1130)
attgtagtgaatttttaaaaaggaagtgtaattagtaagttaaaggtagtaattaatttgaaatatgtttttaagatagataatgttattttcgttttgatattttttttttttaggtgtataaaatttttgaaggggggagaggaaaagtcgtagttaagtatattgttatttatattttttaagtgttagtaagacgttgattcgtaggtgaaagtttagttttttcgaaggggtttgggttttgtgattttgttattttttgtgttatgttagttagtttatggtaatttattttggatataagtttgtatttttttaattgaatgtatagttggaacgcgagtgtttaaaaatttattaagtatttttgatattttgaacgcgtagggaggtatattttttttaaacgggtttttttgggttttttattttttttttcgtatatcgggagtggggtttgggtagcgtttattacgtttcgttttttttttggattagcggggagagggggttgtggaggcgaaatgttgtggagaagtcggtttcgcgttaatttggagagcggcggtggcggggaagtagggggcggaggaattaagattggtgttacggtttttagttttttttttttttttttcggttttgtcgttttatcgtcgttcggaggggcgtcgggattttaattttagatgggaagcggagggcgtgggggagggtaggaaaaggagttaaagaaaggggagattgggttggttgggaatttttttttttatggaggggattcggttttttatttttttttttacgggatagttttttaaatgagggtgggatagagaagtttttagaatgaggggcgtttttttatgattagtcgtttttcggttttttgcgaaggtttttgatagggacggaacgcggggaattaaagttagattttgtttttttgtgtgttcgagattaatttttaattttttatttacgttgtaggtatatgtggtgaatttattttattataggtttttttttttgagtttaagcgatttttttgttttagttttttgagtagttgagattataggtatgtattattacgtttagttaatttttgtattgttaatagaganggggttttgtaatattggttaggttggttttgaatttttaattttaagcgatttgttcgttttggttttttagagttgggattataggcgtgagttatcgcgttcggtttgagattttattttttttttttttttttttttttttttagtggtttttttgtttaagataggtatattagggtttttattgttaatgtggaatatttatttgatgtcggttttatagttttagtggataaattttgggaataaggtagtttttttattagtgaaataaaattttttgaagtttttatttgtagatttggttttaaatatcgttgtaagttagtatttatgttattgtagggaatttatgtagttgttatggagtagttattgattagttagaaagtatttatttggttatttatgttttgtttgtatagtaaggtttgggtgagttatatgtattttttaaatattttagatgttgttttttttagttatcgttagttttattttatgtggttaataatagtggtatattttagaatagttagttagttttttaaagtttatggttgtttatttattagtattgtgaaatgtttttttagaatatgttattaggaaagagttgtttttttagtattgttgatttgtttaagattaaggtttttggttgggtacggtggtttacgtttataattttagtattttgggaggttaaggtaggtggattacgggagttcgagattagtttggataatatggtgaaatttcgtttttattaaaaatataaaaattagttgggtatggtgatgcgtatttgtaattttagttatttgggaggcggaggcgttttaaaaaaaaaaaaatataaaagtgagtaatatgtggaattatatatatatagaggtttataatttagagtttattatttatgttttattattgttatttatttattttagttttatcgggtatatgtgtaggtttgttatatggatatattttgtgatgttgaggtttgggttttgattgaatttattatttaaatagtgaatatagtatttaataggttattttgtaatattttttttttattttttttttttcgtttttggagtttttagtgtttgttgttcgtattttaaattttttttttttaagagatggggtttttttgtgttgtttaggttagtattgaattgttgagtttaagtgatttttttattttagttttttaaagtgttgggattatagatgtaagtgattgtttttagttaattgtttttatttttttgtttatttttatttagtatttagtttttatttatgagtgagaatatttgatatttggttttttgtttttgtattaatttatttagaatgacggtttttagttgtatttatgtggttgtaaagaacgtatttttgttttttgttatggttgtgtagtgttttgtggtatatgtgtattatgttttttaaatttagtttatttttgacggttatttagattgattttatatttttgttgttgtgtatagtgttgtgatgaatatgcgagtgtaggtgttgttttggtagaataatttatttttttttgggtgtatatttagtattgggattgttgggtcgaatggtaattttgtttttatttttttgaaatatttttaaattgttttttataggggttgaattaatttataattttattaattgtgttagtgtttttttttttttgtagttttgttagtatttgttatttttagggtttataatttagaatgagattagaataggtatatagattatatatttataaggggttttagagaaatgagtggttaagtttttgtttaggaattggggaataaataggaggattatagaataagtgatatttgtattagattttgtaggataggtggaattgtattgggtggtgggagagattgtgaggatattttttttttgatatttgtgttttttttttttgttagtaatagaatttttaatttagttgaaataaaaattaaattttttatttttttttgaagttaggagaggttattgaatgagttatggttagtgtaatttaagtaaaatggtgtgtattttaggtagtgaggtataaagtgtgaggagttttaaggttgttgggtagttgggggaagtagtaagatagtgtagaaaagaaaaaaacgaagtttatgtaattttttatagtttgatgtaatatttttttatttgttgttttttagtagtatatttaatatggaatcggaggtggttttgataaaataatagaggtaagttatgtttttgttttatgggattagtgttagttagtaataagaaattttttgtaataggattattgtttattagtttattagtttgaaggggtaaaggttagtgttgtggttttaatattttataaatgatttatttcggttgttattttaagtgttagttattaaagtttatttagtatttatatttaaaggaattattataaagttaaattttagtttattttatttattaaaaaataaaaatgggtcgggtgtagtggtttatgtttataattttaatattttgggaggtcgaggcgggtggattatttgacgttaggagttcgagattagtttggttaatatggtaaaattttttttttattaaaaatataaaaattatttgggtgtggtggtacgtgtttaaattttagttattcgggaggttgaagtaggagaattgtttgaatttgggaggtagaggttgtagtgagtcgagattacgttattgttttttagtttgggtgatagatagagtgagattttatattaaaaaaaaaaaaaaaaggtcgggcgcggtggtttatatttgtaattttagtattttgggaggtttaggtaggcgaattacgaggttaggagattaagattattttggttaatatggtgaaatttcgtttttattaaaaatataaaaaattagttaggtatggtggcgggtatttgtagttttagttatttaggaggttaaagtagagaattttttatttaggaggtagagttggtagtgattcgagattatatttttgtattttagtttgggtgatagagcgagattttattttaaaaaaaaaaaaaaaaagaaagaaaaaagttataaataataaatttggaagattaatggttaaatagtgtatgttaacgtagaaggttttataataaaaagtaattttattttaataatttaaggattttagtttttttgtttttatttattttagtttgttttgtgagagttatagaggtatttataaatatttttgtattaattttaaattagtaaggtagtttaacgtatttattggaatttatattataatataagtattgttgtggaatataattagaatttatattttttagattagtatatttattttttaatataataattgcgaaatagaaattaatgtaagttttgttaaagttgatagtgagatatataaaattttgggtttaaaatgaattttttttgtgtaatgattaggtggttgaattattaatgtgtattggtaatggtattttttaaaattggttttaaaatagaaaatttaattataaagaattttttagttttagaaaaaatttagtgtattaatattatagagtttatagaaaatgttaaataaatgtataaattttattaaaaaaatagggtaaatattttagttggaagttaaaattaatgttattttgttttttgttaaatttttttttaaatgttatgaatatatgtattagtgtttttttaagtttattttataataagatgtataagtgataatttttaagtttatttagtttgttttaagaatataaaatatattaattttttta

SEQ ID NO: 41 - DNA, 6509 bp, Artificial Sequence
  chemically treated genomic DNA (Homo sapiens)
ttataaataatttttagattaaagtaatgtaattttgattattttattcgttaattgaaaaattttgatatttaaagtttttttattttttaattaattaagttattttattttttagtttttagatatattttgtatattgtgtttttttgtttttatttaagtaaattttatttattaatagtgttttttttattagtattaatataaatttataaaaatgttgtattttttaattagtttatgttatgtgttaatgaagtaataattaataatttaaaatattttatggaagttagttagtttgttatatttttatatgtattaattaatttaatttttataattattttatgaggtagttataattattttttttattatgtaagagatgaaatttagggtaagataggttgaagtgatttttttaaaaatgttttattaatgatattttattaatgaagaatggtgagatagatttttttaaagttagttatggagataggtttcgggattattgtagtaaggttttgtagtgggggagtgagattggatttaattttaattttaataaggataagtgggaatttataattaagaagtaggttggggagtaatggatggaaaattattaagaggaaatattaaggataaaggatttttggttaaattgatttgataggattattgttgaaggtaggttagggtgataagatattgagggtggtttgatattaagggtgggggatatttattaatgtgacgtgttaggatttttgttttaattggattttatagatggtttttaatttataatgatttgattttatgatggtgcgaaagtcgtatgtatttaatggaaatatttttagttttgaattttgattttttttcgggcgagtgatttataatataaattcgtttttgatgttgggtagtggtagtgagtcgtagtttttagttaattatgcggttataaggattatgtttaaggtaggttaggttaagttatgatgtttaataggttagttatattaagtgtattttttatttggaatatttttaatttatgatgggttttttgtttttttttttttgtatcgtaattttattttaagtcgagaagtatttgtattagaatagagaggaaagtttaagattaggtttagttaagtagaggatttagagaaaagtttgattaaagttttggttaaaggagagagtgtgtgttagttttatttaaggttattgttattgagaggggattgtattcgtatatgttataattttattatagtttaaggattttgggataagaattatgagatagttatttttgtgattttattatcgtattattattatttaataattagtattaggttttgtgtatagtgatttattaatttttgttgaattgaagatggttttataggattttttttttagtatgttgttatgttttttttatgttttaatttgaaatagttttaaagtaaaataaaaaatattttaattttgagggggttatatatagattaacgatattttttaaatgttattttttttttttatttttttttttttagtagtattttattttttagaaattaggtatttgttttaggcgattttttttttttttttagttgtaatttgatatttgagaataaaattaagaaaggattttgtagttaatgttgtaaatataaatttgttaattgtgtattaattaaatataattgtaaagggttattaaatatttattgtaaagttgtattttaaatgttacgaatttatgttagtagttgaaggtatatagttttatgttagattttaaagtaagaaagatattgtgtgtttttgtgagtatagatgtggtttggttttttttattttttttgtgtgtgtgtgtgtgtgtgtgagtggttttgtaattagaaatggtgtgaacgtgagtatgttgatgtgtttgggaaatgaggattataaattaatttggttattttataagatgttttatattagattgtaaaattattttagttgtaaatatatttattggttatttttataattttttaattttttttttttttttttttttttaagattaggtaatatgatttttttatttttatttttttttaaatattaagattattaggtagatcgtaaagaaggaagattgttttgaagtaagagaaaggaaattttaatatttttatgggaaattttggaatagtacgtggataagtataggatatttttgtggtggttaaatagatgatatttgtttggtattatttaatttttgattggtaatttttagtttataggtaatgtttgtaagttaaaatatttggaatttgtttataagtatatattatagtataatttaataattgtagtataataaaagagattgtatttatttttaaaagttattgaaatattttttaatattttatttttgagtagtgtttaatgaaatagtgatatttttgttaataagttgtgaatttttttatgttttttaggaagaataggttttgtttggttagttggtttgtttttgtttgaaatatttttatttagtagtagggatattgtgatttaaaattaatggagttgggaggtttaggtaggcggattatttgaggttataagttttagattagtttggttaatatggtgaaattttatttttattaaaaatataaaaattagttgggtatggtggtatgagtttgtagttttagttatttaggaggttgaggttggagaatggttttaatttaggaggcggaggttgtagtgagcgaagattgtgttattgtattttagtttgggtgatagagtaagattttgttttaaaaaagaagaagaagaagaagaaaaaaatttaatggaggtgtgggtggagggtagaagggaattggttatgtattgataatttttgaaatatgtttttttgtattttttatatttgaaattttttataaataaataagtaaaaataatagaagtgaagagaaatatttgttattttttagttgaaattagaaatggaaataggtaaaggtataagttttgtattttagtgtgttttttgtggtagtaatagtaaagaaatattgtcgtataataggttgagtaggagattgttatagtatttagtttgtttattttagtaagaaaaattatatatgagttttaatgttagggtattagtaataattgtattttttagatagttaatttagatagagtttaatttttattatatttgaaaaataagattaatgttaatttttatggattaaaatttgtttaaggtttaaaaaaaattatattagtaatgttaggttttttatatattttttttaaatgatatttagaaattttatttatatttttgtggaaattatagtttgttaatttttttaaatgtttatttttattattttttatataaaattaaggagttgttaaatattttttagaaaaataaaatgaaaagaatttatatgatatatataatagttatgaggttaagattttatatagatatttaattatttagattatttatttttttattttttgtattattatgttttttttttttaaattattttttttttaatatgtaatattttaggttgtttataatttattgtaattaatttgttatgttttttgattttttttttttttttttttttttagttaatttatgagattaggttagttatatatgttgagtgtgtggttttttaaaattatatattataaatggtataagtttgaggaatttagataattgtggtaaattttaattttagttgtatttaataaaaatgaaaaagaaaaggtttttttttttttaagtttttaaaaatattttaatagaaagtagagttaaagttattttgttattttttttttttatttgtgtgggttttttaagatttaaattttttaggttttattatttttttttttttttttatttatttatttattttttagaaaagttatttgttatagggaaatttatttttcggattggatatataataaatatatgagagaataaggtatgtttaaatgggataaattagaatttatgtaaattttgaattttatttgtaattttgaaagttttattaatttaaaaaatagtaaatattttaatttttatgatagtttattgtaaggttttttagaggtaatgaaaatgggaattttaataaaacgaatattattatatattttggttttagagatgaaaatagagggagaggattggttagttattaatagaagggtaaggaaaaaaagtatagagaaagaatagataaggtaataaaagtggtagaattgtaagggttaatacgtatttattgttttaagttttttagttatgttttatttttcgagatttttggtagtgttttaagaatattggtttttaaattttttttgaaaagggttaggaatgtttttgtttgaagattttatttattttttttgggtttcgtgatttttttatatgattgattaatttattattttaatttttttaagtttttttataaatgttaattttagtgaggtttttatttaaaaatgagtattttacgaaattttttttttatttttgattattttttgtgaatttatatttgtttatttcgtatttttagtttatgttttttgaatatttttgtcgggcgttttttttttaaattttgtttggaaggggcggagttatgttttagatttatcgagaggagcgttttttaggtttcgtttatttacgttttagtgggcgttttaacgaattcgggatacggtttgtttttagttcgtttcggaaatgtaattgcgtacgggttggtcgcgtaatcgtgacgatagcgcgttagcgtcggttagtcggacgttttaggttttcgcgagattttcggtgggggtacgggtgttttacgttaggacgttgatgcgtttgggttttcgtttgtagattttttggatttggttacgattttataatgtattataatagtagttagaagcggtattggattttttttagcgaggagtagttggtaagattgcgggttgacgttaatcgtaaatttagatgtaaagtcgtggttaacgggaaggtgaggtttttttaacggttgtttagttgttcggttattaaattttgagtagttgcgggagtttttttggtttttaggataatttcgtttcgtcgtttttttgtttttgcggcgcggagtgcgtttttttattaaaataagcgagtattttgttaggtttcgtgggtataaagacgaataacgttattttcgtcgtcgaatggtagataagtaattagtttttgtaacgtagtgaagaagagagtaagtagtgtgttaaggtagtgcgtggtaagagtcgtttatttgttaagagatgatgttggggaaggttttttttagtagttaatgcggagaaaatgggaaaggaagttttaggtagttagaattatcgtttagagtgggagggaggttagaagttatagagatggtgcgtggacgtgtttgtggtcgtatgtggtcgaagttgagtatttgtgtaggaatggttggggagggtaggaagggaatttgtaagtggaagtgaggcgtttaatatttttattgaaaggatgaggaatttttgaaatatttaaaatgggaagttaattttattagattttcgttttggaaatagcgttttagtaatttcgtggtgaatgggttggatgagggagggagattagagattaagtataaattaagtgattgaagatggtttggattatggttcgttagttaagttttttttgttatagttttcggattggtttaattttttttgtaagttttattttagtaagtgtttagtgtttttaaattatcgatattgagttattttattttttatttttaatttatatttattttatattattgattttagtatttgaattagttttttaagggttgttttaaaaaaattattataaattgggtagtttaaaataatagaaatttattgaaatatttgttgtttttttataatttgtgacgtaatgattgatcgagaaacggatgttggaagttttttaattatattttaaaaagtttgtttattttttaatttataaataatgatattataattgtgagtatgtgtatatagtttgttatgattgtttatattttaatgaagtaaaggtttagttgatatttcgaaaagtcgtgaaatgatggtatagttttagtttattaaatatttttttatagttattttgtgtaatgattagcgaatttataaagaaaatgaggcgtgatatatatttttcgttggatatataaattaaatttaatttagatagagaaaaatgttttataattgtttaatttattgaatttattgaatttgtgttgtaattgttgatttaaagg

SEQ ID NO: 42 - DNA, 6509 bp, Artificial Sequence
  chemically treated genomic DNA (Homo sapiens)
tttttagattaataattataatataagtttaatgaatttaatgaattaaataattgtaaaatatttttttttatttagattaaatttagtttatatatttaacgaagggtatatattacgttttattttttttatagattcgttaattattatataaaatagttgtaggaaaatatttaataaattaaaattgtattattattttacgatttttcggaatgttagttagatttttgttttattaaagtataaataattatgataggttgtgtgtatatgtttatagttgtgatattattatttataaattaaaaagtagatagattttttaaaatatgattggaaagtttttaatattcgtttttcggttagttattacgttataagttgtaaaaaaatagtaaatgttttaataaatttttgttattttaagttatttagtttgtggtgatttttttaaggtagtttttaggaaattaatttaggtgttaaaattagtgatatgaaatagatgtgaattaaaggtagaaagtaaagtaatttagtatcggtaatttggaggtattgaatatttgttggagtggagtttgtaggaaagattaaattagttcgagagttgtaatagaaggaatttggttagcgggttatagtttaaattatttttagttatttggtttgtatttggtttttggttttttttttttatttaatttatttattacgaggttgttagagcgttgtttttagaacggaaatttgataaggttagttttttattttaaatattttaaaggttttttatttttttagtggaaatgttaaacgttttatttttatttataagttttttttttattttttttagttatttttgtataggtatttaatttcggttatatacgattataaatacgtttacgtattatttttgtaatttttgattttttttttattttgaacggtggttttgattgtttggaatttttttttttatttttttcgtattggttattgggaaaaattttttttaatattattttttgataagtgaacggtttttgttacgtattattttagtatattatttatttttttttttattacgttataaagattggttatttgtttgttattcgacgacggggatggcgttgttcgtttttgtatttacggaatttggtaaggtgttcgtttattttgatagaaaaacgtatttcgcgtcgtagaggtagagaaacgacggagcgagattgttttgggagttagaagagttttcgtagttgtttagaatttagtgatcgggtaattgggtaatcgttgggaaaattttattttttcgttggttacggttttgtatttgaatttgcggttggcgttagttcgtagttttgttagttgtttttcgttggagaaggtttagtgtcgtttttgattattgttgtggtatattatggaatcgtgattaggtttagagggtttgtagacgagaatttaaacgtattagcgttttggcgtaaaatattcgtatttttatcgaagatttcgcggaagtttagggcgttcggttagtcggcgttggcgcgttgtcgttacgattacgcggttagttcgtacgtagttgtattttcggagcggattaggaatagatcgtatttcgggttcgttagggcgtttattgagacgtaagtgggcggagtttagagaacgtttttttcggtgagtttgggatatagtttcgttttttttaggtaagatttaaaggagaagcgttcggtaagagtgtttaaggggtataaattgagggtacggagtaggtagatgtaaatttataggggataattagaaatgaggaaaggatttcgtagggtgtttatttttaaatagaggttttattgaagttgatatttgtgaaaaggtttgaaagagttgaaatagtaggttgattaattatgtagggagattacggggtttagaaagaataggtaagatttttaggtagaagtatttttagttttttttaggaagagtttggagattagtatttttgaagtattattagaaatttcggagaatggaatatggttgaaaaatttgaagtagtggatgcgtattggtttttatagttttgttatttttgttgttttgtttgttttttttttgtgttttttttttttatttttttgttgataattagttaattttttttttttgtttttatttttgaagttaggatgtatggtagtattcgttttattgagatttttatttttattgtttttagggagttttatagtaagttattatgaaaattaaggtatttattattttttaaattaataggatttttaaaattgtaggtgaggtttaaaatttatatggattttggtttgttttatttaggtatattttatttttttatgtatttattatatatttaattcgaaaaatggatttttttatggtaaatagtttttttaaaaaataaataaataaataaaaagaaagagaaagatgatgagatttagagaatttaggttttgaaaagtttatataggtaaaaagaagaagtggtaggatgattttaattttgttttttattaaaatgtttttaggggtttaagaaagggaaagtttttttttttttatttttgttgggtatagttgaggttagagtttgttatagttatttgaattttttaaatttatgttatttgtggtatataattttggagagttatatatttaatatatgtggttaatttggttttataaattggttaagaaaagagagaaaaagagaagattaaagggtatggtaaattgattataatgaattgtgaataatttaaaatgttgtatgttggggaaagaataatttaaaagagaaaaatataatggtataaaagataggaaaataagtgatttagataattaaatgtttatataaagttttagttttatgattgttatatatattatataaattttttttattttgtttttttgaaagatatttgataattttttagttttatgtaaaggataataaaaataggtatttaaaagagttggtagattgtgatttttatagagatatgagtaaaatttttgaatgttatttaggaaaaatatatgaaaaatttggtattgttggtgtaattttttttaaattttgaataaattttagtttatgaaaattgatattgattttattttttagatgtagtaggaattgggttttgtttaaattaattgtttgaggaatataattgttgttgatgttttaatattaaggtttatgtatggttttttttattaaggtaagtagattggatgttgtgatagttttttatttagtttgttgtgcgatagtgtttttttgttattgttattataggaggtatattggaatgtagaatttgtgtttttatttatttttatttttagttttaattaaaaagtagtaagtgtttttttttatttttattatttttatttatttatttatggagaattttaaatataaagaatatagagaaatatattttaaaaattattaatatatggttagtttttttttattttttatttatatttttattaggtttttttttttttttttttttttttttttgagataaagttttgttttgttatttagattggagtgtagtggtataattttcgtttattgtaattttcgttttttgggttaaagttattttttagttttagttttttgagtagttgggattataggtttatgttattatgtttagttaatttttgtatttttagtagagatggggttttattatgttggttaggttggtttagaatttgtggttttaagtgattcgtttgtttgggttttttaattttattagttttaaattataatgtttttgttattaaatgaagatattttaaataagaataaattaattaattagatagaatttattttttttagaagatatagggaaatttatagtttgttgataaagatattattattttattagatattatttagaagtgaaatgttaagaaatattttaatgatttttaaaagtaaatataattttttttattgtgttgtagttgttaaattgtgttatggtatgtatttgtagataaattttaaatattttgatttgtaggtattatttgtaaattaagggttattaattagagattaggtgatgttaagtaggtgttatttgtttggttattatagaaatgttttgtatttatttacgtgttattttaaaattttttataagagtattaggatttttttttttttgttttaggatagttttttttttttgcggtttatttagtgattttaatgtttagggaaaaataaaagtaaaaaggttatattgtttgattttaggagaaaaggaagaaaaggggaattaaaaggttgtgggagtgattagtaaatatgtttgtaattgaaataattttgtagtttaatataaaatattttataaagtggttagattaatttgtagtttttattttttaaatatattagtatatttacgtttatattatttttgattgtagggttatttatatatatatatatatatataaaagggatagaagagattaaattatatttatgtttataaaaatatataatattttttttattttaaaatttaatataaaattgtatgtttttagttattgatatggattcgtgatatttaaaatatagttttataatgagtatttaataattttttgtaattgtatttggttaatatataattaataaatttgtatttgtagtattggttgtaaaatttttttttagttttatttttagatgttaagttataattaagagaagaaaaggagtcgtttgaagtaagtatttggtttttagaaaatagaatattattaaaggaaaagaaataagaagaagaaatagtatttaaaaaatatcgttgatttatatgtgatttttttaaaattgaaatgttttttattttgttttaagattattttaaattaaggtataaagaagatatgataatatattaaagagaaaattttataaagttatttttaatttagtaaaaattagtaaattattatatataaggtttagtattaattgttaggtggtagtgatacggtgatggggttataaaaatgattattttatagtttttgttttaggatttttggattatagtagaattatggtatgtacgaatataatttttttttaatgatagtaattttggatagggttgatatatatttttttttttgattaaaattttaattaggtttttttttgagttttttgtttgattaagtttgattttgggtttttttttttattttagtatagatgtttttcgatttaggatgaagttacgatgtaaaaaaaaaaaaataaaaaatttattataagttgaaaatattttaagtggaaagtgtatttaatatagttaatttattgaatattatggtttggtttagtttattttaaatatggtttttgtgatcgtatggttgattgagagttgcggtttattgttattgtttagtattaggagcgggtttgtattgtaaattattcgttcgggaaaagattaaaatttaaaattggaagtgtttttattgaatatatacggttttcgtattattataaaattaaattattgtaagttggagattatttgtagaatttagttggaataagaattttgatacgttatattaatgaatattttttatttttggtattagattatttttaatattttattattttgatttgtttttagtaataattttattaggttagtttagttagaaattttttatttttggtgtttttttttagtaattttttatttattgttttttaatttgttttttggttataaatttttatttgtttttattggagttagaattgagtttaattttatttttttattgtaagattttattgtagtggtttcgaaatttgtttttatagttgattttgaaaaggtttgttttattattttttattaataaagtgttattaataaagtatttttgagaaagttattttaatttattttgttttaagttttattttttgtatagtgaagaaaatagttgtagttattttataaggtggttgtgaggattaaattagttaatatatgtgaagatatagtagattggttggtttttataaaatgttttaaattgttaattattattttattgatatatggtataggttaattggaagatataatatttttgtgaatttgtattgatgttgatggagagggtattgttggtggataggatttgtttgagtaaaggtaaaagggtataatgtgtagggtgtgtttaaagattaggaagtagaatagtttgattgattggagaataagagggttttgaatgttaaaattttttaattggcgaatgaaatgattagagttgtattattttaatttggaaattatttgtga

SEQ ID NO: 43 - DNA, 5891 bp, Artificial Sequence
  chemically treated genomic DNA (Homo sapiens)
gttttttaaaaataggtaaaataaattgatggaaatagaggttagaatagttatttttgggaggatagttattaggaaagaacgaagagagtttttggaatgttggtattgtttttttttttaattgaatagtgttaatataggtgtgtttattttgtgaaaaataattagttatatatttataattagtttatttttttttttgtatgttataatttaaattatagtgttgtaatttatgaaagtagtatttatatataagtaagtattttttggttatcgagggattgatgaagataaggagtttttttggttttttatttagttttatttgattttttttttaattttttattgtatgaaagaatagtgtaatgataatttatttatttgtggatatatgttcgttttttgttatgtttattgtgtggttgtgttttagttgaattatttgaaagtaggttgtagatattatgatattttatttaaaatattttagtttttatttgttaagaataaagttatttttttgtgtaattataatattattattatttttaaagaaaattaattgatagtaattttttttttaatattttttaatatataatttatatttaaatttttttaaattgtttgaaattttttttttttaaaaaaaaaaaaaaagtaggatttaattaaggtttatatattgtattttgttgtagttttttttagtttttttaaatttaagatagttttttaaaatgtttttttataatattgttttgaagagatcgggttagttgttgagtagagtgttttattttttggatgtgattgatagtttttatgttgtgttttttttatttatttttgtattattagtatttattgtaaattggaagttcggttaaaagtttgtttaaatttaggttaagtttttgggggataagaatattatataggtaggtgatatttattttatattgtattatattagaagttatgtaatgttaggtttttattttattagtgatgttaagtgtgattattttgttaaggattaattgtattttttttatagtagttaatatttatgttagtaaagtcgtatttattattagtagtattttattattagtagttattagtgttagtaaagtattattttttatatgtattaatattatggatatttggattgtatgtttattattttatgattaattatagttatttttttttttgttatttaaattattttggattagtttagtgggtatttattatggtggtttttatgttttttttttttttttttttagtaaattatttttttagtagttttatgttttttgataagttttgattagtttgagtatattttaggtaggttttaattttagattggaaagaaatttgtttttttttagagggtattggtattgaaaaagttaagattttagaattaggagtgttatttttttttggtatttgaaaaggatagaaatgggatatatatatatatatttttttttaattatgatttattttgatatttttagttaaagtttaatattatagatttgttttttaatatttggttttttgtatgtgtgtatttgttttttttgtattgaaaattttggtttttaataatattagtatttatatatttgttttattttataatatgtaaaaaaaaatgtgtttgaaaattataatattaatgatattattaatagtatattaatgaagttttaaaatttcgttggggttagttattgtggtttatatttataattttagtattttgggaggttaggcgggaggatcgtttgaggttaggagttcgatgttgtagtgaattaggattatgttattgtatttatagtttgggtgatagaataagattttgattttaaaataagtaagtaagtaaataaataaataaataaataattttttttagttatttttgtttttagaatatattttattaagtatgtaataatattagaaattatttggaagtaagtttttgtgtgattttgttgtttatttggtttgagttttaggatttgtttttttatttttagttaagtgtatgagtatgttaaatatttatatgatttaaatattaaagttataaaagtattttgtagggagttaagttgaaagagtatttaatggttatattggaataatttgagtaataaaataaataatgatagtattggattataatttaaagaataaaatatttatgtttgtattaaagtaaataaataaatgggagagaagaaataaatattaataaaatgattttaaataataaatgttgaagtagtgaaggaaatagaaagttattattagaatattatagttgtaatcgttttaggtgaatgttaaaattagtagatgaaatttgaaggagaaatagatatttgtatagtattttgtattgtaaaatattttttttaaaatatttatttattagtgggtggttttaatatatgtttataatttttttgatatttttgtttttagaaagtagagtttaatttttttatttttgagtgtgggttggatttcgtgatttgtatttaaggaatagaagataggaagggaaaaataataatttatagtgagaaatttggtagattttattttaattaagagtttatggttaatagtagtaagttgttttgatattatttgtatttaaatatgatgtgtagttaatagtggttatattaaagttaatttttttttttggataaatgaattatggttatggaagatgtttatattggggaagttaagtgaagggtatagataaaatttatttatttttatagtttttttgtaaacgtataattagtttaaaataaaagtttttataaaaaggtaaagttgtataaaaagatatatatatagagaagttttgtttttatttttgttttttttattttgtttttttttattttttattggtaaatattttttgaattattttaaaaaaatagagatgtttggttgggcgcggtggtttatatttgtaattttagtattttgggaggtcgaggtaggcggattacgaggttaggagttttagattatttcggttaatacggcgaaattttatttttattaaaaatataaaaaaattagttaggcgtggtggcgggcgtttgtagttttagttattcgggaggttgaggtaggagaatggcgtaaatttaggaggtggagtttgtagtgagtcgagattatgttattggtattttagtttgggtaatagagtaagatttcgttttaaaaaaaaaaaaaaaaagagatgtttgtttttttttttttttttttatatagatgttaatatattgtgtatattattttatattttgttgatttggaaatttttttatttagtatttaacgatgttttttattttttttaatagttgtggggtatgttattgtgtgtatgtgttatattttatttagttagttttttgatgatgggcgtttgggttgtttatagttttgttattataaataatattatagtgaataattttgtgtatatgttgttttatagttgtgatattttatagttaggataatatttttagagtcgatttttagtagtgggaattttgggttaaagagtaaatgtatgtgtaattttgttggatatcgttaatttttttgtgatagttggattattttgtatttttattagaagtttataagattatttgtttttttatagttttgttaatagagtaaattgttaaattttgggatttttgttaatttagtaggtgagaattgtattttagtgtgatgtttgattatgaataggttatattttttgaggttttaattaattggtttttttcgttttttgaatagtgtttaatttaattagttatatataaaaatgtaaattattagtttaagtttttttttaggtatttaatttttttttttggagggaagattagattttttttagagttattaggtgtaaggaggagaatatttagttttattatgttattttttttattagaaatgaggtagatatatagaaaaggttaggtttttagatgaattggtgggagttttggtttagaatttggttatagagttgttgtttttttgttaattagattaatttggttttagttagtttttttagaatttttttgatattttatttgaaagtatttgttgtttttgatttaggttataaatgatttatttttaatagtggtttttagatgagatttttcgttgttgttgttttttttttttttttttttttttagtatggagtttttggagagtgtttttattttgagtgaaagaaaaggaagaggatgaaaaagtaagaatagtttaaaggagtttttttttttatggattatttttatttatttattttttaaattataagatgtatatttggtttatattagtgaatttagtgatttgtgtagatgtgaattaatttaattttatgatttgtttaagtgaaagtgtttatatggaataaattgaaaaggggtgttggatggaagagatggttagttttagaatataaatttttgttaagattaagataggtttaggttttgttgaagaatggaatttggattagcgttagaggatttgtatgtttagtgaagaaaaattagaagaaagtgagatatatttcgttttttttaaaattttgttaaataaggttaattttttaattttaagagagagggaggaaatagttttatttttaaattattatgaaatttgagatttattaatattagtattggggttattttatagtattgtgttaaattggttttggagttagttcgggtttgtaattggtaattgatagtgtggtttttataggaaatagtgattttaaattaggtataatttatgattttagattgtttatagtatggagtatttttttttaattttgttttttttttttttataggattttaatatttttagagaattttttggaaagaataagtttattttaataaatgaaggagaataaagaaaatttaagttttttagtaattttagtaaatttggattatataaagttatgttggtattgggataagaaagatttggtttatatatttttataatttgaaggatttgatttagttatcgaggttcggtatcgtcgagagggcgttcggtttatttttgatgtgggtatacgtttggggttgtattttgattttttttggaatttgttatagataggttttttatttattattaagaaataattagattttgtagataaaatatatagtaatttttttgtattagagtagtttttaaatatttgtttgaatgttgtttttggtgggggtttttttttttttgatttgttattttaaaggtgtagatttagttattgaggaggtggttagttaggaggatatgaggtatttattaggattatagttgaggttgggtatagtggtttatgtttgtaattttagtattttgggaggtttagataggagtattttttgaaatttggagttcgagattaatttgggttgtagtgagttaagattatattattgtattttagtttgggtgatagagatgttgttttaaaaaaaaaaagattatagttgaagtgtttttaaagggtgttaaaagtataaaattttagtttgttaatttttgtattagaattttgatattttgagatttttattttattattttgttattaatattgtttattttattattgattttgttgttgttgtttgtttttttgtttttttatatttaattaagagtataatttgtaaaagttattggttagagtttttaattagaataataga

SEQ ID NO: 44 - DNA, 5891 bp, Artificial Sequence
  chemically treated genomic DNA (Homo sapiens)
tttgttgttttggttaaggattttaattaataatttttataggttatatttttagttaaatgtagaaaaataaaaagataaataataataataaaattaatggtaaagtaaataatattagtggtaaagtaatgagatgggaattttagggtgttagaattttggtataagaattagtaagttgaagttttatatttttaatattttttagaaatattttaattatgatttttttttttttgagatagtatttttgttatttaggttagagtgtagtggtgtgattttggtttattgtagtttaggttggtttcgaattttagattttaagggatgtttttgtttaggttttttaaagtgttgggattataggtatgagttattgtgtttagttttaattgtgattttaatgggtgttttatatttttttggttggttatttttttagtggttaagtttatatttttaaaatgataaattagaaagagaaaaatttttattagaaataatatttaaatagatatttaagaattgttttggtatagagaaattattatatattttgtttatagaatttaattattttttggtggtgagtggggagtttatttgtaatagattttaaggagagttaggatatagttttaaacgtgtgtttatattaaagatgaatcgagcgttttttcggcggtatcgggtttcggtggttggattaagttttttaagttgtgagggtgtatgagttaagttttttttattttagtattaatatggttttgtgtggtttaggtttgttgaagttattgaagggtttgaattttttttatttttttttatttattgaagtaggtttgttttttttaaaaggttttttgaaaatgttagaattttatgagaaagagaaaaataaagttggaaaggaatattttatattataagtaatttagaattatagattgtatttggtttgggattattattttttatagaaattatattgttaattgttagttataagttcgggttaattttagagttaatttaatataatattgtaagatgattttagtattaatattaataaattttaaattttatggtagtttaaaaataagattatttttttttttttttttgagattaaagggttaattttatttgataaagttttggaagaaacgaagtatattttatttttttttggtttttttttattagatatataggttttttaacgttggtttagattttattttttagtaaaatttgggtttgttttaattttgataaagatttatgttttaaaattaattattttttttatttagtatttttttttagtttattttatgtaggtatttttatttagataagttatgggattgggttaatttatatttgtataaattattgaatttattgatgtaaattaaatgtgtattttgtgatttggggagtgggtggatggaagtggtttatgagagaaggagtttttttaaattgtttttgtttttttattttttttttttttttttatttagaataaagatattttttaaaagttttatgttgagagaaagaaagaaagaaaaaaataataataacgaaggattttatttagagattattgttagaaataagttatttgtaatttggattagagatagtagatatttttaaataaggtattaaaagggttttgaaagagttggttggagttaggttagtttggttagtaagaaaatagtagttttgtggttaggttttgggttagggtttttattagtttatttggaaatttaattttttttgtgtatttgttttatttttggtggggaaggtgatatggtggggttgaatatttttttttttgtatttggtagttttgaaggaaatttgattttttttttaagaggaagaattaagtatttggagaaaagtttgaattaataatttatatttttgtgtgtgattgattaaattgggtattgtttaaagggcgggggagattagttaattaaaattttagaaaatatgatttgtttataattagatattatattgagatataatttttatttattggattggtaaaaattttaaagtttgataatttgttttgttggtaaagttatagagaagtaggtgattttataagtttttggtgggagtataaaatggtttaattgttatagagaagttgacgatatttaataaaattatatatgtatttgttttttgatttaggatttttattgttgggaatcgattttgaaaatattgttttaattatgaaatgttataattatgaaataatatgtgtataagattatttattgtagtgttatttataatggtaaaattatgaataatttaaacgtttattattaggggattggttgagtaaaatatgatatatgtatataatagtatattttatagttattaaaaagaatgagaaatatcgttaagtattggatggagaaatttttagattagtaaggtataggatagtgtatatagtatgttagtatttatgtaagaaaggaggggaaaaaatagatatttttttttttttttttttttgagacggagttttgttttgttgtttaggttggagtgttagtggtatgatttcggtttattgtaagttttattttttgggtttacgttatttttttgttttagtttttcgagtagttgggattataggcgttcgttattacgtttggttaatttttttgtatttttagtagagatggggtttcgtcgtgttagtcgggatggtttggagtttttgatttcgtgattcgtttgtttcggttttttaaagtgttggaattataggtgtgagttatcgcgtttagttagatatttttatttttttaaagtaatttaaaaaatatttattaataaggaatggggaaaaataggatggaaaagataggaatggaaataagatttttttatgtatatatttttttatatagttttgtttttttatgaaagtttttattttaaattaattgtacgtttatagaagagttgtaaagatagatgagttttgtttatattttttatttagtttttttaatgtaaatattttttataattatggtttatttatttaaaaaaagaaattaattttggtataattattattaattatatattatatttgggtgtaggtgatattagaataatttattgttgttaattatgagtttttggttaagatggagtttattaggttttttattgtaaattattatttttttttttttattttttattttttagatgtaagttacgaggtttagtttatatttaagggtaaaggaattaagttttattttttggaggtagagatattaaagaaattgtggatatatgttaaaattatttattagtaagtaaatattttgggggaaatattttataatgtaaaatattatataaatgtttattttttttttaagttttatttattaattttagtatttatttgagacgattataattgtggtgttttaatggtgattttttattttttttattgttttaatatttattatttggaattattttgttaatatttgtttttttttttttatttgtttatttattttagtatagatatgagtattttattttttgggttataatttaatattattattatttattttgttgtttaaattattttaatgtggttattaggtgtttttttagtttgattttttgtagagtatttttataattttgatgtttgaattatgtaaatatttaatatatttatatatttaattaaaaataaaaaagtaaattttaaaatttaaattaaatgggtaataaaattatatagaaatttatttttaagtaatttttgatattgttatatgtttagtgagatatattttaaggataaaaataattgaaaagaattatttatttgtttatttatttatttatttatttattttagagttagagttttgttttgttatttaggttataagtgtagtggtatgattttagtttattgtagtatcgaatttttggttttaagcgattttttcgtttagttttttaaagtgttaggattatgggtatgagttatagtggttggttttaacgaaattttaaaattttattagtgtattgttagtagtgttattaatgttgtaatttttaaatatatttttttttgtatgttgtggaataaagtaaatatgtaaatgttaatgttgttaggaattaagatttttagtgtaaagaaaataaatgtatatatgtagaaaattaaatgttaagaaataaatttgtaatgttaaattttaattgaagatattaaaataaattatggttaaaaaaaaatatatatatatgtattttatttttgttttttttaagtattaagaaggaatgatatttttaattttgaaattttaatttttttaatattaatattttttaaaaggaagtaggtttttttttagtttggggttggagtttgtttgggatgtatttagattaattaaagtttattaaaagatataggattgttgaaggaatgatttgttagggaaaaaaaaaaaaaagatataggagttattatgatgggtgtttattggattaatttaaggtaatttgaatagtaaaaagaaaaataattgtggttgattataaaatagtgaatatataatttaagtgtttataatattaatatatatagagaataatattttgttagtattgataattattgataataaaatgttattgataataaatgcgattttgttagtatggatattaattattgtaaaaaaaatatagttgatttttaataaaatgattatatttgatattattaatagggtgaaaatttgatattatatggtttttgatgtgatgtaatgtgaaataaatattatttatttatgtagtatttttgttttttaaaagtttaatttaaatttaagtaaatttttgatcgaatttttagtttataataaatattggtggtataagagtaagtgaaaaaagtataatatggaaattattagttatatttagaaggtgagatattttatttaataattgattcggtttttttaaaatagtgttatgaaaaaatattttgagagattgttttagatttaaaaaggttaaagagggttataataaaatgtaatgtgtgaattttgattagattttgttttttttttttttttaaaaaaaagaaattttaaataatttggaaaaatttaagtataaattgtatattagagggtattagggagggaattattgttagttaattttttttgggggtaataatgatattgtgattatataggagaatgattttatttttagtagatgaaggttgaagtattttgggtaaagtgttatgatgtttgtaatttatttttaaatggtttagttaaaatataattatatagtaaatatggtaaaaaacgaatatgtgtttataggtaaataagttgttattgtattatttttttatataataaaaagttggggaaaaagttagatgagattgaataggagattaggaggattttttatttttattaatttttcgatagttaaggaatatttgtttatgtgtgggtattgtttttataaattataatattgtgatttgaattatagtatataaaaagaaaagtgaattaattataagtgtatggttgattgttttttataaagtaaatatatttgtgttaatattatttagttgagaaagagaatagtattaatattttagaagtttttttcgtttttttttagtgattatttttttaaagataattattttgatttttatttttattaatttgttttgtttgtttttgaaggat

SEQ ID NO: 45 - DNA, 6121 bp, Artificial Sequence
  chemically treated genomic DNA (Homo sapiens)
gagatcgattttgtttttatttttgtttttattgtttttggggaaaatttattggaatgattttatttttttttattttttaggtattagtaaagttgtgtttgttgtggtatttaaggttttgtttaatttattaggggtttgttttttatttttagtttaatattatatttttttttgaatatttttgggttatttaaggttttatattttttgagtttttaattttatattggtatgatttttatagtgttttttatgtgttttttattttttgtaggtatattgtagattttttgatgtttagaattttgataattttagagtttgtgtgtatagtagttaggtatgttagttggagtattagatagacgtagatttgaattttgattttggttttaattagtaaaatgtttttgggtaagttatttgatttgtttgaattttagttatttttttcgtaaaataagaatagtgtttataaatatttttatgtgaatgttggaggattattattttgttgttttgttgttgtttttgtttttgaaatttgatttttttgtaaaatgttggaggattaaatgagataatataggtaaaggttttggtaagtatttgatttagtagatatatagaaaataatagtttttgttattattattattttgttaaagttaagtagtaggttaagtgtttattagattagatattgagaagagtgtgtattttaatttatattatgaggattgttgatttgtattttattttttagggtttttgtagttttatttttgggtatgtttaaattttagggatttttgtaattagggttttggtgtaagaatagttgatttatttagggtagggagagggtttttgagtttttattggttattttttttagatttgtttttgaatttatgtagaagtttaattagttagttttgaattttagaatgggtatttatagtattttagtgttcgttgttattatgtaaaaggaggaagattttttggtttaagtttatattttattttttgttttaatattagtttatattttatggttattaatttatatttaagtagattgttgagaattatagagttgtttatttgttaatttaaaagaaagaggttgaaatataaaatatgatttgaagattttatttgagttaaagggaggatagttgtttggaagatttagatttaagtaaaattggttttgagttttgtttagtttttgttataagtaggtttttaaaggtaaaaaaagtgatataaagttttttttttggaatttttattggtttgtagaaataatattaattagtgattggttatatattgttaagttgtaaggtgtgggttatatgtttagtgtagtattattagattaatttatggttatttgtagtaatagtaagtagttttaagaggtgaatatatagtttaaaggtggagtagggggaagtaaaatgtgatttttgttttatttaaatgtttttttgataatttgaaggatttatattttttagataaaagtttttttttttttttaattttttataataatatttaaaggaggtattttaatatttatttttatttttatttttagtagagatggggttttgttatgttgtttaggttgtttttaaatttttgagtttaggtaatttgtttttttcggttttttaaagtgatagcgataggagatagataaatttttggatagatagaaaagggtttttggtgaaattagatttttaagataaagatagtttaaagtttgaaaattgggttgttagttttgggtagagtttataattagagtgagaatttttttgatattttttagttaatcgaatggtgttttttttaggtttgtttatggataaatttgagtcgatgaaaattttagatttagttttatagagggttatttgttttggggttttttttatatagtggtttatttattgtttggttttttttttgttgagagttttttttttgttatttaataaaattattttttgatttatttatttttttttgtttgtatgttttattttttttggttgtaggataagaatttaggatttgttgagttgtaggtggtaggaataagttgtaatatattcgtatttgttgagttgtgggtattgggattaagtgagagttgtgatatatttttatttattgaattgtaggtagtaagattaaataagagttgtgatatgtttttatttgttgagttgtaggtagtgggattgaataagagttgtgaggtgtttttatttgttgagttgtaggtggtaggaataagttgtaatatattcgtatttgttgagttgtgggtattgggattaagtgagagttgtgatatatttttatttattgaattgtaggtagtaagattaaataagagttgtgatatgtttttatttgttgagttgtaggtagtgggattgaataagagttgtgaggtgtttttatttgttgagttgtaggtggtaggaacgagagagagagttgtaatattttttggggttttaggttttgggattttttaagtaaagttgtaatattttttagggtttcgtagttgttggtattttcgagttttttagtgttattgtgttttttttatttagatattggtgtttaaggtggaagtaggttatagtatttttcgttttgttattgattgagtgtggattttatggtttaggagtttaagattggtttgggtaatatggtgagattttatttttataaaaaattttaaaaaaatagttatgtatagtggttattgtattttagattgggtgatagagtgggagtttgtgtttttttttttttaaaaaagagaatgtaatattaatttatagggttttttttaaaaatttaatataatgttatttttttttgttgaaggagtagggtcgtattttaaggttaaattaatttataggaaaaatataatatatagttttaaagtgtaataatttgattaagaggaatttgattttggtgttgttttaaattttatttgtagggttttttttttttatttttatgttttttttttttttatttttagttgatatataataattatatatatttatgggatatagagtaatattttgatatatgtatttaatgtgtgatgattaaattaaagtaattaggatatttattattttaaatattgattatttttttgtgttgggaatattttaaatttttttttttagttttttgaatatatatattaaattatttttaattgtatttattttatagtgttataggatgttggaatttattttttttttttagttgtaattttgtatttattaattaatttttttttattttttatttttttttattttttttagtttttgataattataattttattttttatttttatgagtttattttttaagtttttatatatgattgggaacgtggttttttatttttttgtgtatgatttattttatttaatataatgttttttaggtttgaggattgagaagagtagatattttattgtttatttttatgttgagaattagaaatgtttttaattaaaaagtgattataaatatgttatattaggaattgtggtttgtttgtgggttttgggtgggtaaataattaatttatatttaataggaatgagtttgaaattttttagatatgatatgatttggttgtgtttttttttaaattttattttgaattgtagtttttataatttttatatattatgggagtaatttagtaggaagtaagttaattatacgagtagttattattatgttgttttcgtgatagtgagtttttattagatttgatggttttataaggaaggggttttttttattgttgtttagtgttttttttttttgttatcgtgtgaagaaggacgtattggtttttttttgtattatgattgtaggttttttgaggttttttaagttatgttgaattagaagttaatttaattatttttttggttaggtataggtttatgtttataattttagtattttgggaggttgaggtaggtggattatttgaggttaggagtttaagattagtcgggttaatatggtgaaattttattaaaaatataaaaattagttgggtatggtggtgtttgtttgtaattttagttatgtaggaggttgaggtaggagagttgtttgaatttgttaggtggaggttgtagtgagttgagattgtattgttgtattttagtttgggttatagagtgagattgtattttaaaaaaaaaaaaaattaaaataaataaaataaaataaaattttttttttttttttataaattatttagtttggggtatgtttttattagtagtgtgagaatagattaatatagattataagggtgggaaatttatttttttgggttaagtaattttattttttttttgatgtttagtggataggttgatgttaaattttaaatagtgaattattataaaggaagaagagtagagggtggtgttgggggtaagatatgtagtataaaggttacgtgggtttgattttttagattttaggttttgaatgatatttatttaggtttgattgggaagtttttatgttttagtttttgaattaattagagggatttttgtttgggaacgaaaagtagatattttttattagggttttttatttttttttgagtattggtttttttgagagtatagtagaagttatgaattttttttttataaaaaagtatttatgtatttttaaataaaattgtttttagttttcgtgatgtttttagataaaaaaatttataagattttcggtttttggtttttggggttttatataagtgtgttgggtggagagaaaattttagtggtttttttttttttttttttaattttgtttggtaagtttcgtttttagtttcggtttttttttagttaggtttttaattgttttttgcgttgttgggaagttttggaaggaagtatgtgttttagaggttgggattcgtgtttggttttggaattgttattgttgtttttgttatttttggtgattagtatttaaggtattttttattaattgtgtatttgtgattgtgtattgaaggtatggttagttgggaaaggggagacgggatgtagtttaattttagaagttagatttggtgtttggaaagtaggtatttttattttaatagtatggttatggtatggttggggagttttttttagtattgatgaatggagttttatttttttttttacggggatgtgattaaaataggaatttggggagtaagagaagtaggttttttatattttgtttcgtggttggtggtttatgaagttgtggaaaagtgtttgtttttttattttgaataagaagaagttttatattgatagttgttgtattttatgtttagatatattgtatttttttaggtattttttgagatttttgtatatgtgaggtgttgtattttgagttaaggtaaatgatattgttattgatttaaagaaaagatagattaaaattataggaagaaaagtttggaaaggattgttgtttggggtttttgaatgagggtttgagaagaggttggaagtgttttagtattaaaggaattttaatatatttgattgttaagagttaaggtttatttttttgttatagtttgttcggttttcggtgtgtgattaagggttgagttaatttttttttttttgttagagttgttttattttttttttttatttagtatttttttttttatgttagttgagaaatagtagtgaaatttttgatttttttgttatttttttaagtaaatatttaagtttttttaatttaaagggttttaatgtttattattttgagtaaaatagtaaaaattaataaatatgtggtagttatattgtggtataaaatgatgatagtttgtaatttttggggagatgaggtagaatgtgtggaggatcggttttttatatattttattttttaggtagagttttttggtttatgattgtgtgagtttacggttatataggttttgtgggtttgat

SEQ ID NO: 46 - DNA, 6121 bp, Artificial Sequence
  chemically treated genomic DNA (Homo sapiens)
gttaggtttatagaatttatatagtcgtagatttatatagttatgaattaaaggattttatttgagaggtagaatatgtgagagatcgattttttatatattttattttatttttttaaaagttataaattattattattttatgttatagtgtgattattatatgtttgttgatttttattgttttatttagagtggtgagtattaaagttttttaaattaaaaagatttgagtatttatttgggggaatagtaagaaagttaaaggttttattgttgttttttagttggtataagaagagaggtattggatgaagaaagagggtgaggtagttttaataggagaaggaaagttagtttagtttttggttatatatcggggatcgaataggttgtggtagaggaatggattttaatttttagtaattagatgtgttaaggtttttttgatgttgaagtatttttagtttttttttagatttttatttagagattttagatagtaattttttttaagtttttttttttataattttgatttattttttttttgggttaatgataatattatttattttggtttaggatgtaatattttatatatatagaggttttaaagaatgtttaagggagtatagtgtgtttgagtataaaatgtagtagttgttagtgtagagtttttttttatttaaaatgaaaaaataaatatttttttataattttatggattattaattacgggataaaatatgaggagtttattttttttgttttttaggtttttgttttgattatattttcgtgggaaaggagatgaagttttatttattagtgttaagaaaggttttttaattatgttatggttatgttattggaatggaaatatttgttttttagatattagatttggtttttagggttgaattatatttcgtttttttttttttaattgattatgtttttagtgtataattatagatatatagttggtggaaagtattttgaatgttggttattaggagtgatagaggtagtagtagtaattttagagttagatacgaattttaatttttggagtatatgtttttttttagaattttttagtaacgtaggagatagttgagagtttggttagaaaaaggtcggggttaaaaacggaatttattaaatagggttagagagaaaaaaaaaaaaattattgagattttttttttatttagtatatttgtgtggggttttagaaattagaaatcggaggttttgtaaatttttttatttaagagtattacggaaattgagaataattttgtttgaaggtatatgagtgtttttttgtagggggaagatttatagtttttattgtatttttaggggggttagtatttagaaaagaataagggattttgatagagaatgtttgtttttcgtttttaggtaggaatttttttgattaatttaggggttaagatataggagttttttagttaagtttgggtaggtgttatttagagtttgaagtttgggaaattagatttacgtagtttttgtgttgtatattttatttttagtattattttttgtttttttttttttatgataatttattatttgaagtttgatattagtttatttattgaatattagaaaaaaagtaagattatttggtttaaaagaatggattttttatttttgtagtttgtattagtttgtttttatattgttaataaagatatattttagattgggtaatttataaaggaaagagaggggttttgttttgttttgtttgttttggttttttttttttttgagatgtagttttattttgtagtttagattggagtgtagtagtgtaattttagtttattgtaatttttatttgataggtttaagtaatttttttgttttagttttttatatagttgggattataggtaagtattattatgtttagttaatttttgtatttttagtagggttttattatgttggttcggttggttttgaatttttgattttaagtgatttatttgttttagttttttaaagtgttgggattataggtatgggtttgtgtttggttaggaaagtggttaaattgatttttagtttagtatggtttgggaagttttaggaaatttataattatggtgtaaggggaagttaatacgtttttttttatacggtggtaggaaagagaagtattgagtagtaatggggaaagttttttttttatgaaattattagatttagtgagaatttattattacgagaatagtatgatggtaattgttcgtatgattaatttattttttattgggttgtttttatgatatgtggggattatgggaattataatttaagatgagatttggaagggaatatagttaaattatattatgtttaggaaattttaagtttatttttattgaatgtaaattagttatttgtttatttaggatttataggtaagttatagtttttgatataatatatttgtaattattttttaattggggatatttttgatttttaatatggagatgaataataaaatgtttgttttttttagtttttaaatttgaaggatattatgttaagtgaaataagttatgtatagaaagataaaaaattacgtttttaattatatatggaagtttaaaaaatgagtttatagaagtagagagtaaaattgtggttattagaggttgggaagggtagagggaagtggaggatgggaagaagttggttaatagatataaagttatagttagagaagaggaataagttttagtattttgtagtattatggagtgaatatagttaagaataatttaatgtatatgtttaaaaagttagaagagaggatttggaatgtttttaatataaagaaatgattaatgtttgaggtgataggtattttaattgttttgatttgattattatatattgaatatatgtattaaaatattattttgtattttataaatatgtataattattatatgttaattaaaaataaaagggaaaaaaatataaaagtgaaaagaaagaattttgtaaataaaatttgaaatagtattagaattaaattttttttggttaaattgttatattttggaattgtgtgttatattttttttataaattgatttaattttaggatacgattttgtttttttagtaagaaaagataatattgtattagatttttaaaagagattttgtaaattaatgttatatttttttttttggggggaggggggtataggtttttattttgttatttagtttggagtatagtgattattatgtatggttatttttttaaaattttttgtagagatgaggttttattatgttgtttaggttagttttgaatttttgagttataggatttatatttagttagtggtaggacggggagtgttgtgatttgtttttattttgggtattagtgtttaaatgaagggaatatagtggtattaagaaattcggagatgttagtaattgcggagttttaaggggtgttatagttttgtttggggaattttaaggtttgagattttaagaaatgttatagttttttttttcgtttttgttatttgtagtttagtaaatgagggtattttatagtttttgtttagttttattgtttgtagtttagtaaatgggggtatgttatagtttttatttagttttgttgtttgtagtttagtgaatgggggtgtgttatagtttttatttggttttagtgtttatagtttagtaaatacgggtatgttatagtttgtttttgttatttgtagtttagtaaatgagggtattttatagtttttgtttagttttattgtttgtagtttagtaaatgggggtatgttatagtttttatttagttttgttgtttgtagtttagtgaatgggggtgtgttatagtttttatttggttttagtgtttatagtttagtaaatacgggtatgttatagtttgtttttgttatttgtagtttagtaggttttgggtttttgttttgtaattaagaggaataaagtatgtagataaaggagagtgagtaggttagagaataattttattgagtgatagaaggaaagtttttagtaaagaggggattagatagtgggtagattattgtgtgagaggggttttaaaataggtagttttttgtgaggttgagtttggggtttttatcggtttagatttgtttataggtaggtttggaaaaagtattattcgattagttaaaaggtattaaggaagtttttattttggttgtggattttatttagaattggtagtttagtttttaggttttaaattgtttttgttttgaaagtttagttttattagggatttttttttatttgtttaggaatttgtttgttttttgtcgttattattttgggaggtcgaggagggtagattgtttgagtttaggagtttgagagtagtttgggtaatatggtaaaattttatttttattaaaagtaaaaataaaaataaatgttaaaatattttttttgaatgttgttgtgaaaagttgaagaaaggaaagaatttttatttgaagaatgtgagttttttaaattattagagagatatttaaatgagatagaaattatattttatttttttttattttatttttgggttatgtatttattttttaaaattatttgttattgttgtaagtaattataaattaatttaataatgttgtattggatatataatttatattttatagtttaataatatgtaattaattattaattaatgttatttttgtaaattaatgagaattttaaaaaaaaaattttgtattattttttttgtttttaaaaatttgtttgtaataaaggttgagtagagtttaaaattaattttatttgggtttgagttttttaggtagttgttttttttttggtttaagtaaagtttttaaattatattttgtgttttagttttttttttttagattgataagtaaatagttttataatttttaatagtttgtttagatgtgaattaatagttatgggatataggttgatgttaaaataaaggatgaaatataaatttaagttaaggaatttttttttttttgtatggtaatagcgggtattgaagtattatgggtgtttattttgaggtttaggattagttagttaggtttttgtatagatttaaaaataagtttgagagaagtgattaataaaggtttaaaagttttttttttgttttaagtgaattagttgtttttgtattaaagttttggttgtagaaatttttgaagtttgggtatatttagaggtggggttgtaaagattttagaagatgaagtataggttaataatttttatgatgtgaattaaaatatatattttttttagtatttaatttggtgggtatttgatttattgtttgattttgataaagtgatagtaatgatagaagttattattttttgtgtatttattaagttaagtatttgttaggatttttgtttatattattttatttaattttttaatattttatagaaggattaggttttaaaaataaaaataataataaaataataaaataataattttttaatatttatatgaggatatttataaatattatttttattttacggaagagataattgaggtttagataagttaaatggtttgtttaagggtattttgttaattagaattagaattaaaatttaaatttacgtttgtttgatgttttagttggtatgtttaattattatgtatatagattttggggttattaaggttttgggtattaggggatttgtaatatgtttataagaaatggagaatatataggaaatattatgagagttatgttaatgtgaaattaggaatttagagaatatagggttttgagtagtttaaaaatgtttaaggaggggtatggtattgagttgaggatggaagatagatttttggtaggttaagtagggttttgaatgttataataggtatagttttgttagtgtttggagagtgagagaaagtgaagttattttaataaattttttttagaaataatgagagtaaagataggaatagggtcgatttt

SEQ ID NO: 47 - DNA, 9483 bp, Artificial Sequence
  chemically treated genomic DNA (Homo sapiens)
aatatttataatatattattataattttttatgtttatttttattttttttatatttttttgtgaatttttttttaagataaaagttttagaatgttatttatttggaggtattttttaggtatgttaggtgtatatagatttataggaagtgggataagtagttttgtttaaatttattatgtatttattaaataagatttaagtataattggatatattttatgatagtatagtagtttagatttcggtttattttaaaattttatatggtatatttgttatttttatattattatttttgagagtagtttttaaaaatgttgtatatggataagtttggaattaatttaggtaaagtatttagatatggttaagcgttatattttatttttaatatagttttttttttatttttttatgtattttatttttagaaatagttaggttttttagagtttaagtttgtgtgtatataagtattattttttatttttattgttttaagttaaaaagaagaaaatgttagtttatattttttaagtttattttttgtgttttagatgttttattgaagaggaaagttagaaagtttaaagatttgaagaggatagaaggttggaaagtgtttaaaattggaaatttttcgtttatttatggttatttttattgattttttacggtaaataatttaaaaatataaaggtatttgtaggttaaaaataaattttattaatttgtgtaatttgtattaatttgagagaggatgatgtattttaaattgaagttttgatttataagaagattaaaagttatttagaaatttaatttatttattgaaaggaaaaaaaaaaaaagagagatgagtagtttgttttcggaaattgttttaggtcggaagtttgtggtttttgtttatatgtatttaaaagtattttgttgttgtagttgtttgataagtatagagtattttattttttttgtatattttgtatttagtttatattattttatttttattttttttttgacgttttattttggattttatatataaggttatataggaaggaaagttgtattgagttttggtgttttgaaagatttttgttaattttgttttcgtattaatttttttaagtttcggttatattatttttttagttatacgatgaaatgtgaatgataatttttgttttaaaaatattatttaattttttaatatattatttatgaaagaagatatataaaatgtttttttaaaatggaaagttatatattattgttatttgtgttttataaagaggttgaaaggggtttgtttgtataaggtttgtttttttatgtgtgttttttttttaagagaattaaatttattagggttaattataataagtttgtttttatgttttgattaaaaaaaagggggtattgaagaattttttgatttttaaattttttttatattgtattttgattttttatatttttttttgtttttttttggaattttacgtgtagagatatgtttttttggtttaataagtattgattagtatcgtgggtatatagtttattgtatttaagaggatattgttataagtgaaatagtatatttttaataattattgaaatagcgtggtgttaataattatatgttgttaataattaatagtatgtgttagttaggatagtgttaagtaattattatttattgtgagtttaaattgattgtttttttaaattaaaagagattttttatatttaagaaaaatagaaagaattatggaagggagggaagataaatgaagaaaaagttaattttttaataagtttaggtttttgtagaagattttgagtagtatggggtttagtggatatttaggaggttattgataattatgtgtttggtacgttggttattttttttttgtagtggttgtttttttttacgtatttaagtattgattttaataaaatatttgggttatttttataaaaaaaagtagagaagggttaggagtagtggtttatgtttgtaattttagtattttgggaggcggaggtaagaggattatttgaggttaggagttcgagattagtttggttaatatagtgaaatttcgtttttattaaaaaaaaaaaaaaaaatataaaaattagtcgggcgtggtggtgggtgtttgtaattttagatttttaggaggttgaggtaggagaatcgtttgaatttaggaggtggaggttgtagtgagtagagatcgtattattgtattttagtttgggtaataagagtaaaattttgtttcgaaaaaaaaaaaaaaaaaaaaaaagtagagaaaaatgattgtaaaataaagttaatagattttgattaatgttataatgtttaaaaatatttttttaaaataagatttttaggtattatttttttgtggtttagggtatatatgtaaatatatattatacgtaatatatatataaaaatttgtgtatattagatgtgtgtgtgtatatatatatttattaatttgattatggttgaagaagtaagaaattttgagtaaatgagttttagtattatgaaaattgttagaggtggttgtaggagattgtagttttttttgttttttttttagacggagaagagatatattatattatattagtaattatgttgtgattttttagttattatttttgaatgttttatattaaatgaggaattttttttttttatgacgtgtattaaattgttatttttttttatataattgaaggtataatatgtattaaatattatattaaaaaaatttagaatttataatttttttttatagaaatattataaattggatgttatatttttagtttatagataataaagttaaagtttagtggatttgtatggttaattttttgaagtattattggtttattgtatttatttttatttttttttttaaagaagttaaatttttttttattttatagagtgtgtttttgtttttgttttttttgtttttaaatttttaatggttaattttttttttttatttttatttaattttatatatgatttttttaataagattatgtttgatgatttatataaatgattttatatttatttttatgtattatttggttttttgtatgtagtagtttaaggttatatattttttaattaaataattttacgaattttaataaatagtattttatattttagaatttttagagttttatatatattttttatttatttacgtatttagtaagggtatggaatatatattagattttagttattacggtaggtgttagaggtatagaggagataagttaaagtttttgtttttaagtagtttatagtttagtaagggaaatagataataaattatgatataatattagatattgatagtaatttgtataggtatagagtgtgaggttttattttatatataatagtaattgataatttttttgagtaggtggtagttgaagagtgagtcggttaaagggagagcgagatatgtagggagatggaaaaagaattttttagagaaaaagtaaaagttttgtagtggtaggatgtttggtatttttaaggaggaggtttttgttagagaggatattgaataataggaaaaatgataagagaggtaattaggggttatattatgtataaagtatttttaattattaggtttttggattttacggtatatttgataggaagttttttaaagtgtagtggggggaggagttaaatattttattaaaattatatgaattaattataaaataatggttttagttgttatgtggaaaagggattaagaaattgattgaaaaataggatggaagtaaagggagtttttagggttaatatgtatttttttgtgttttaggtagataaatgtatttaatggtttaattaatttttttagatgataatttttaatttatttatgtataaaatttaacgtttttattttaaataagtgatattaataataaaatttggggtattaagattattaattagagtggtattttgatttttttttttaaattattatatatagttttttgtatttattttgcgttgattgttattatttgtttgagtgagattgatattatagcgatgttttaaataataattatattttaaaagattgaagttttagaggtatttgaagagaataatttagagtatagggggagaattgaaggagttgttattgaggtgatataaaagtagtttaaatgatagtaaaatgtgataagaaaattagtaggaaataaatgaaatagataatttaagataaataattttagagtatagtaaggaagttttagattataagttttttgttttttgtatttttattttttattacgtgatatatttagttattagggaagaagcgaatgatatatttttaaaaattaattcgtagttttttaaataaaatttttttaagttggagagagatttatgagtatagagattttaaaatttatgtttagtaataaattttggggttttagatagtgttaggtgtatagggggtgtttagtaaatattagttaaatgtatgtataaatcgataaacgggatttttggaaaatattatattttttttttttaaattatttttattttaaagataggaatttttaatttttaattttttatttagattatgttgttttttaaattgtttatgttttttagaaatttaaggtaggatgttttagagtttgggaaaattttattttttttttgttatattttatagttgtgagaaagtatattttagataatagggaaaatttatattttattataataatatattatatattgtttggtttattggagtataaattaaagagaaataatgtagttaagtaagtaggcggtaagaggaagggggcggagatattattagggagtataaattttgagatgttttagagttttatagatttaataagagttttagtaaagatttttattgtagtttgatttgatttgagattaattagggaattttgagaataaagatgagttttgaaaattgtttcgtagtagagaatagttttttgtattcggagagtggataagaaagtaagttagatttgattgtttatttattttttggtatttttatatatgatattaatagtagttatataagatatattggtaatttttttatatatgatatataattttagagaaatatattgttaatttttatgtatgtgatatttaatggttgttagggaaggaagtgaggttttgttttttagagaagataggtttttttttagggaagaggtaaatttttttttatttataagaagatagaatatttgagatgagagaaagtcgtaaaaatgaattttagaagatttttaaagatttttttttttgttttagtttatattattttagtgtttagatttaattagaaaattttttgttttagtttagttattttttattattttttttatatttatttgtatattttttaggaagtgttgtttttttttatgaaaaattttgttttttatataagtaattatattgtttgtttttttttgtatttagtgtttgtttttagtgtattttattttgtgtttttatgatagtattttttagttgttggaaatgggtaagtttgttatttttgagagaatagttatattagtagatgaaaatttatagtgtttatttgtaatttgttaaaaaaaaaagttataaaagaattttcgaaaatgtaattttttgttttggtattttttataggattttttttttttattttatttttttatttaatttttttaatttttggttttaaagattatgtaatttagaatttgtttttttttttttttgttttttagtaaaatataattattttagaaattttttttttttttatttgtttattttatttatatatttagtttattttttgttattgggattttgtttattgtttttttatattttatttttgtaaaatttgttgagtttttttatttatttttttttttttttagttaatgaggtattttaaagtattagtatttaggaattagtttatttgttagtaagagcgatttattaataaagggatatgtaagaaataggagaattaaaataattttgtggaaagggattattttttaagcgtgtgtttattatattagtttattttcgaaaaatattagttattttttataaatttattttgtgtttaagaatataaaatatagtgtggattataaatgtaaagtatgtaaatttttaggtaattaggcgagttattatttacggtataggtgtgtcgttaaaaagaaataataataataataataataataattatttaataaatagagagtataggtgaaagaaggatttaatatagaaatttttaattttttttgatattgttttaatttttttttgaatgtttgatttaggttgttttagttatttttggacgttatttttgggtgatttaattagtagtaaattgagttgatttttaatttttttattaatgtgtaggatttgaaattaaagtaaaagtgtgttgttgagggaaatgttttgttatttaggagataagttaagttgtgggtaataatagtttttaattgtaattttagtattttgggaggtcgaggtgggcggattacgaggttaggagatggagattattttggttaatacgatgaaatttcgtttgtattaaaaatataaaaagttagtcgggcgtgggggcgggcgtttgtagttttagttatttaggaggttgaggtaggagaatggcgtgaattcgggaggcggagtttgtagtgagtcgagattacgtaattgtattttagtttggacgatagagcgagatttcgttttaaaaaataaataaataaaatagtagtttttattaatgggaataaagtattatttgagagttattttaaagtttattttttcgttgagtcgatgggttgattgagattttggaatttacgggttattggggtgtgttagtgtttattgaggagatagagttgttgtaatattgagtttaagtagtacgattgatttatataatgtgaagtgaaattagatagagtttcgaatttggtattttgggtagtaaaggcggtttttaatgatgattttatatcggtgaataaagaaaaatttgttttgagaagttgagaaaatcgagttagacggtagtgaagtaaaggttttttttgtaaaatttgagtgtcgatttgtgatgggaaaaataatttttagataaagtaaaagttgatgtggatattagtatttagtaaattattgtgaaaaaaaggtaattttttttggtttagtttatttttagataaatgttttaagggtaaaaatatgtgtattttaagatatgttttatgtaaatttttttaagttatgaaaattatttatattgaaaaatagaatgttttttattttgaaattgttttgtattgttagttatttaagtagttattttatattttggtttttgagaatataatagggatttgtatattttttgtggggtcgtattttaagatttttgatagtttattttgtaaaattaaaatttaaaatttaagtcgtaaaatttttttttttttttttttagttatttatttagagtgtagaatagatatttttttagagttttttgtaattattagttatcgttaatattatatttttattttaaatttttttatagaaatattgtttgttgggaaaaaaaaaggtttttattttgttttattattgtatagagggtaaatgaaataattttcgttgaatatttggtttataatattgttatattttttttattattttaatattttttgaaaaatttaaatttttattgtttatttatatattattttaaattgaggtttagtttatatacgatgaatgtatagttcgtaggtatatagtttaacgatttatgatagtggtataattataagattagtaatatttgaatttttttattattttagatagtttgttttgtgttttattttagttaaattattttttttatatatataaaggtaattattgttttgatttttgatattagagtttagattaattattatttaaagttatgtaaatgtaaatatgtagtatataattttttgtggttggatttttttttatttaatattttttttggagatttttttattttgttgtatgtattagttgttttattttgaattgttgagcggaatttttttgtatggatatattataatttgtttatttatttttttgttggtggatatttggattatttttggaatttggtttttaagaataaagttgttaggagtatttttgtataaggtattttgagaatatatttttattttttttgaggatatatataggagtaggtttgttgggttatagaaaaggtatatatttaattttataagaaatagtttttaaagtgtttttttaatttatttttttattaataatatttgaaaattttagttgttttatatttgtagtaattttattaaaaaatattgttacgtttaaaattttgtttagttattttaatgttagatatttatatagtaatttaatattttattttatgatattatttatatttattttatttatattattttttttaaatagtaattataaggagattaaggaattatgttagaattttttatttatttatttatttatttttttagataaggttttattttgttatttaggttagagtgtagtggtgtaattttcgtttatagtaatttttgttttttaggttaaagcgatttttttattttagatttttaagtagttgggaatataagtgcgtgttattatgattagttaattttttgtatttttggtggagatagggttttattatgttgtttatgatggttttgaatttttgagtttaggtgattaatttatttatttcggttttttaaaatgttgagattataggtgtgagttattatgttttagaatttttttatgtgttttttggggtatgtgtatatttaataaacgtttttattattattaaaataaattgattatatatttagaatttttatagttattaagtgtataaattatatgtgttaggtaaatattttggggagatattttataattttattattatgtttgaattgttttattttaagttaataataaattatttaaatttatttaaaattgggggtaaattaatttagaaatttttataaagagacggggaaattttatataatgagataggaaatattaagtttaaatgttttaaaagaatgttgtatatttttatagtatttttatagtttgtttgaatttattattaatttttttttttttaga

SEQ ID NO: 48 - DNA, 9483 bp, Artificial Sequence
  chemically treated genomic DNA (Homo sapiens)
tttggaagggagaaagttgatgatgagtttaggtagattatagaagtattataggaatatgtaatatttttttgaggtatttaaatttaatattttttattttattatatgaaattttttcgtttttttatagaaatttttaagttaatttatttttaattttgagtgaatttgaatagtttattgttggtttgaaatgaaataatttaagtataatgatgagattataaagtgtttttttaaaatatttatttgatatatatgatttatatatttagtaattatgaaaattttaagtatataattagtttgttttaatgatgataagaacgtttattaaatatgtatatgttttagaagatatataaaaaaattttagggtatggtggtttatatttgtaattttagtattttgggaggtcgaggtgagtggattgattatttgagtttaggagtttaagattattatgagtaatatggtgaaattttgtttttattaaaaatataaaaaattagttggttatggtggtacgtatttgtgtttttagttatttgggagtttgaagtgggaggatcgttttagtttgggaggtagaggttgttgtgagcggagattgtattattgtattttaatttgagtgatagagtgagattttgtttaaaaaaataaataaataaataaataaaaaattttagtataattttttaatttttttgtagttattgtttgagagaaatgatgtgaatgggataaatatggataatattataaagtaaaatattgaattgttatataaatatttgatattaaaatgattgaataaaattttaaacgtgatagtattttttggtgaagttgttgtagatgtggagtaattggaatttttagatattattggtgggagagtaaattggaaaaatattttggaaattgttttttataaaattaaatatatgttttttttatggtttaataaatttatttttatgtatatttttaagaaaaatgaaaatatgtttttaaaatgttttgtgtaagaatgtttttagtagttttatttttaagagttaaattttagaaataatttaaatatttattaataggaaaataagtgaataaattatggtatatttatataagggaatttcgtttagtaatttaaaataagataattgatatatgtaataaaatgaaggaatttttaaaaaaaatgttgagtgaaaaaaaatttagttatagaagattgtatattatatatttgtatttatatgattttaaataatagttggtttaagttttggtgttaaaaattagaatagtagttgtttttgtgtgtgtaggaaaggtaatttaattggaatgggatatagggtaaattgtttagggtgatggaaagatttaaatgttgttggttttgtggttatattattgttataagtcgttaaattgtatatttacgagttgtgtatttatcgtatgtgaattaaattttaatttaaaatgatatgtgaatgaatagtaaaaatttgaattttttaaaagatgttaaaataatagaggaaatgtaatagtattatagattaaatatttagcgaaagttattttatttattttttgtataatggtgaaataaagtaaaagttttttttttttttaataagtagtgtttttatggaaggatttagaataaaaatatgatgttaacgataattgatagttataaaaaattttaagaggatgtttgttttatattttaagtaaataattgaggaaggagaaaagagaattttgcgatttagattttggattttaattttgtaggatgagttgttaggagttttaaaatgcggttttataaggagtatataggtttttattatgtttttaaaaattaaaatgtaaaatggttgtttaagtaattgataatgtaaaatagttttaaaatagaaaatattttattttttaatatggatgatttttataatttaaaaaagtttatataagatatattttgaaatatatatatttttatttttaaaatatttatttaaaggtaaattggattaagagaagttgttttttttttatagtaatttattgggtattggtgtttatattaatttttgttttatttggaagttattttttttattatagatcggtatttagattttgtaagagaagtttttattttattgtcgtttagttcgatttttttagttttttaaagtaaatttttttttgtttatcggtatagaattattattggaagtcgtttttgttatttaaggtattaagttcggagttttgtttggttttattttatattatgtgagttagtcgtgttgtttgaatttagtattgtaatagttttgtttttttagtgagtattaatatattttagtgattcgtgggttttagagttttagttagtttatcggtttaacgagggagtaagttttgggatgatttttagatgatattttatttttattaatgagggttattgttttatttatttattttttgagacggagtttcgttttgtcgtttaggttggagtgtagttgcgtgatttcggtttattgtaagtttcgtttttcgggtttacgttatttttttgttttagttttttaagtagttgggattataggcgttcgtttttacgttcggttaattttttgtatttttagtatagacggggttttatcgtgttagttaggatggtttttattttttgatttcgtgattcgtttatttcggttttttaaagtgttgggattataattgagggttattgttatttatagtttgatttattttttaggtgataaaatattttttttaatagtatatttttgttttgattttaggttttgtatattaatggagaagttgaaaattaatttaatttgttattaattgaattatttaaggataacgtttaaggatgattagggtagtttaaattagatatttaaaagaaagttgaaatagtattaggaaaagttaaaaatttttgtattaggttttttttttatttatgttttttatttattgagtagttattattattattattattattatttttttttggcggtatatttgtgtcgtaagtaatggttcgtttgattatttgaaaatttgtatgttttgtatttgtaatttatattatattttatgtttttaaatataggatggatttatgagaagtaattgatgtttttcggaagtaaattaatatagtagatatacgtttagaaaataatttttttttataagattgttttagtttttttgttttttatatatttttttgttaatagatcgtttttgttgataagtagattaatttttaagtgttagtgttttagggtattttattaattaaggagaaagagggataaatagaaaaatttaataaattttatagaagtaaggtatagaaaaataataggtaaaattttagtaataggaaataagttagatatgtggatagaatagataaatagaagagaggaaaatttttaagatgattatattttgttgagagataaaggaaaggaagaataaattttaagttatatagtttttgaagttagagattggaaaggttaaatagaaggatgaaatagaggaaaagagttttataaagaatattaaagtaggagattgtattttcgggaatttttttgtgatttttttttttagtaaattataaatggatattgtaaatttttatttgttgatatagttatttttttaaagatggtaaatttgtttatttttagtaattagaggatgttgttatgagaatataggataaggtatattgaaagtagatattgaatgtaaaggaaggtaaataatgtaattgtttatgtggaaaatagaattttttataaagagagataatattttttggagaatgtatagatggatatgaaaaaaatgatggagaataattgggttagagtagaaagttttttaattaaatttaaatattgagatgatataaattaaagtaaagagaaagatttttaaagattttttgaaatttatttttgcggtttttttttattttaggtattttatttttttatagataaaaaggggtttattttttttttgaagaagaatttgttttttttaaaagataaagttttatttttttttttaataattattagatattatatatatagagattagtagtatatttttttaagattatatattatatatagagagattattagtatattttgtataattattattaatgttatatatagagatattagagagtaaataggtaattagatttgatttatttttttgtttatttttcggatgtaaagagttgttttttgttacgaaataatttttagagtttatttttatttttaagattttttagttaattttaggttaagttaagttatagtgaaagtttttgttggagtttttgttgagtttgtgaggttttgaggtattttagagtttatattttttgatgatgttttcgtttttttttttttgtcgtttatttgtttgattatattgtttttttttaatttatgttttagtggattagataatgtatagtgtgttgttgtggtgaagtatgggttttttttgttgtttgaaatgtgtttttttataattgtaaggtgtagtaggaggaaagtgggatttttttagattttgagatattttgttttaaatttttagaaaatataaatagtttaggagatagtataatttaagtaaagaattaaaagttagaggtttttgtttttgagatgaagataatttggagaaggagagtgtagtattttttaggaatttcgtttatcgatttatgtatatatttaattgatatttattgaatattttttatgtatttgatattgtttggggttttaggatttattgttgaatatgaattttaagatttttatgtttatggatttttttttagtttgaaagggttttatttagaaagttacgaattggtttttggaagtgtgttattcgttttttttttggtgattagatgtattacgtagtaagaagtaagaatgtaggaaatagaaagtttgtggtttggaatttttttgttatgttttaaaattgtttattttaaattatttgttttatttgttttttgttaatttttttgttatattttattgttatttagattgtttttatgttattttagtaatagtttttttaattttttttttgtgttttaggttattttttttagatatttttgagattttagttttttgaggtatgattattatttaaaatatcgttgtggtattagttttatttagataagtaatgatagttaacgtaagatgaatgtagaaagttatgtatggtgatttaaggagggaaattaaaatattattttgattaataattttggtgttttaaattttattattaatattatttatttagaataaagacgttaaattttatgtataggtgggttggaagttattatttagagaagttagttggattattagatgtatttgtttatttaagatataaagaggtatatgttggttttaaaagttttttttgtttttattttattttttagttaattttttagttttttttttatatagtagttagaattattgttttataattaatttatatgattttggtgaagtgtttaatttttttttttattgtattttgaaaggttttttattaaatgtatcgtaaaatttaaagatttaatagttgagaatgttttatatataatatggtttttggttattttttttattattttttttattatttagtattttttttgatagaaattttttttttaaaaatgttaagtattttattattatagggtttttattttttttttaaaagattttttttttatttttttgtatgtttcgttttttttttaatcgatttattttttagttgttatttgtttagagaaattgttagttgttattatatgtaaaatagaattttatattttgtgtttgtatagattgttgttaatatttgatattatattatggtttattatttgttttttttattagattgtaagttgtttgagggtaagggttttgatttgttttttttgtgtttttaatatttgtcgtagtaattggaatttagtatgtattttatgtttttattgaatgcgtgaatgaatgaaaaatatgtataaaattttaaaagttttaaaatatggagtgttatttattggggttcgtaggattgtttggttgagaagtgtatgattttaggttgttatatgtaaagaattaggtaatatataggaatggatgtgaggttatttatataggttattaggtatggttttgttgaggaggttatatgtggaattaaataaaaatgggaggaaagagttaattattgaaaatttgagaatagaaagaataagaataagaatatattttataaaataaaaagaagtttagtttttttaaggaaaagaatgaaggtaagtgtagtaagttagtagtgttttaggaaattgattatataagtttattgagttttggttttgttatttgtaaattaaaaatataatatttaatttataatgtttttatgaagaaaaattatgaattttaaatttttttaatatagtatttggtatatattatgtttttaattatatggaagggagtgatagtttggtatacgttatgaaaagagaaagttttttatttgatgtaaggtatttagagataataattgagaagttatagtataattgttgatgtaatgtaatgtgtttttttttcgtttgagaaagagatagaggaaattgtagttttttataattatttttagtagtttttatggtattaagatttatttgtttaaggttttttgtttttttaattataattaagttaatggatgtgtgtatatatatatatatttagtgtgtataggtttttatatatatgttacgtataatatatatttatatatatgttttaagttatagaaaaatgatatttagaaattttattttgaggaaatatttttaaatattatgatattgattaaaatttattaattttattttgtagttatttttttttgttttttttttttttttttttttttcgagatagagttttatttttgttgtttaggttggaatgtagtggtgcgatttttgtttattgtaatttttattttttggatttaagcgatttttttgttttaattttttgaggatttgggattataggtatttattattacgttcggttaatttttgtatttttttttttttttttagtagagacggagttttattatgttggttaggttggtttcgaatttttgattttagatgatttttttgttttcgttttttaaagtgttgggattataggtataagttattgtttttggtttttttttgtttttttttatggggatagtttaagtattttgttgaaattagtatttgggtgcgtgggaggaggtagttattgtaagaaaaaagtagttaacgtattaagtatatggttgttagtggttttttggatatttattgggttttatgttgtttaaggttttttgtaagagtttgaatttgttgaaaaattaattttttttttatttatttttttttttttttataattttttttattttttttaagtgtgagaaattttttttaatttgagaaagtaattaatttaaatttatagtgaataatggttgtttggtattgttttagttgatatatgttgttaattattaataatatgtaattattaatattacgttattttagtgattattaagagtatgttattttatttgtgataatgtttttttaggtataataaattatatgtttacggtattaattaatatttgttaagttaaagaaatatatttttatacgtgaaattttagagaaaaataaaggaaagtgtagagggttaagatgtagtgtgggagagatttgggggttagagagttttttagtatttttttttttttaattaaaatatggaagtaaatttattgtggttagttttgatgggtttagtttttttaaaaaaaaaatatatataaagaaataaattttgtgtaagtaaattttttttaatttttttataaaatatagatggtaataatatgtaattttttattttagggagatattttatgtgtttttttttataaatgatatgttaaaaaattaagtgatatttttagggtagaaattattatttatattttatcgtgtagttgagaaaatagtatagtcgaggtttagagaaattagtgcggggataaggttggtaaaagttttttaggatattaaaatttaatgtagtttttttttttgtgtgattttatatgtagaatttagggtgagacgttagaaaggaagtaaagatgaggtaatatgagttagatgtaaagtgtgtagagaaggtggggtattttgtgtttattagatagttgtagtagtaggatgtttttgggtatatgtgaatagggattatagattttcgatttaagataattttcggagataaattgtttatttttttttttttttttttttttttagtgggtgaattaggtttttgaatggtttttaatttttttgtgaattaaaattttaatttagaatatattatttttttttaaattaatgtaaattatataaattggtaaaatttatttttaatttgtaggtgtttttgtgtttttgaattgtttatcgtaaagggttaatgaaggtaattatgagtaaacgggggatttttagttttaaatattttttaattttttgttttttttaagtttttgaattttttaatttttttttttaatggaatatttgaaatataaaaaatgagtttggaaagtgtgagttggtatttttttttttttgatttgagatagtgaaggtaaaagatagtgtttgtgtatatataagtttggattttgaaaaatttgattgtttttgaaagtaaaatatataagagaataaaagaagagttatattaaagatgagatataacgtttaattatgtttgagtattttatttaaattaattttagatttatttatatataatatttttggagattatttttaaagataatggtgtgaaaatagtaaatgtattatatagaattttaaggtaggtcggggtttgggttattatgttattataaaatgtatttaattgtatttggattttgtttgatagatgtataatgaatttgaatagaattgtttattttattttttgtggatttgtgtgtatttaatatatttaggaaatgtttttaggtggatgatattttgggatttttattttaaaagggaatttataagaaagtatgagagaggtgaaagtaggtatgaaaaattataatagtatattatgaatatt

SEQ ID NO: 49 - DNA, 6062 bp, Artificial Sequence
  chemically treated genomic DNA (Homo sapiens)
tttttgaggtttttttattttatattttaattaatgtgttagtgtttagtatttaattattatttaagaagtaattgttaaataaagtaatgaatattatattttgggttaggtgttgaggttatagaggtggataagataagagattttgattttaaggagtttagatttaaatttgttttttttaaataggagataagtatttataaaattttgttattagaattattataggagaaaatataagatattatgggaggtgagagggtatttagtttagtttttggtgattaaggaagatttttagagaaaatagtggttaagttgagatttaaaggaaaaattaggtaaggaatgtaaatgtaaaaaggagagtgaagtgggagtagtagggtttattaggatttagggtgagtaaggtatagtagattagttagaaatgagggaatgtgttatgtaagtttttttaaggaaaattttaagattttaaataggggattgatatagttaaagtttagaaaggttattttgggtacgatgtaaaggatgagttgtagtattatcggttagaaaagttattgtaaggagttgaggtaggagataattatggtttaagtagaatagtaatgaagcggagagaaatggaaaattagagttgagaaggaaaaattgatagggttttttaatggttgatagagagagacgggttgagtaaatatttatatttttggtttataaaagcgggttgatgatatttatttttagagattagaaatataaaagttggtaaaataaagagtttagtttgggatttttgagatattttggaatatttaggatagatattttgaaggtagtaagatatataggtttgtagttagaagagagaattggattagaaatttgtattaggagttattagtgtatatacggcggttgaagttatgaaggtgaatgagattatataaaggataatgtaaaaagtgagatagaaataaattgtatataattttggggtttatggatatttgatagttagaagggggttttgaaaggtaaaatagagatatagagatttaggagaaaaattaggaaagtgtggttttataaattaaggtatatgaatgtagaaggttaagggttttagtattaaatgttgtagagaggttaaggaaaataagataaagggtttattggattgaatataagaggtttttggtgatttcgttgagaattttagtggagtggtagttgtagaatttagaagtttgttgaataaagaatttattgattgtagtttttggaaaggtaggaggagtgagaatttagagaacgagtataaagagatggaatatagggaattggtagagatatgtgttttagataggggggtatttaatttatcgtgaagtttgaaagaatgagtatggagatataaaattgttggagtttttgttttttttttttgagacggagtttcgttttgttattagggttggtagtggtacgattttggtttattgtaatttttgttttttgggtttaagtaattattttgttttagtttttttagtagttgggattataggtattcgttaagatattcggttaatttttgtatttttagtagaaatagggttttattatgttggttagattggtttcgaatttttgattttaggtgatgtgtttgtttcggttttttaaagttttgggtttataggtatgagttattacgtttagtttgagtttttttttgatggtttttatttttttttatttttttatttgagaataagtgaggggagtggtttgaaaaataaggagaaaattagaagtggttgttgtggaaattaagagagagttaattagggaaataagtattgtttggtaaagttgaaggtttacgtgagtttggacgttgtaaatatgtggtggaaattatttatatggtttgtttagaattttagattagtttttttaaatttgtttttgagttagtaaagtttaggttatattttattaataaataaatgtaataaagagattataaatattgtaaataagtgtaataaagagattataagattaatataatttttttttttcgtgtattacgtataatttgtataatatatgtatatatattatagaatattggttatgaaatttttttataaagaaagttttttagaatattattattttattgtttgtaatatttcgtataatttttttttttttttttttgagacggaatttcgtttttgttgtttaggttggagtgtagtggtgttatttgggtttattgtaattttcgttttttgggtttaagtgatttttttgttttagtttttcgagtagtaggaattataggtatcgttattatattcggttaattttttgtatttttagtagatgcggggttttattatgttagttaggttggtttcgaatttttgattttaggcgatttgtttgtttcggttttttaaagtgttgggattataggcgtgagttatcgcgttcggttattttgtgtgatttttaatgaaaagtagtgaagttattatagtgtggggtgaatatgaataaattttagataaggaatttaatatagtttttattaagaatttatttatttttatagtataaaataatataatttattttttttatatttattaagagattttttttaaagaaatattattaatagagatgggaggtaaagatttattttttttagattattaggttatattaatataagtatttgttttaattttatattttaaaataatttatatttaggtaatatttattaagtattgattaagtatcgtgtttatgtattagtttatttaatttttattaaaattttgttagataagtattattttcgtttatagatgaggaaattggattataggaaagtttaagtaatttgtttttggttgtaagtttaataaatggagagttgggatttgaatttaggtagtttgatttcggaggttatatatatttattttttttggtatattgtttttttttaaaaatagaaatttaataaaattttttaaagtaaaagtttatttgaagttttagaaatttaaaataatgattgaatagataagttgtaatagattttataagtagtttagtaaaaatgtagatttacgaaatggtatatattaagatataaaataagttgtttttataagtttttttttttaaaaaaaattatttggaaatattttaagtatatagaatagtaaaggaaataattataagtgaatatttatgtgttttttatttagtttaatgttttgttatatttttaagatatttttggtagaaaataaacgttatagatataaatgaattttttttgttatatttttttttgtttatttttggaagtaattagtattttgaatttggtatttattatttttttatataatttttagtttgattttatttttttgtaattattaaatttttatttatggtatgttatatatattttttcgtaatttgtttttttattttttttttaatattaggttaatgattttatttatatgaaaaatggtagttttagtttattgattttttggttcgtgttgtatgttaatttgtttaataatgatatttatttatttatttttttattagtagatatttattgttttattaatataagttattttgttttgaatttttttgtacgtgtttataatttaaaaatatatatatttttttaaaatatgtagttaaataggaatatatatatttttttaatatgtagttaaataggaaaagtaatatatgtgtatgaagaatataattaagagagttattacgtttaagaaaagattataggttatttcgagtgaagtaaggtttttattagaaggtatttggggaacgttttaatgatagcgatatttatcgttatagtagaaatttatataatcgtagttttttattagtattttgttatttagtagtttttgtgtttatttatttttttaattggagtgtgagttttaagaggatcgaatcgggtatcgataaggtgagttaatatgaatgtggcgagttcgtaatgggggttatagcggtcgatttttggggttgtgttaggttattagagtgtgatggcgcgagggaagggtcggggaaatagggtttaattttattttttatttcgaaagttaagatagttacggaaatagggatgaatggggagtatagatatttgtttcgaagtgtttttttatttttatttataaagtcgtcgggttagtaattagaagtcgaggggcggatgcggttttcgttttgtggtatttttttagtttggtttttttagtcgcgtttttttgttttacgttaatttcgtaaggaggcgttgaggttaattggtcggttttcgtagttttaaaatttgacgtgaaattgcgcggggtagagttgattgcggttatttttaattcgggtaagattttattttcgtattttatttattagttttttttagcgtttttaggattttttttaataaatgtaacgcggttaattttagaagtagtgttgaagaaatacgtaaagaggtttgagtatttatgattttagtggtgcgaaattcggttaatttaaatatggcggttaaattcgaatagtaaaacgttgttgacgttaatgaagttatgttcgaaatggagcgaggcggcggagttggggaggcggtaatttcgcgagatggaagttagttttcgttaggttcggaagtttcgtttgagggggcgggggacggaggagggagcgggagtcgagcgagagtttgtggaggagttcgtttgttgtagcgtgcgtaagtaaggtagttacgtcgggcggttacgttgcggaatcggcgtaggcgtttttggagaatcggcgggttgcgtttcgttggggttggtcgcggagggggggaggggatgtcggttagtgcgagattcgttgttgttgaggagaggagcgttaatagtagtattatgggtgagttttagtttcgggtgtcgcgatttggggttagcggtttcgaatgtcgggaagttttgcggtcgttggatcgagttagggaacgttttgaggcgaggcggaggtagcggcgaggggagtcgggatgggggttattgcgggttcggggcgcggtagcggcgggttcggggggaggggaggcggcggcggtgatagtttgaattgaacgtgaggagagtcgaggcggcggtattttttgtgtcgcggcgggttggttttcggcgtagagtcgcggttttcgcggtcggagtagtttgagcgtggtggttttagttttgtttttgttttttttcgttttttcgtttttttttagttttttttcgggttcgtcggttttcgcggtttcgtttttttttgttttcggtcgtattttcgtcggtagaagttttttcgtggggtagtgggtttggttaggagggtggggacgagtgtgaacgttcgggcgagggtgttgtgtgggttaattcgggcgggcggcggcggggagggaggaagaaggatgtattaggttgaggttgtggtggaggcggcggcggcggttgtagtcgtagttttagttatcgcgtcgttttttcgttttttttttcgtttttcggggttgtttttttttaggcgtagttcggaaggtcggtggatggcgggcgagttttgagaacggagggagaatcggtagtttggtttggaatttgggtttaatttttaggagtaagggaaagagaacgtttgggaagggcgtttttcggaggagatagaaagggtgggaagggtttttggaaaagggagggagcggagatgtggagtggcgaagtttagggaaattaatttttgaaaatattttaatatttttagttatttttttaacgagtttttttattttttttttttttttatatgttggaaaaagaataggttattttatttatattttttatttttgagttttattttagttgtgtgtatagtaagaa

SEQ ID NO: 50 - DNA, 6062 bp, Artificial Sequence
  chemically treated genomic DNA (Homo sapiens)
tttttattatatatatagttgaaatggaatttaggagtggaaaatgtaaatgaaatggtttgttttttttttaatatgtgggggaggaaaggaaatgaaagggttcgttaagagaataattgagaatattgaaatatttttaaaaattaatttttttaaatttcgttattttatattttcgtttttttttttttttaaggattttttttattttttttatttttttcggggggcgttttttttaggcgtttttttttttttatttttaaaaattaagtttaaattttaaattaaattatcgatttttttttcgtttttaagattcgttcgttatttatcggtttttcgggttgcgtttggagagaggtaatttcgagaggcgggaggaggagcggggaggcgacgcggtgattggagttgcggttgtagtcgtcgtcgtcgtttttattatagttttagtttggtgtattttttttttttttttttcgtcgtcgttcgttcgggttggtttatatagtattttcgttcgagcgtttatattcgtttttatttttttagttaggtttattgttttacgaggggatttttgtcgacggggatgcggtcggggataggaggaagcggggtcgcggaagtcggcgggttcgggaggagattgaggaaaggcgaagggacggagagaagtaagggtagggttgagattattacgtttaggttgtttcggtcgcggaggtcgcggttttgcgtcgggggttagttcgtcgcggtataggaaatgtcgtcgtttcggttttttttacgtttaatttaaattgttatcgtcgtcgtttttttttttttcgagttcgtcgttgtcgcgtttcgggttcgtagtggtttttatttcggtttttttcgtcgttgttttcgtttcgttttagggcgttttttagttcggtttagcggtcgtagagtttttcggtattcggagtcgttgattttaagtcgcggtattcgaagttgagatttatttatggtgttgttgttgacgtttttttttttagtagtagcggatttcgtattgatcgatatttttttttttttttcgcgattagttttagcggagcgtagttcgtcgattttttaaaggcgtttacgtcgatttcgtagcgtagtcgttcggcgtagttgttttgtttacgtacgttatagtaggcggatttttttataggttttcgttcgattttcgttttttttttcgtttttcgtttttttagacgaggttttcgggtttagcggaggttggtttttatttcgcgagattatcgtttttttagtttcgtcgtttcgttttatttcgagtatgattttattggcgttagtaacgttttgttgttcgggtttagtcgttatgtttaagttggtcgggtttcgtattattgaggttatggatatttaggtttttttgcgtgtttttttaatattgtttttaaggttaatcgcgttatatttgttggagaaaattttgggaacgttgaaaaggattagtgggtggggtgcgagggtggggttttgttcgaattaaagatggtcgtagttagttttgtttcgcgtaattttacgttaagttttggagttgcgggagtcggttagttggttttagcgtttttttacggaattggcgtaaggtaaagaggcgcggttggaagaattagattgagaaagtgttatagggcgggggtcgtattcgtttttcggtttttggttattgattcgacggttttgtgagtgaaagtgaagagatatttcgaggtaggtgtttgtgttttttatttatttttgttttcgtggttattttgattttcggggtgaaaagtgaggttaggttttgttttttcgatttttttttcgcgttattatattttagtggtttggtatagttttagaggtcggtcgttgtagtttttattgcggattcgttatatttatattggtttattttgtcggtgttcggttcggtttttttggagtttatattttagttgaggaaatgaatggatataggaattattgggtaataaaatattaataaagggttgcgattgtgtgagtttttattgtagcgatgaatgtcgttgttattggaacgttttttaagtgttttttagtgaaagttttattttattcggaataatttgtggtttttttttgaacgtgatggtttttttggttgtattttttatgtatatgtgttattttttttgtttaattatatgttaaagaaatgtgtatgtttttgtttaattgtatgttttaaaaaagtatgtgtatttttaagttataggtacgtgtaagaaagtttagagtaaaatagtttatattagtgaaataataaatgtttattaataggagaatggatgaataagtgttattgttgaataaattgatatataatacgaattaaaaaattagtgaattaaagttattattttttatatggatagagttattaatttaatattgaggaagaaatgaaaagataggttgcggaaagatatatatgatatattataaataaaagtttaataattataaaaaagtaagattaaattaaaaattgtataaggaaatgatagatattaaatttagaatattggttgtttttagagatgaatagaagggaatgtaataagaagggtttatttgtatttataacgtttgttttttattagaaatattttgaaaatgtggtaaaatattaagttaagtagagggtatatgggtgtttatttgtaattattttttttattgttttatatatttgaaatatttttaagtaattttttttaagaaaagaaatttatagaagtaatttattttgtattttgatatatgttatttcgtaagtttatatttttattgaattgtttatgaagtttgttgtaatttatttgtttaattattgttttaagtttttgaaattttaaatgaatttttattttgggaaattttgttgaatttttatttttgaaaaaaagtagtgtattaaggagggtaaatgtatatagttttcggagttagattgtttgagtttaaattttagttttttatttattaggtttgtaattaagaataagttatttaaatttttttgtgatttagtttttttatttataaacggagataatatttatttaataggattttgataagagttaaatagattaatatatgaatacggtgtttagttaatgtttagtaaatattatttaaatatagattattttaaaatataaaattaaagtaaatatttatattaatataatttaatagtttaaaggaagtaaatttttgttttttatttttattgataatatttttttgaggaagattttttaatgggtatgaaagaggtgaattgtgttattttgtgttatgaaaatggataaatttttaatagaaattatattaaattttttgtttgaagtttgtttatgtttattttatattatgatagttttattattttttattgaaaattatatagagtggtcgggcgcggtggtttacgtttgtaattttagtattttgggaggtcgaggtaggtagatcgtttgaggttaggagttcgagattagtttggttaatatggtgaaatttcgtatttattaaaaatataaaaaattagtcgggtgtggtggcggtatttgtaatttttgttattcgggagattgaggtaggagaattatttgaatttaggaggcggaggttatagtgagtttagatagtattattgtattttagtttgggtaataagagcgaaatttcgttttaaaaaaaaaaaagaaaaaattatacggagtgttataggtaatgaaataatgatattttgaggaattttttttgtagggaggttttatagttaatgttttataatgtatatatatgtgttatgtaaattatacgtggtgtacgaggaaagagaattgtattgattttatgatttttttattgtatttatttgtaatatttatgatttttttattgtatttatttgttaataaaatatagtttagattttattgatttagaaatagatttaaaaaaattgatttgaaattttggatagattatatagatggtttttattatatatttatagcgtttaaatttacgtgggtttttaattttattaagtaatgtttgtttttttagttggtttttttttaatttttataatagttatttttgattttttttttattttttaaattattttttttatttatttttaaataagagaatagaaaaaaatagaaattattaaagaggaatttaggttgagcgtgatggtttatgtttgtaaatttagaattttggaaggtcgaggtaggtatattatttgaggttaggagttcgagattagtttggttaatatggtgaaattttgtttttattaaaaatataaaaattagtcggatgttttggcgggtgtttgtaattttagttattagggaggttgaggtaagataattgtttgaatttaggaggtagaggttgtagtgagttaagatcgtgttattgttagttttggtgatagagcgaggtttcgttttagaaaaaaaaaataggaattttaataattttatgtttttatatttatttttttaagttttacggtagattaggtgtttttttgtttgaggtatatatttttgttagttttttgtattttatttttttgtgttcgttttttagatttttattttttttgtttttttaggaattgtagttaatgggttttttatttaataagtttttgggttttgtaattattattttattgaaatttttaacgaggttattaagaattttttgtgtttaatttagtagattttttgttttattttttttgatttttttgtagtatttgatattagaatttttggttttttgtatttatatgttttgatttgtgaaattatatttttttagttttttttttagatttttgtgtttttattttattttttaggatttttttttggttgttaaatatttatgaattttaaagttgtgtgtaatttgtttttattttattttttatattattttttatgtggttttatttatttttatggttttagtcgtcgtatatatattagtaatttttaatgtaagtttttagtttagtttttttttttgattataaatttatatgttttattgtttttaaaatatttgttttggatgttttaagatattttaaaaattttaaattaaattttttattttattagtttttatgtttttaatttttaaaagtgggtattattaattcgtttttgtaaattagaaatatgggtatttatttagttcgtttttttttgttagttattagaaagttttattagttttttttttttaattttaattttttattttttttcgttttattattattttatttaagttataattattttttgttttaattttttgtagtagtttttttggtcggtaatattgtaatttattttttatatcgtatttagagtgatttttttaaattttaattatgttagttttttgtttaaagttttaaaattttttttgaagaaatttgtatgatatatttttttatttttggttaatttgttatattttgtttattttaaattttagtaagttttgttgtttttattttatttttttttttatatttgtattttttatttggttttttttttaagttttagtttaattattattttttttaaaagttttttttgattattaaaaattaggttaggtatttttttattttttatagtattttgtgtttttttttatggtagttttagtagtagagttttgtaaatatttgttttttatttaagagagataaatttaagtttaaattttttaaagttaagattttttgttttgtttatttttgtagttttagtatttggtttaggatatggtatttattattttatttgataattattttttgagtgataattggatattaggtattagtatattggttgaagtgtggaatggggaaattttaagag

SEQ ID NO: 51 - DNA, 5975 bp, Artificial Sequence
  chemically treated genomic DNA (Homo sapiens)
agtataatgagatattattttatatttattaggttagttttaataagaaagatagataataataagtattggcgaggatgtggagaaattggaatttttatatattgttggtgggaatgtaaaatagaatagttgttttggaaaatagtttggtagttttttaaaaggttaaatatagcgatggtatatgatttagtaattttatttttaggtatttatttaagagatatgataacgtaagtttatagaaagatttatatatgaatatttatagtagcgttatttttaatagttaaaaagtggaattaatttaaaagtttattaattgacgaataaataaaatgttgtatgtttttataatggaatattattttgttaaaaaaagaatgaagtattgatattatgatatggatattttttgaaaatattatatcggttataaagattatgtattgtaggattttatttatatgaaatatttaggataggtatatttatagagatagaaagtagatttgtggttattaggagttggggcgtggatttgaggaatatgggaagtgattgttgttgggtatgggggttttttttggggtgatgaaagtgttttaaaattgattgtggtggtagttgtataattttgaatatattaaaattattgaattgtatattttaatgggtaaattttatggtatgtgaattatattttaataaagttgttttaaaaagaagaggaaagaaagaaaagaaatagggttatagagatttaaaataaggattgtttatttttaatattttttatattttgttattttattttaagtttaggttatattaggttttaagttttgaattttagattttagttttaaatttggagtttaggggataagtatatggttagtatttggttgaagattaggtttgggaagggggagtttttgttaaggttattgtggaagaggttaggaattttggtttagttgagttagttagtttgtgtggaattgagggagagagggtgggaggggataggtattgggttagggaggggaggttgttttaggagtaaaatttggattttgttaataattacgatttttattgttatttattatgataattatagggtttttttttttatttttgaataaagagttttttttttattttaggtttttgttaatttttttttaggttgagagggttgatgttagaggaataggggttttatttattggattagttgtcgttttggtttttttttaatttttgtggggttttatataacgggaattggagttgggggagttatgtaagggaagaagaggttggtagaattttattagtttttatagttggatttttatatataaatatatatataaatttatgtatgtaggtttatagaaaatatttgggtgggtaagagtacgtttgtagttttagtttgtgtgtgtgtaggtatgtatgtgaggagaaggaatttggagatattatttttttatatttgggttttattatataatgaatatagtttagaaattgtatgtatgggttttagtatatagttttttaaagatataattatagttttatagttttttaaattgtatatttttcgaattttatatagttagggtggtttttgtatttgttgtttttgttagaagatgttttgaggttttttttgtgggtttagtttatgtattaggtttataaatatttaggtgaatttatatttatagaggtttgttttttttaaggtgaggtttaaggggtagttaatttaaagtgaggtttttgtaatttacgttgaggtttagaaagttattattttagattttaggtattttgatttagtttttgggggtcgggaggttagtttagttagtttagtttggattttttggaatttatttttgtttttagagaagagaaaattatagttattttaattttgttttagtggagtttgaaattgaattaaattttaatttttattatttttattttatttttagtttattatttatatatattatagggtaaggttggaaggtttttttagatttttattagagtttttaaaaagtttaatttagttttgtttgtaaattttagtgtaaatttatttagttttttggggagggttttgagtcgtaggagggttaaaggttatagaaataggttaagggttagaaagattagagaatagggatgggtaagggtagggatgattagggtgggtttaaaagggtatagattttgttttagaaggtttattagaagttatgatttttagagagatatttgggttttagtttttttatattttaggggtggagaaggtttcggtagagaatcgaaattagtattaaagagagggaaaataaattatttatatttaatttttattttatgttagttatttttattgtttacgggtatttttttttgagagagagaaaattataggtttatatttttaatatatggagtttagtttaagtatagtagaaaaaggggtagggggttagagtatttgtaattagttttatatttttgtttattggggtcgtttttatttttagaaggtgttaggattttttttttagtattagtatttttagttgtttacgcgttatattttagagttatatatttagagaaaaaggtgagagttttttgagttacgaagatgggagaaagaattagaagtcggaagggttaaattttagttttgttattttgggtgattttacgtaagttatttaatttttttaagtatttgtttattcgtttgtgaattgtttattttaataacgagttgtgcgattttagataggaagttttggaaagtatttagattagagtttggtataggggaggttcgggtaattggagttttttatttttatgttttttgttattattttggtgtttttcgttttattattttattaagatattagaaatattatttagtttttttaaaagtttttattgtggttaagagcggtggtttatgtttgtaattttagtattgtgggaggttgaggtgggtggattatgaagttaggagtttgagattaatttggttaatatggtgaaatttttttattaaaaatttaaatattagttaggcgtggtgacgcgtgtttgtagtttcggttatttaggaggttgaggtaggagaatggtttgaatttaggtggtggagattgtagtgagtcgagattatggtacggtatttaagtttgggtgataaaatgagatttgttttaaaaataaaaaaaaaaaaaagtttttattgtgtggtaattttttttatttatggtagtttattttttttatttttgtagtttttagttgttaaaaagtttttacgaaatgtattttattatttttttttgtttagaatttgaatttgtttaattatttttttatgataaagtggttaagagtttgattttttgttagagtttagagtttaaattttagtttttttatttattagttgtgtgattttgggtaagtttatttaatttttttttattgtagtttttttatttgtaaagtgaaataatattaggtttatgggggtgtttgtgaagattaataaggtgatgtaggtaaaatattgagtatagtttttggtatatatttaagtatttaatattggttttttttatgaattaggtattaatttattgatgatcgtaatattgttgtttttttttttttaagttttatggttttattttgtttgttattgaggggtaaaagataaatgtttattattatttagaattgggttttggtttttaaaggaatttgaagtttagatgaattattggttttggaagttggtttttaaattattgcgttaatttatattttttattaaaaatttagtttgttttttttatatagttgttttttttggttttgaaattttagtgtttcgttataaaagattttaaaattaaagggttataattttttttttatgatgtgtggattaatggtaagaagatgtatagaatataatatttttaggttgaacgaaataaaagtaaagagttggttttgttttttatttttgaagtataaattaagagatattatgatgaagtatagtttttttttatataggtgtgtagaattttattataaaaattattagtttagttattaggagatttggattttaggttttttattgttattaagatgttgtgatttttaattttgtatagaagtttgttttgtattttgcgaggttgagtattagagaggtaaggaaagtgtttagtattatatttggcgtatagaatttaaaacggtaggtattatgtagtagttttgaaaatttagtttattaggatgatgtaaatgggtattttaggtagtgagaaggggaattatattttgatatttttagtcgaaggaagagtgcgattgcgcggtagtaaagattacgttttttagcgtgttttgcggcgggtcggttcgttttatttagagtcgttttgtcgtaatcgcgcgtttttttatcgaggtttcggatgtagattttttttttcgtttagtggtcgtggttttatagcgattttaagatttggggtttttttattggttgtaatttttttattggattggtagtaaaaaaagaggcggtgtttaaggcgaaaggttttgtgattatagttaattagaatcgaggtcgggttttggcgggaggtgggaacgttgtggttattcggatttggcgcgagcgcggttggagtttgttgttgtcgttgtgtagtttgtttaggggtttgtggtggtgagttcgagaggttgcgtgtgagagacgtgagaaggattttgtattgaggaggtggaaagaagaggattgttcgaggaggtttggggtttgtgaggtagcggagttgggtgaaggttgcgggtttcggcgaggtttgaggtgaagtgaagggaaaagagttgagttcgttggaggtttgaggtcgggattagggaaagggtaggtgttttcggggtagttttagtagttatgcgtggtgtgaaggaggtgaaagttgtaggaaggaaatattttggggtgcgttgagagttgtttagaatgaggattgagtgtaggggcggaaagaattgagggaagattgagttgtagtgtgagggtttgggatagaagagattaaatgtggcgggtgttgggttgaattggtgataaagatatttcgcgtgtttggagggaggaaattagaagttttatataaattaatttatgtaatttttttttttttttgagacggagtttcgtttttgtcgtttaggttgtagtgtagtggtgcgatttcggtttattgtaatttttgtttgtcgggtttaagttatttttttgttttagtttttttatgtagttgggattataggcgttcgttattacgttcggttaattttttttttttttttgagacggagtttcgttcggttttttaggttggagtgtagtggcgcgatttcggtttattgtaagtttcgtttttcgggtttatgttatttttttgttttagtttttcgagtagttgggattataggcgtttattattacgttcggttaattttttgtatttttagtagagacggggttttatcgtgttagttaggatggtttcggttcgtttcggttttttaaagtgttgggattataggcgtgagttatcgcgtttggtcgtaatttttgtatttttagtagagacggggtttttttatgttggttaggttggtttcgaatttttgattttaggtgattcgttcgttttagttttttaaagtgttgggattataggcgtgggttatcgcgttcggtttattttaggtaatttgttattgtatcgtttaattggttaagaatttgggttttggtattagatgttcggggttatatttttgtttttttg

SEQ ID NO: 52 - DNA, 5975 bp, Artificial Sequence
  chemically treated genomic DNA (Homo sapiens)
tagaaaaataggaatgtaatttcgggtatttggtgttagagtttaagtttttaattaattgagcgatgtaataataagttatttgaaatgggtcgggcgcggtggtttacgtttgtaattttagtattttgggaggttgaggcgggcggattatttgaggttaggagttcgagattagtttgattaatatggagaaatttcgtttttattaaaaatataaaaattacggttaaacgcggtggtttacgtttgtaattttaatattttgggaggtcgagacgggtcgagattattttggttaatacggtgaaatttcgtttttattaaaaatgtaaaaaattagtcgggcgtggtggtgggcgtttgtagttttagttattcgggaggttgaggtaggagaatggtatgaattcgggaggcggagtttgtagtgagtcgagatcgcgttattgtattttagtttgggagatcgagcgagatttcgttttaaaaaaaaaaaaaaaattagtcggacgtggtggcgggcgtttgtagttttagttatatgaagaggttgaggtaggagaatggtttgaattcggtaggtagaggttgtagtgagtcgagatcgtattattgtattatagtttgggcgataagagcgagatttcgttttaaaaaaaaaaaaaagttatatgaattgatttatatagaatttttagttttttttttttaggtacgcggggtgtttttattattagtttagtttagtattcgttatatttagttttttttattttaagtttttatattgtagtttagtttttttttagtttttttcgtttttgtatttagtttttattttaggtagtttttaacgtattttagaatattttttttttataatttttattttttttatattacgtataattgttagaattatttcgagggtatttgttttttttttgatttcgattttagatttttagcgagtttagtttttttttttttattttattttaggtttcgtcggaattcgtagtttttatttagtttcgttgttttatagattttaggttttttcgagtaatttttttttttttatttttttagtgtaggattttttttacgttttttatacgtagtttttcggatttattattataagtttttgaataaattgtatagcggtagtagtaaattttagtcgcgttcgcgttaaattcgaatggttatagcgtttttatttttcgttaaagttcggtttcgattttgattggttgtagttatagagtttttcgttttgggtatcgtttttttttttgttattaatttagtggaagagttatagttaatgagagagttttaagttttagagtcgttgtgaggttacgattattgaacgggggagggaatttatattcggggtttcggtggaaagacgcgcgattgcggtagggcgattttgggtaaagcgggtcggttcgtcgtaaagtacgttgggaggcgtagtttttgttgtcgcgtagtcgtatttttttttcgattggaagtgttaagatgtggtttttttttttattgtttaaagtatttatttgtattattttgatgggttagatttttagaattgttatatgatatttatcgttttgggttttgtgcgttaggtatgatgttaggtattttttttatttttttaatgtttaatttcgtaaagtataaagtaaatttttatataaggttagaggttatagtattttggtgatagtgaagagtttaggatttagattttttgatggttgaattagtgatttttatggtaaagttttatatatttatataaagaaaaattatgttttattatagtattttttgatttgtgttttaaaggtgagaaatagagttaattttttatttttatttcgtttaatttaagaatattatgttttgtgtatttttttattattaatttatatattatggggagggaattatgattttttaattttaaaattttttatggcgaaatattagggttttagggttagggaagatagttatatagaagaggtaagttgagtttttaatgaaaaatataaattagcgtagtaatttgaaggttagtttttaaagttaataatttatttaagttttaggtttttttagaggttagaatttaattttaggtgatggtaaatatttattttttattttttagtaataaataaaatagagttataaagtttagaaagagggaagtaataatattacgattattagtgaattggtatttagtttatgaagagagttaatattgagtgtttaagtgtatgttaggggttgtgtttagtattttatttatattattttattaatttttataagtatttttatgaatttggtgttattttattttataaatgagggaattatagtagaggggagttgagtaaatttgtttaaggttatataattagtaagtggaagagttagaatttgaattttgaattttgatagaaaattaaatttttgattattttattatagggggatgattagatagatttaggttttaaataggaagagatggtggagtatatttcgtgaaggttttttagtagttgaaaattataaaagtgaagagaatgggttgttatgaatggagaaagttattatataatggaagtttttttttttttttatttttgagataagttttattttattatttaggtttgagtgtcgtgttatgatttcggtttattgtaatttttattatttgggtttaagttatttttttgttttagttttttgagtagtcgggattataggtacgcgttattacgtttggttaatatttgaatttttagtagaggggttttattatgttggttaggttggttttaaatttttgattttatgatttatttattttagttttttatagtgttgggattataggtatgaattatcgtttttggttatagtggaagtttttaaaaggattagatggtatttttgatgttttagtaggatagtagaacgaggggtattaaggtggtggtaagaggtatggggatggagggttttagttgttcgggttttttttgtgttaagttttggtttgggtgttttttaggattttttgtttgaaatcgtatagttcgttgttgaggtaggtagtttataggcgagtaaatagatgtttagagaggttaagtgatttgcgtaaggttatttagagtggtagagttgagatttgattttttcgatttttggtttttttttttattttcgtggtttagaaagtttttatttttttttttaggtgtgtgattttggggtgtaacgcgtgggtagttagggatgttgatgttggagaagggattttggtattttttgagggtgagagcggttttagtgggtaggagtgtggggttggttgtaggtgttttagttttttatttttttttttgttgtgtttaggttaggttttatatattggaggtgtgggtttgtggtttttttttttttaggggagggtgttcgtgggtagtggaggtggttggtatagggtggaggttggatgtgggtagtttgttttttttttttttggtattggtttcgattttttgtcgaggttttttttatttttggggtgtaggggggttggggtttaggtgtttttttgagggttatagtttttgatggattttttgaggtagagtttgtgtttttttgggtttattttggttatttttatttttgtttatttttgttttttggtttttttggtttttggtttatttttgtgatttttagtttttttgcggtttaaggttttttttagggagttgagtaaatttgtattgaaatttgtaggtagagttgggttaggttttttggaggttttgataggggtttggggaggttttttagttttgttttgtagtgtgtgtgggtggtgggttgggggtgaggtgggggtagtggggattgaagtttgatttaattttaaattttattggggtagagttgaggtggttgtggtttttttttttttgggagtaagggtgggttttagagggtttaggttggattgattaaattggtttttcgatttttaaaggttgggttaggatgtttgagatttggagtgatggttttttgggttttagcgtgggttatagaggttttattttgggttagttgttttttgggttttattttgagagaggtaggtttttgtggatgtgaatttatttgagtgtttgtggatttggtgtatgggttgggtttatagggaggattttagagtattttttggtagaagtagtaggtataagggttattttggttgtgtgaggttcggagaatgtatagtttgggagattgtggggttgtggttgtgtttttggggagttgtgtattggggtttatgtatgtagtttttgagttgtgtttattgtgtggtggagtttaggtgtggagagatggtatttttaggttttttttttttatatgtatgtttgtatatatataggttggggttgtaggcgtgtttttgtttatttagatgttttttgtagatttgtatgtatgagtttgtatgtgtatttgtgtgtgagggtttaattgtaggaattgatgaggttttgttagttttttttttttttgtatggtttttttagttttagttttcgttgtgtggggttttataggagttgggagggggttagggcggtaattggtttagtgggtggggtttttgtttttttgatattagtttttttagtttaggagggaattggtaggggtttggggtaggaagggagttttttatttaggagtgaggagagaggttttatgattgttataatgagtaatagtaaaaatcgtggttattagtaaggtttagattttatttttggggtagttttttttttttagtttagtatttgtttttttttatttttttttttttagttttatataggttggttggtttagttgggttagaatttttggttttttttatagtggttttggtaggaattttttttttttaggtttggtttttaattaaatgttggttatgtgtttgttttttggattttagatttgaggttagagtttggagtttagagtttggaatttagtgtagtttgagtttggggtggagtggtaaggtatagggggtgttggaaatggatagtttttattttgagtttttgtggttttgttttttttttttttttttttttttttttaaaatagttttattgagatataatttatatattataaaatttatttattaaagtgtataatttagtggttttagtatatttagagttgtgtaattattattataattaattttagaatatttttattattttagaaagagtttttatatttagtaatagttattttttatattttttaaatttacgttttagtttttggtaattataagtttgttttttgtttttataaatgtgtttattttggatattttatataaatggaattttataatatatggtttttgtaatcggtataatgtttttaaggaatatttatattatagtattagtattttattttttttttggtagaataatgttttattgtagggatatataatattttatttattcgttagttgatggatttttgggttgattttattttttgattattaggaataacgttgttgtgaatgtttatgtataagtttttttgtggatttacgttgttatattttttgggtagatatttaggagtagaattgttgggttatatgttatcgttgtgtttaattttttgaggaattgttaaattgttttttaaaatagttattttattttatatttttattagtaatatatgaggattttaatttttttatattttcgttagtatttgttattatttgttttttttattagagttagtttagtgggtatgaagtggtattttattgtgtt

SEQ ID NO: 53 - DNA, 6621 bp, Artificial Sequence
  chemically treated genomic DNA (Homo sapiens)
tttgtatttttagtagagatggggttttttttttttttttttttttttttttgagagggagtttcgtattgttatttaggttggagtgtagtagtgttatttttatttattttaattatcgttttttaggtttaagtaatttttttgttttagttttttaagtagttgggattataggtgtttattattacgtattattaattttttgtatttttagtagagatggggttttattatgttagttaggttggttttgaatttttgattttatgatttatttatttcggttttttaaagtgttgggattataggcgtgagttattatgttcggttaagatggtgttttatcgtgttggttaggttggttttgaatttttgatttcggttttttaaagtgtcgggattataggtgtgagttattgtgttcggttaggagttttattgtgaagggaaggaatgaatatagttggaggggaaagtggtattaaggaaaggttttttattattaataataaatattttattgaaatatattatttatatagaatagttaataaattttgagtgtgtagtttaatgaatttttataaggtgaatatatttaggtaattagtatttagattaagaaatggaaagtggttaggtgtagtggtttatgtatataatgttaatattttgggagtttaagacgggaggatcgtttgagttcgagagtttgagattagtttgggtattatagttagattttcgtttttaaaattatatatatatttttttttgagatagagttttgttttgttgtttaggttggagtgtaatggtatgattttagtttattgtaattttcgttttttgggtttaagtgattttattgttttagttttttaagtagttgggattataggcgtgtgttattatattcggttaattttttgtatttttagtagagacggagttttgttatgttggttatattggtttcgaatttttgattttatgatttatttatttcggttttttaaggtgttgggattataggcgtgagttattatgtttagttaaaataaaaaataaaatttttaattagttaggtttatgggtgtatgtttgtagtttaggttatttaggaagttgaggtgggaggattatttgaatttagaagttcgaggttatagtgagttatgattatgttattgtattttaatttgggttatagagtaagattttgttttaaaaagtgaaaaataaataagaaatagaatatgattagttgttaatattttttttatggttttttgtagttattattatttttttgaaaggtaattagtattataattaattttttttttttttgagacggagtttcgttttgttatttaggttggagtgtagtggtttaatttcggtttattgtaatttttattttttgggtttaagtaatttttatgttttagtttttatagtagttgggattatagttgtgtattattatatatggttaatttttgtgtatgtatatatgtgtgtatatatatgtttgtgtatattatatgtgtgtatatatgtatattatatatgtgtgtatatatgtatatatatatatatatgtatatgtatatatatatatatatgtatatgtatatatatatatatatgtatatgtatgtatatatatatatgtatattatgtatatatatatatgtatgtatattatgtatatatatatatatatatgtgtgtgtgtgtatatatatatatatttttttttagtagagatgaggttttattatgttggttaggttggtttcgaatttttggttttaagtgattcgtttgttttagttttttaaagtgttgggattataggtgtgagttagatttaaatagtatgttttttttgtgtttttttttttatgtttgatagttgatgtgagatttatttttattgtgggtagcgtttttgttttttttattattgtataaaataattttgttttatttatttattttattgttgatgggtattagggttgttttttgtttggagttaaaatgattaatatggttatgaatatttgtgtatatgtattttggtatatttgaattgtattgtagtttttgtgttaatttttttttttttatggttttttgtggttattttttcgtttttttatatgatttttatagttgtttgtgattttattttggttatttttagtgatttttttgggtgtatttttgaattatggattcggttatttttttgtggtttttattttagttttagttttgcggttttgttttattatattaagtttttaatgttggtgttttttagatttagggttttaaaaattttttgtatatttttaatgggtattattatttttatgttaattaatattaaatttgttttttgattatattttttagttagtttattagtataaaattgagtttattaaatttttttaagaagtatgtttttaattgttgaaatgttatatttatttaggtatttgaattattatttaagaattattttagtttttttttttttttttagttttttataattttaatttttaattattaaaatttgatgagatttattttttttagggtttatagaattattttttttttttgtttttaaggtttttattttgttttagaattttttagatttttgagatagttattttttttttttttaggtttttttatttttttttattgatttattttaaagtaaatttgattcggttattatatattttttattgtttataggataaggttaaattttttagtaaattttaatttttttaagaattgttttttatagttagttttatgtgtttattttagaatcgattggattaatttaggagtagttttcggtaagtacggcgtttttttttattttttggttgtcgagggtcgtttttttagaaagtattttttattagttttaagttttttttttttagtaattttgatttttagttttaattttttttaggacgtgttttttatcgtattgttttttttagttttcgttttttttttaggtgtttattatttttttataaattatagttattgttatggtaataattttattattagaaggagttttatgtttagcggattagagttttttgagagtagggattgtggtattattttaagtattgaatttgttttagtaatttttaaataaatatatgttgaatgaatgaatgtagtaataggaatgttgagttaagttttgtttttgttttttgagacggagtttcgttttgttgtttaggttggagtgtagtggttcggttttggtttattgtaagtttcgtttttcgagtttagttatttttttgttttagtttttcgagtagttgggattataggcgttcgttattacgttcggtaattttttgtatttttagtagagtcgggttttattatgttagttaggatggtttcgattttttgatttcgtgattcgttcgtttcggttttttaaagtgttgggattataggcgtgagttatcgttttcggtttgttgagttaagtattaaattatataaaatataggaggagaggaaagtatttagagatacgatagggagaattatttgaaatagtgggattatagattatgtgaattgtgtagagaggtttaaatagtttggggtttttggagggaagggaggtttttgggtggtggagtattggtgtatagaaaaggagatgaattttgagagagaggttttttattgtgaagggtttggtgttggggttaaaggtttggggtttttatttgtttagtatggttttttaaattgtagggttttttttttttgagtggggggtagggggtgttttattttgttgtttaggttggttttaaattcgtgggtttaggtaatttttttatttcgtttttttaaagtgttgggatgataggcgtgagttattaagtttagtagtaggttgtaattaaattatgtatttatggtttttaaaattcgtttaggagttgttataggttcggcgttgtaaaagtaaatatgtttatttagaaaatggggataatttttatgttatagagttgtaaagattaaatgaattaatatagattaatatattgggaatagtgttaagtgtataagtattatgtaaattttagttattatttgttattattgtgtttgttgttatttttttttaggagtttttagggggttaagaagtggtgggaaagaaagaaatgattttaagagtatttaataagggttagaatggaagtgagtaaaaaatgttgaggtttatagtataggttgtattgcggggtttaaattttatgaggttagtagtatttagggtttgtgagttttttagagttgggttttggtggtcgagtttagttttgggggttattgtatttttttttttattataaaatggggtttggaggttcggggcggaagaaaggggtttataatattgtacggttagaggtcgagttaaggttggattcggttagatttttataggttttttttagtttttatattgttttagagtgtggggcgttcggttgggggcgaggtagcggaggtttaaagggggtcgaagttaattggacggtagttcgcgatgggaattacgttttttagtatgcgacggggtaaaggggttttttagtcgcgagtagcgtttcgtaggttttgttgggagtttttattgatttttgtttttttttttattttgattttcgtttttttgttttgggtttcgtttttttttgagagtcgatgatttggtagagtttcgcgagtcgttttttttttttttttttattggtttagtttagttgttattcggttgagaggaggagaagttgtttattgattggtggatttcgtttggcgttaattaggaaaggggggcggggtagtagttggttttattgagtcgttattatcgcgaaaggtcggtttggttgcgatagtttgggtaagaggtgtaggtcggtttggttttttgttattcggagttgggtaagcgggtgggagaatagcgaagatagcgtgagtttgggtcgttgtttcgaggttttcgttcggttttttttgtcgattcgttacgtttgtttggatttaatttttaggttgtcggcgttcgttcgttcgttggtttcgcggtgtgagagggaagtattcgtgtttgtggttggtggttggcgtttggagggttcgtatattcgttcggtcgcgtcgtttgttcgcggtagtcgcgtttttgaatcgcggagtcgtgtttgtgtttgattcgcgggcgtcggtggcgcgcggtcgaggtcggtgtcggcggggcggggcggtcgcggcggaggtagaggaagagggagcgggagttttgcgaggtcgggcgtcgttatggaattgggttcggagttttcgtatcgtcgtcgtatgtttttcgtttgtagtttttttttcgcgtcgtagttcgtcgtgaaggcgttatttggcgttttagtcgtcgggggattgtcgtttgttattaatttgatcgttattatggattagttgtagggtttgggtaggtaaggagagatcggcgggcggtgtttcgggtttttggtttcggtgtcggtttcggagagattaggttaggaaacggatcgggagaagggcgagattcgttcgttcgggttcgtcgttcggggatagtcgggttagggtttgttatgtgtattttcgttcgggcggaatgttgggcgggagaggtcgtcgggattttttaggggaagaggtggagatttttgggtttaagttcgagttaggtttatttttatttttttcggattgtttcgtattttttttttatttttatttttggaagttttttggaatttattttcgcggggaaaattaggtttttttaggtatttatttttattttttgttaaattatttttaggattttcgtttgttgtgatttttgtttttttttaataaaggattatggtatttttttttttggcgtttatgtaaaattattttagtttttcgttttgtgtatatttttgatgtttattttgttgtttttttaaggttaggtttttttatttaatttttagaaagttttttgggttttttttgatagtaaaaaatgtattttacggtgtttttcgcggaagagttattttttttttaatttttggtatttcgtttgttaagtatatgttttgtgcgttttttaatttttgaaaagtagaaagtgttttgtttaatttttatttcgattttgttttagtatttagaatatatgtttttattttaggaaatattttaatatttgttatagttattataatttgtaatgtggtttaaggttatgtttatttatttttttttttttttttgtttaagtgttaattgggtgtttagagtggtaaagtgggatttttgttatttgtggtgtggtttagaaatggtttttggtagtttggttgttttttaattttatggtttattttttgtatgtgattttttaattatattttataaattatttatggtttatttttgttggttttagt

SEQ ID NO: 54 - DNA, 6621 bp, Artificial Sequence
  chemically treated genomic DNA (Homo sapiens)
attgaaattaatagaaataaattatgaatgatttataggatataattaaaaggttatatgtaggagataggttatgagattaagaagtagttaggttgttagaaattatttttaggttatattataagtggtaaagattttattttgttattttgaatatttaattagtatttgggtaaaggagaaaaaaggagtgggtgggtatggttttggattatattgtaggttatgatggttatggtaaatgttggggtattttttaaaataaaagtatgtgttttaagtattgagatagagtcgggatgaaagttgaataggatattttttgttttttagaagttgggaaacgtataagatatgtgtttagtaaacgggatgttagagattgaagggaaagtagttttttcgcgggaaatatcgtgggatgtattttttgttattaggaaaagtttaggaagttttttgaaagttgggtaaaaagatttggttttaggaaagtagtagagtggatattaggaatgtgtatagggcgagggattgagatgattttatataaacgttaggaaagaaaatgttatggttttttgttgagaaggaataaagattatagtaaacgaagattttgaggatggtttagtaaagggtgaaagtgagtgtttagaagagtttgatttttttcgcgggggtagattttaaagagtttttagggatagagatagaaggagagtacggagtaattcgaaaggggtgaaggtgggtttggttcgggtttaggtttaaggatttttatttttttttttggaaggtttcgacggtttttttcgtttaatatttcgttcgggcgggggtgtatatggtaggttttagttcggttgttttcgagcggcgaattcggacggacgggtttcgtttttttttcggttcgttttttggtttgattttttcgaggtcgatatcgaggttaggggttcggagtatcgttcgtcggtttttttttatttgtttagattttgtagttggtttatagtgacggttaggttggtgataggcgatagtttttcggcggttgaagcgttaaatagcgtttttacgacgggttgcgacgcgggaggggggttgtaggcgaagagtatgcggcggcggtgcgggggtttcgggtttagttttatggcggcgttcggtttcgtagagttttcgttttttttttttttgttttcgtcgcgatcgtttcgtttcgtcgatatcggtttcggtcgcgcgttatcggcgttcgcgggttaaatataaatacgatttcgcggtttagggacgcggttgtcgcgggtaagcggcgcggtcgggcgggtgtgcggattttttaggcgttagttattagttataggtacgggtgttttttttttatatcgcgaggttagcgggcgggcgggcgtcggtaatttgaagattaaatttaaataaacgtggcgggtcggtaagagaagtcgggcgagagtttcgaggtaacggtttaggtttacgttgttttcgttgtttttttattcgtttgtttagtttcgggtagtagaaaattaagtcgatttatattttttatttaggttgtcgtagttaggtcggtttttcgcggtaatagcggtttagtggggttagttgttgtttcgttttttttttttagttggcgttaaacggaatttattaattagtaagtaattttttttttttttaatcgaatggtagttaggttgggttaatgagaggggaagaagaaagcggttcgcgggattttgttaggttatcggtttttagaagggggcggagtttagagtagaagagcggggattaaaatgagagggggagtagaggttaatgaaaatttttagtagaatttgcgaggcgttgttcgcggttgaaaggtttttttgtttcgtcgtatgttgggaagcgtagtttttatcgcgagttgtcgtttagttagtttcggttttttttgggttttcgttatttcgtttttagtcgggcgttttatattttgaggtaatgtggaggttaaggaagatttgtggaggtttggtcggatttagttttggttcggtttttaatcgtgtagtattgtggatttttttttttcgtttcgggtttttaggttttattttataatgagggagggaatgtaatgatttttaggattggattcgattattagggtttaattttggagggtttatagattttgggtgttgttggttttatgggatttgaatttcgtagtataatttgtgttgtgggttttagtattttttgtttatttttattttagtttttattggatgtttttagaattattttttttttttttattattttttagttttttgggagtttttagagagaaataatagtaaatataataatagtaaataatagttaaagtttatataatgtttatgtatttgatattgtttttagtgtgttaatttgtattaatttatttaatttttataattttgtgatataggaattatttttattttttaagtgggtatatttatttttatagcgtcgaatttgtggtagtttttagacggattttgagggttataagtgtatgatttaattgtaatttattgttgggtttagtggtttacgtttattattttagtattttgggagggcgaggtgggaggattgtttgagtttacgaatttgagattagtttgggtaataaagtgagatattttttgttttttatttaaaaaaaaaaaattttatagtttgaaaagttatgttggataggtggaaattttaaatttttggttttaatattagattttttatagtgaggaattttttttttaggatttatttttttttttgtgtattagtgttttattatttaggaattttttttttttttagaaattttaggttatttaggtttttttgtatagtttatatggtttgtggttttattgttttaaatagttttttttgtcgtatttttgaatatttttttttttttttgtgttttatgtggtttaatatttggtttaataggtcgggagcggtggtttacgtttgtaattttagtattttgggagatcgaggcgggcggattacggggttaggagatcgagattattttggttaatatggtgaaattcggttttattaaaaatataaaaaattatcgggcgtggtggcgggcgtttgtagttttagttattcgggaggttgaggtagaagaatggttgaattcgggaggcggagtttgtagtgagttaagatcgagttattgtattttagtttgggtaatagagcgagatttcgttttaaaaaataaaaataaaatttggtttaatatttttgttattgtatttatttatttaatatatgtttatttaaggattattagaataaatttagtgtttgaaataatattataatttttgtttttagggagttttggttcgttgagtataaagttttttttaataatggaattattattatgataatagttgtggtttgtggagggatggtgggtatttagaggaggggcggggattggggaaggtagtacggtggggggtacgttttaaaggagattaaaattaaaggttaaggttgttggagaaggggagtttggggttggtgggaagtgttttttaaggaaacggttttcggtagttaggaggtgaggaggaacgtcgtatttgtcgggagttatttttgagttgatttagtcggttttagaatgggtatatgggattggttgtgagggatagtttttgaaaggattggagtttgttgaagagtttggttttattttgtggatagtggagggtgtgtgataatcggattagatttgttttagggtggattagtggaggagagtggggaggtttgaggaaaaaggaggtggttgttttaaaagtttgggagattttgaagtaaggtgggggttttggagataaaggaagggaatgattttgtgagttttgaaggaggtagattttattagattttgataattgagagttaagattgtagggggttagagggaagggaggaggttagaatgatttttaggtaatgatttaagtatttgggtggatgtaatattttaataattggaggtatattttttggaggaatttgatgagtttagttttgtgttggtggattggttggggggtgtagttaggaggtagatttggtgttgattagtatgaagatggtaatgtttattgaggatgtataaagggtttttaggattttggatttggggagtattagtattgaggatttgatgtagtgagataggatcgtaaagttggggttgagatagaaattataagggagtagtcgagtttatagtttagaggtgtatttaggagagttattgaaggtggttagaatgaggttataggtaattatggaaattatgtaggaaggcgaggaggtggttatagaaggttatgggaagggaaaagttggtatagaagttataatatagtttaagtgtgttaaaatgtatgtatataaatatttatggttatgttaattattttagttttaaatagaaagtaattttaatgtttattaataataaaatgggtaaatagaataaagttattttatatagtgatgaaaaggatagaagcgttatttatagtaggagtgaattttatattaattgttaaatataagaaggaagatataaaagagatatgttgtttaggtttggtttatatttgtaattttagtattttgggaggttgaggtaggcgaattatttgaggttaggagttcgagattagtttggttaatatagtgaaattttatttttattaaaaaaaaatatatatatatatatatatatatatatatatgtgtgtatatatatataatatatatatatgtgtatatatatataatatatatatatatgtgtatatatatatatatatatatgtatatatatatatatatatatatgtatatatatatatatatatatatgtatatatatatatatatatatatatgtaatatatatatatatatatatgtaatatatataaatatatatatatatatatatatatatatataaaaattagttatgtatggtggtgtataattgtaattttagttattatggaggttgaggtatgagaattgtttgaatttaggaggtggaggttgtagtgaatcgagattgagttattgtattttagtttgggtgatagggcgagatttcgttttaaaaaaaaaaaaagttagttatggtattagttattttttagaaagatggtggtgattgtaaggggttatgaaggggatattggtaattggttatattttgttttttatttattttttattttttgagatagagttttgttttgtggtttaggttggagtgtagtgatatgattatggtttattatagtttcgaatttttgggtttaagtgatttttttattttagttttttgagtagtttgaattataggtatgtatttataaatttagttaattaaaaattttattttttattttggttgggtatggtggtttacgtttgtaattttagtattttgggaaatcgaggtgggtggattatgaggttaggagttcgagattagtgtggttaatatggtaaaatttcgtttttattaaaaatataaaaaattagtcgggtgtggtggtatacgtttgtaattttagttatttgggagattgaggtagtagaattatttgaatttaggaggcggaggttatagtgaattgagattatgttattgtattttagtttgggtaatagagtaagattttgttttagaaaaaaatatatgtataattttagagacgggagtttaattatgatgtttaggttggttttaaattttcgagtttaagcgattttttcgttttggatttttaaagtgttagtattatatgtatgagttattgtatttggttattttttattttttgatttgggtgttggttatttgagtgtgtttattttgtggaaatttattgagttatatatttaagatttgttagttgttttgtatgaatggtgtattttaatgaaatgtttattattagtgataaaaagtttttttttgatgttatttttttttttaattatatttattttttttttttatagtaaaatttttggtcgggtatagtgatttatatttgtaatttcggtattttgggaggtcgaggttaggagtttaaaattagtttggttaatacggtgaaatattattttggtcgggtatggtggtttacgtttgtaattttagtattttgggaaatcgagatgggtggattatgaggttaggagtttaagattagtttggttaatatagtgaaattttatttttattaaaaatataaaaaattagtggtgcgtggtggtgggtatttgtaattttagttatttgggaggttgaggtaagagaattgtttgaatttgggaagcggtggttgaagtgagtggagatggtattattgtattttagtttgggtgatagtgcgagatttttttttaaaaaaaaaaaaaaaaaagaaaagaaagttttatttttattaaaaatataaa

SEQ ID NO: 55 - DNA, 5551 bp, Artificial Sequence
  chemically treated genomic DNA (Homo sapiens)
gttaggggttatgaagtaggggatatatggtttttaataattgtttttatgtattagatattatgttatatttttttttttttgtaaaaatagggttttgttgttgtttaggttggagtgtattgaggcgattatagtttattgtagttttgaatttttgggtttaagtaattttttttattttagttttttgaatagttagaattataggggtgtgttattatgtttagtatatttatttttatttttgtagagagaggcgttttgttatgttgtttagggtagttttaaatttttggttttaaatagtttttttattttggttttataaagtgttgggattggtatggtgttttatatttgtaattttagtattttgggaggttgaggtagacggattatttgaggttaggagttcgagattagtttggtaataaagtgaaatttcgtttttattaaaaaatataaaaattagttgggtattgtggcgtttatttgtaattttagttattcgggaggttgaggtaggagaatcgtttgaatcggggaggtagagattgtagtgagtcgagattgtgttattgtattttagtttgggtaatagaatgagattttgttttaaaaaaaaaaaaaataaatgaataaaaaacgaagtgttgggattttaggtgtgaattattatatttgatttatatattttgatatatatttttatttttttttataattattaaatgaaataaaattttttttttgataaatgaaatagtttaagaagttaagtgattgtttatatggtaggtaaaggtatttttaaaaagtagtttaaaagtttttgttttttattattaagttgtttatttttttattattaattaaattaataatttaattattatgaattaaatggttgagttaaaagtaggtattggtttatttgtaaaatattgaaagaaattgagatttaaaataaaataaaaaaaataaaataaaaaaaaaaattttgtaagttaagttttaggttttattttaaaggaaggttatattttttttcgttatttataaaatggttttttagtgtagtttaatatttttatttataattaaatttttttattttatttttagtttttaaggattttttatttatgttttgttttttttttgttgttttttttttagttttttgtttttgagttattgttttgaattgtattttaattatgtttttatgggttaaattttatttgtgattttgttttagtgggttttagtaaaggatattttttatttatattttgagggttttagggtttggagttagttatttaggaggttatttaaaggagtggaatttattggttttaagattttttattttttgtttaggaaggaatagtcgagttggaggaatatgtattcgatttagattttttttttttatttagtgaaagttaaatttttgtaaagtggggagaagtagggttaagtttattagttataaaaagaattaggaatagaaaatatattttttagtttttttgttttgtagaggttggttgggaggattttaggaatgtagggtttttttttattgtttgatttgggtattttaggagtgatggttgtattttttgtttttgtttggtgttttagggtgaagttcgggttgttattgtgttttggtaataatatgtatgagttagattgaggttaaggtgaaggaatatagtttattgtttattatagtgaattaggagtttagatagggattttttaaggatgatataggattaatgtttttaatttaatagaaaaagtaaatttttaaattagattaaatattaaattttttatttttttaatatttttttttttgggaaggataatttagatatattttaatatttttataaattaagatataaaagataatatttgatttttttttaaaataattttattattttatagtttgtatgtatgtatgtaaatttatatgtaattagttaagtatgttgtaattagttaagttagttggaattatgaggagatagtgaaaatgtttgttaggaaaataattttattaataaacgtagagtttttaagagttttgttggttgggtatggtggtttatatttgtaattttagtattttgggaggtcgaggtgggtggattattttaggttaggagtttgagattagtttggttaatatagcgaaattttgttttaattaaaaatataaaaattagttaggtgtggtggcgtatgtttgtaattttagttatttaggaggttgaggtaagagaattatttgaatagaggttgtagtgagttgagattgcgttattgtattttagtttaggtaataagaaagaaattgttttaaaaaaaaaaagtttttttgttgttgtttttaggagatagttttattatgttgtttaggttggttttaaatttttgggtttaagtgatttttttaagtagttgggattataggcgtattattgtatttgtaaaaagttttaagggcggtcgggcgtagtggtttatgtttgtaattttagtattttgggaggtcgaggtgggtggattatttgaggttaggagttttagaatagtttggataatatggtgaaattttatttttattaaaaatataaaaattagttaggcgtggtggcgggtatttgtagttttagttattcgggaggttgaggtaggagaataatttgaatttaggaggtagaggttgtagtgggttaagattgcgttattgtattttagttcgggagagagcgagattttattttaaaaaaaaaaaaaatatttttaagagttaggtgtataagttttatttgagaaattttagaaatttatttttggggttagatttttggagaatttgttttaggaatgttgtaattttgttagagtgtttagattttagtatatttttattatttgatattgaattaaagttatttggttgatatttttgttgtgattatttataattgtatttatttgaggatttggtgtagaaagtattggtagttaggtgtgtatttgttataatttatttgtttttgttattaatagagaataattttgtttttattttttatttgtagggaagtatataattttttataaagtgtgattatattgtagtcgttaaagtagataataatttattttatatttttttaatttttagtttgatttttaaatttatttggtatagtaaggttttgtgttaatttttatatttattgtttgtattttagaggataaagaatttttatatattttttttttggggaagtaggttttgtagatgaaaagggtattaggataaaaattagttggttatattgtgttttttagttattattattattaagattttgataatagatataagttgtattttgatttttttttttaaagtatgatttgtaagtcgtttgtatgggtagtatttgggggttttgataatgattttattttagatttatcgaattatcgtttttggagtttatattttaaagagtttttaaggttattttgaatatttttattatggaaatttttaaatatatattgaagtaagaagtatggggtaatattttattacgtaaagtatggtcgtaggattagttattttattattagttgggggtttgttagaagggtagaattttgggtcgtaatcgtaatttagatatttcgaattagaatttgtatttagtaggtttttaggtggttagtgtgtaaattaaattttgagaagtatagatatgatggatttttttgtttttattatttaatagttagggttaattttgtattattaatatttttttttagtataggattatttaaaagtaaatttttaatattaggaatgtttttttgtttgttttattttaatgtttaggttggagtgtagtggcgtaatttttgtttttcgagtttaagtagtttttatgttttagttttttaagtagttgggattataggtgtgtgttattataatcggttaaattttgtatttttagtagagacggggttttattatgttggttaggttggttttgaatttttgattttatgtaatttgttcgtttcggttttttaaagtgttgggattataggtgtgggttaacgcgttcggttaataatttataaatattatttcgttaatgtttaaatttttattaataattaatttttgaggttttttggattgcgataaggattatattaagatgatttaatttttttattttttttgtaacggaatttttttttatttacgtgagttagagtttttgagatgttgtatattaaaagaaatattaaataaagtttttggaaggggttaatgttttttagtataaatatatatattcgtttcgttttaatatttgttacgtcggtagtaaacgttttatttttcgtggaaggttagtaaaatttagaagaaaacgttcgcgaaaacggtacgagaaagaagcgaagaaaatgaaacgtttataatattttttatttaaaataattttttttagtattattttagtgaatggatattattagtaaggcgcggtttaaatttttcggggttcgtggggttgagggaacgaggaaaatagaaagggtgtggagattggtgagagggagagttaatgatgcgttaggtttttcgtgaggcggagtttatttcgtagtttgtttaacgttggtgggttaaatattattttgttttggttatggggcggggtaagttttattatttttagagtaagtatacgtttttaggtgatttgcgagtttaacgataggttatgaggttttgggcgcgcgcgcggagattggttgacgtagtttagaggcgagcggggataggttattgggttggcggaaggtttgaatggtcgacgtttgcggttgttgatatttttgtttagaggtcgtaattttggttttttgtttagggaagattttgagttcgacgttggtttatttagtcggaaggtagagttgtaatttagttaattatttttttttttttagatttttttttattttgtttaagttttcgtttgtgttcgatttttatttattttttttttttttgtaggtaagttttagattttaggtttgaggtaagttcgtagtcgttttcgttacggaattacggagattttattgttttttttagggtttagtcgggtttttatagatagaggttgggagggtcgaatggggattatcgcgagttacgagattcgggttttttttagttaggagtttcgagttgtgtggcgtggaataagttaaaattttttttttattttatttttaaggttttaaggttgtttttcgtcggtgaatttaggttttaattttaagttaggttgtgaattatttttcggggttgttttttttttagtgttgattcgtttggttggaaagggtggaggagtttaggaaagttgagggaattgtgatgtatcgatttagatgacgttttttttttagt

SEQ ID NO: 56 - DNA, 5551 bp, Artificial Sequence
  chemically treated genomic DNA (Homo sapiens)
gttaggaggaaaacgttatttaaatcggtatattatagtttttttagtttttttaaatttttttattttttttagttaggcgaattaatattggaagaggggtaatttcgaagggtgatttatagtttggtttaaggttagaatttgaatttatcgacgagaggtaattttaggattttaaagatggaatgaagagaggattttgatttgttttacgttatatagttcgagatttttgattagaaagaattcgggtttcgtaattcgcgatagtttttattcggtttttttaatttttgtttgtgggggttcgattggattttaagggggataatggggttttcgtgatttcgtggcggagacggttgcggatttattttaagtttggagtttgaggtttgtttataagaggagagaaagtagatagggatcggatataggcgaagatttgagtagaatgaaaggaaatttaggggaaaggaggtagttaattagattgtagttttgtttttcgattgggtaggttaacgtcggatttagagttttttttgagtagaaggttaaagttacggtttttgagtaagaatattaatagtcgtaggcgtcgattatttaaatttttcgttagtttagtaatttattttcgttcgtttttaagttgcgttagttaattttcgcgcgcgcgtttagggttttatggtttatcgttgggttcgtagattatttgggggcgtgtgtttgttttggaaatggtaagatttgtttcgttttatagttagagtaggatagtgtttggtttattagcgttaggtaggttgcggggtaagtttcgttttacggggagtttggcgtattattggtttttttttttattaatttttatattttttttgtttttttcgtttttttagttttacgaatttcgggagatttaaatcgcgttttattagtgatgtttatttattagggtaatattaggagagattattttgggtggagggtgttgtaagcgttttatttttttcgtttttttttcgtgtcgttttcgcggacgtttttttttaagttttgttggttttttacgggagatggagcgtttgttgtcggcgtggtaagtgttggggcgagacgggtgtgtgtgtttatgttgagaggtattagttttttttaagagttttgtttggtgttttttttagtgtgtagtattttagagattttagtttacgtgggtaaaaagaaatttcgttgtagggaaagtggaggaattaaattattttggtataatttttatcgtaatttagaggattttaaagattggttattaatgaaaatttgaatattgacgaggtgatatttataaattattggtcggacgcgttggtttatatttgtaattttagtattttgggaggtcgaggcgggtagattatatgaggttaggggtttaaaattagtttggttaatatgatgaaatttcgtttttattaaaaatataaaatttagtcggttgtggtggtatatatttgtaattttagttatttgggaggttgaggtatgagaattgtttgaattcgggagatagaggttgcgttattgtattttagtttgggtattagagtgaaataaataaaaagatatttttaatgttagggatttgtttttaaataattttgtgttgggggaaggtattgatgatataagattgattttgattgttgagtgatgggggtaggagggtttattatatttgtgttttttaaggtttaatttgtatattaattatttgaggatttgttaaatgtagattttgattcgggatgtttgggttgcggttgcggtttaagattttgtttttttaataagtttttagttgatggtgaggtagttggttttacgattatattttgcgtggtaaggtattattttatattttttattttaatgtatatttgaaaatttttataataaaaatgtttaaaataattttggaagttttttaagatgtaggttttaaaaacgataattcgataggtttaaagtggggttattattaaggtttttaggtgttatttatgtagacggtttgtagattatgttttgagaaaaaaagttaaaatgtaatttgtgtttgttgttaggattttggtggtggtagtggttgagaggtatagtgtagttagttggtttttattttaatattttttttatttgtagaatttgtttttttagaaaggagatgtgtgaagattttttgttttttaggatatagatagtgagtgtaggagttagtatagaattttgttatgttaggtgagtttgaaaattaggttggggattaagggagtgtgggatgagttgttatttgttttgacgattatagtataattatattttgtgggaaattgtatatttttttgtaggtgggaagtagagataaagttattttttattggtggtaaaagtagatagattatggtaagtgtatatttggttattagtgttttttgtattaggtttttaagtaagtgtagttgtgggtggttataataaaggtgttagttaagtggttttagtttaatgttaggtgatggaaatatattaaaatttgagtattttgataaagttgtagtatttttaaaataaattttttaaaaatttagttttaaaaataagtttttgagattttttaaatggaatttatatatttagtttttaagagtattttttttttttttaagatggagtttcgttttttttcgggttagagtatagtggcgtaattttggtttattgtaatttttgttttttgggtttaagttatttttttgttttagtttttcgagtagttgggattataggtgttcgttattacgtttggttgatttttgtatttttaatagaggtggggttttattatattgtttaggttgttttggaatttttgattttaaatgatttatttatttcggttttttaaagtgttgggattataggtatgagttattgcgttcggtcgtttttaagattttttatagatgtagtggtgcgtttgtagttttagttatttgggaggattatttgagtttaggagtttgaggttagtttgggtaatatagtgagattgttttttaaaaataataataaaaaaattttttttttttgagatagttttttttttgttgtttaggttggagtgtaatggcgtaattttagtttattgtaatttttgtttaagtgatttttttgttttagttttttgagtagttgggattataggtatgcgttattatatttggttaatttttgtatttttagttgagatagggtttcgttgtgttggttaggttggttttaaatttttgatttgaggtaatttatttatttcggttttttaaagtgttgggattataggtgtgagttattatgtttagttaataaaatttttaaaagttttacgtttgttaatgaggttgtttttttagtaaatatttttattatttttttatgattttagttggtttagttaattgtaatatatttagttaattatatgtaagtttatatgtatatatataaattgtgaaatggtagaattattttaaagggaagttaaatattgttttttatattttgatttatgagggtgttggaatatatttaagttattttttttagaagaaagaatattagggaggtgggaagtttggtgtttaatttgatttgaagatttattttttttgttggattgagggtattgattttatgttatttttggggaatttttatttaggtttttgatttattgtgataagtagtgagttgtgtttttttattttgattttagtttgatttatatatgttgttgttagggtatagtgatagttcgggttttattttgaaatattaaataagaataggaggtatagttattatttttgggatgtttagattaggtagtggagaagagttttgtatttttgggatttttttagttagtttttgtagggtagaggggttgaggggtgtgttttttatttttggttttttttatgattggtaggtttagttttatttttttttattttgtagaggtttagtttttattgggtgaaaagggaaggtttgaatcgagtgtatgtttttttaattcggttgtttttttttaggtagggaatgaagagttttagaattaatggattttatttttttggatgattttttggatgattggttttaggttttggagtttttagaatatggatggagagtattttttgttgaaatttattggagtagggttatagatggggtttggtttatgagggtataattaagatgtagtttaaagtagtggtttaagaataaaagattaaaaagggggtagtagggaaagagtaggatatgagtaaaaaatttttgggaattaaaagtggaataaggagatttaattatgggtaggagtgttgggttgtattgggaggttattttatagatgacgaaaggggatgtaatttttttttgaaatgaggtttgaaatttgatttgtagggtttttttttttgttttgttttttttgttttgttttgggttttagttttttttaatgttttgtaaatgagttaatgtttatttttaatttaattatttaatttataataattaaattattaatttaattaataataaaaaggtgaatagtttagtggtgaaaagtaagggtttttagattgttttttgagagtatttttgtttattatgtgggtagttatttaattttttgggttgttttatttgttaaagagaaggttttgttttatttgatgattgtaagaaaaaatgagaatatatattaaagtatgtaggttaagtgtggtggtttatatttggaattttagtatttcgttttttgtttatttgttttttttttttttgagatagagttttattttgttgtttaggttggagtgtagtggtataatttcggtttattgtaatttttgttttttcggtttaagcgatttttttgttttagtttttcgagtagttgggattatagatgggcgttataatgtttagttaatttttgtattttttagtagagacggggttttattttgttgttaggttggtttcgaatttttgattttaggtgattcgtttgttttagttttttaaagtgttaggattataggtgtgagatattatgttaattttagtattttgtgaggttaagatgggaagattgtttgaggttaggagtttgagattattttgggtaatatagtaagacgtttttttttataaaaatagaaataaatatgttgggtatggtggtatatttttgtagttttagttatttaggaggttgagatggaaaggattgtttgagtttagaagtttaaggttgtagtgagttgtgatcgttttagtgtattttagtttgagtaatagtaagattttgtttttataaaaaaaaaaaaatgtagtatggtgtttggtatataagagtaattattggaaattatgtgttttttattttatggtttttaat

SEQ ID NO: 57 - DNA, 12592 bp, Artificial Sequence
  chemically treated genomic DNA (Homo sapiens)
aatattttaagataatgaggggttttatttcgaataaagtatttatgagatatttagataaaggtgtttttttggtagttagttatttgggtttggagttttaaaaagtagtttggttggagatataaattttttaaattatttgtagatgagaaattggggttataagaatggataggggcggggtatggtggtttacgtttgtaattttagtattttgggaggttaaggtgggtggattatttaaggttaggagattagtttggttaatatggcgaaattttatttttattaaaaatgtaaaaattagtttggtatggtggcgtgtgtttgtggttttagttattcgggaggttgaggtaggagaatcgtttgaatttgggaggtggaggttgtagcgggttgagattatattattgtattttagtttgggtgatagagtgagattttgttttaaaagaaaggaaagagaaagaaaaaggaagaaagaaagaaaggaaggaaggaaggaaggaaagaaagaaagaaaggatagttttgtttaagaagaatgtgtagggtgggtgagaagaaggtttagaataggtttttgaagtatgtttaatattaaaggggttggtagaggagttgtaaaggaaatcgattaaaaaatagagtagtaggttaggcgtagtggtttatgtttgtaattttagtattttggaaggttgaggtaggtagattatttgaggttaagagttcgagattagtttagttaatatggcgaaatttcgtttttattgaaaatataaaaattagttgggtgtggtggcgtatatttgtaaatttagttatttagggggttgaggtaggagaatcgtttgaatttaggagacggaggttgtagtgagtcgagatagcgttattgtattttagtttgggtgatagagcgagatttttttaaataaataaataaataaaaatagagtagtaggaggaaagttaggagatggtgttattagagaagttaaaagaagaggatgatttgattaaagagtaaatatggtgagggtggggtgggggtggtggggtgtaaggttaggtaaggaggttataaaatcgtacgtaatagggataaaatgaagggtatagataaggaggattgaaagattttaggagagtatatttattttgggttatgttttagtgggatttatattttgttattgatattacgtttagttttttgaatagttttttaaatgttagtttttaaatttgattgaatatgaaatagattaagaagtaggtttaggagaaaaaataattttttaattttatttttggaataatgttgttgtaatttaattttatttattagttaaatatattggataacggatgatagtaggatgtttaagtggttgatgaatagcgagtttaagtaggttaattaggagtagagaaggaagtaaaaatattttaaaatattttattaaagtattttaaataatgtggttttgttgtggatgagtagaaattataatagatgtattagtttggttaataataattagaaaggagatgtttttttttttttgagatatagttttgtattgttatttaggttggagtgtagtggttcgattttagtttatcgtaagtttcgttttttagatttacgttatttttttgttttagtttttttagtagttggggattataggtgtttattattacgttcggttaattttttgtatttttagtagagatggggttttattgtgttagttaggatggtttcgattttttgattttgtgatttgttcgttttggttttttaaagtgttgggattataggcgtgagttaacgcgtttggtttttttttttttttgagacggagttttgtttttgttgtttaggttggagaataatggcgtaattttagtttatcgtaatttttattttttaggtttaagcgatttttttgttttagttttttaagtagttgggattataggtatgtgttattacgtttagttaatttggtatttttagtagagataggttttttttatgttggttaggttggtttggaacgtttgattttaggtgattcgtttgtattggttttttaaagtgttgggattataggcgtgagttattttatttagttaggaaatgtttttttttaggttaaaaaaagaaaaaaggttttaggtaaattttaagtttataagttagagtgttaagtattagaggttttttaaatgttgattttagatttatatttttataaagtattatttttatgtattttttgtggtaaggttttatatttaggtttataaaattttgttgtatatatataagatttgggttggtagtatgttgtgtgaaaaagagttgagttcgtaaatgattatataagtttagtatgagtaaatagtgttatgtgattgttaaaaaatgtaaatataggttgggtatagtggtttatatttgtaattttagtattttgggaggtcgagatgggtggattatgagattaggagtttgagattagtttggttaatatggtgaaatttcgtttttattaaaaatataaaaattaatcgggcgtggtggtgcgtatttgtaattttagttattcgggacgttgagataggagaattgtttgaatttcggaggcggaggacgtagttagtcgagattgcgttattatattttagttttgggtaatagagtaagatttagtttcggaaaaaaaaaatgtaaatataattgtagtttattttaatagacgtgtttagataataatagtttaattgtattttgaattatttagaataaatttggagtattgtgtttagttgaaagggttatattttaagagtgatagtttttatttatttttttttttttatttttaattttagatatttttattttatatttagcgtggtagattgtttttaaagatgatttaaaaattttttttatggtatacgttttttgtggtgttattttgttattttttttattaagaagtagattattttttttggtgaatttagggtggttttgagttttattttgattaataagaagtgatgtttataggtttaggtttaagggattttatagtttttatttttgcgtattttgttgttaattattaagttaagaagttggagttaaattattgatttataagaggttagtgtgaaaagagaggttatgtagagaagaaatgaaggatttagttaatagttattattgatattttagatatgtgagtgaagttattttgaattttttagttttagttaagttagtgttggtgatgtttttttatatttgtgtgattgtttaatatggtagttattagttatatatagggttattgaatttttggaatgtggttagggtatttgaagaattttatttttaattttattttaatttaaattttaaatagttaatggttattttttaggttagtgtaaaagtttgttattatttaagttatttagtataatttcgttaaagtaattgggtatagggtagttaaaaattattttagtatttgttttttaggggttataagtatatatatagtgataagataaggcggtggagaaggatgtagtgtagttttgttagttttgtttttaaaaatgaaagaaaaaatatttttttttaatattatttaaagggaaatttttaagtaatggaatatattatgatttttatatttagtttagagagtttttgattagaaaagtaatttttaaaaattgtttttttatttgttgaaaaataaaatttaaatagttttttggtttattttttttggggggagaaggggagtagaaaggaaatatgagagagtttatattgtatgttagatacggttatatttataatatatcgaatttttttaattttttttttttaaattaagcgaatataagtttagagaggtaatttgttaaggatttatgattagttagtgttaaagataaaatttaaaattaggtttttgaattttcgattttttattttttttattatagcggaatgttttatttattaaaaataaaaatttttaatggtttattgagtttttttatgatttttttatttaagtaattatttttaattaatgtttttttagtagattgattttattttttttttttttatttttttatattttttttttttttaattttatttattttttaaattttattttaaatttttttttttttttatagaattttttttattttattataattgttttttttgaatttttatattatttataataggtattatataatatagcgttttttgttatattgttttttttttaaatagattttaatttttttgaagatagaagttattttatgtttttggggagtggtaatttttttaaatttttttagtttttttttagagtcgtgagtagatatttttggaatggacgaatgatttaaatttaatagataaatatttgttgatttattaaagatagttttaaattttgttgttttattttttgttttataatttatagtatattaattaatttaaaagggttgaggggttaatttatattgtagtttcgttacgtaacgttattcgttcgcgttgttacgttacgtttagtttgttggttgtagatttggcgtagtttaattttgggacggtcgattgggcgtggtgtgcgtggttgaaggcgtggttgagaagagaaatttacgttttgggttagattcggtagttttcggtaattttcgataattttcggtaacggttttttttttcgtcgattaatttcgggtattttcgatttttttcgggttttttcgtttggttttcgttcggttttttttatttcgggtattttcgtgtttcgttcggaagtattcggtaatcgttcggttttttttatttttcggtaacggtcgttggtgagtttaaatgagtaggggttggtcgggtcggagtcgttatagggggggtttgaggtattgtagaaagtgggtttgagtttcgaggatgacggtgttgtaggaattcgtttaggtaatgataatttttttttttggggtttggttggtagtttcggtcgggaagtagtagcgtagggttatttcgcggtttggtgcggtttaggttcggttgtttttttcgttttttttgttgtcgtgttttgtttatttttagttagttcggaggttttgtttatagtttaagtcgtgttatttttggttttatattattttatttttagcgtgagcggtttcggcgaaaataatcgtttttttcgttcgagttaacgttcggttagttttttttgttagtttaggggtttggtttgattgggggtgggagatgaggggtcgaaaatgtattttaagcgtttttttgtttaaaagatgatcgagaagtatatttgatcggagtttgtgtgattttcgtgacggtagggtaagtttacggaggttttttttattttgttttgtatgagagggtggagggagcgtaggatcggtttttttaatattaatttttattttggtaatagattttttattttacgttttttttttcggtgaattttttatcggataatgatggtttgagaagataattttaagttttagtgttgaggcgtaagtattaatattaggggaggaggtggaaagggtatatttgggttgtttttattttttttgatggggattaggagtattttgttgtgtatgtttataaggtatttaggaaatgaaatataaataatggtgtttttgtttattttattgtttttatattagggtatgttttgacgtatagtgttgtgttgtattaaaggaattttattggattttaagtgtgtgatgcggtgttaagttatttttttttttgatatttggagaaattgtattttttgtgttttggtaatggattaggtttgggagattttattttattatatgatttttaatttgattagaattgatttttattaattgttgttattgagttatggattttattttgaagttataaagtaaattgatttttagaaatttttttatattgtttttaaaaggtttgaggtattaaatagtaaatattttaatatattattatttttatatttattttatttttttaaatagtatgaaatatttattttttttagtttggtttttttttttagttgtttatatatagtagttattagtgtttgaattaataaaacgtaagattatattttatgaaatttatttgtttgtaagttgtattagtttttttagagttatttttatttaaattttttttattagtatagttttttttaagatttttttttattttggttgtagatgaggtaattatatatatataattttttaaggtttaatatgaatttaaatagataagtagattatttaagttatttaatttttgttgtatatttttataattttgttttaatagttaatgatttttttttttttgttttttttggttttagaagttttttaaagtgataaattagttgtattgatagattataattattatttaataataattttagattttataaaagtatggaaggtcgggcgtggtggtttatatttgaaattttagtattttgggaggttgaggcgggtggattatttgaggttaggagttcgagatttgtttggttaatatagtgaaattttgtttttattaaaaatataaaaaattagttaggcgtggtggtgggcgtttgtaattttagttatttgggaggttgaggtaggagaattgtttgaatttaggagatggagtttgtagtgagtcgatatggtttcgttgtattttagtttgggcgatagagtgagattttattttaaaataaataaataaataaaaaataaaagtatggaaaagaaaaggaatatgtagtttgtttttagatagtatttattaggttttttgtttgtttttaaagtattttgagtagtaatatattttgatatttttaaggtttaaatgttaaatttgttttttttttatagtagtattgtttattagatttttgagatagtggtagaaagttttaggatatgattaggtgaaaattttggttgtatagtataagaagttatttaagaatggatttggaatagtgagaagaataagtaattttggttataatgataaagattaatgattagggatagtgttgtaaatgggaaagaattaggaagagaataaaaataggatagatatataagatattgtttttattaaaaaaaaaattatgatgatagattgcgtgtatttggaaagtaatgagagtaagttggaaaattgtttttttttggaatgttttagagttgatggtattattaggtataggaaaaagtttatagaaaatatgaagaattgttttttgtatttttttttttttaaagttttaatgtagaatggttagttcgatatattatatatgtttaaattaaaatttcgttttaaattattattttttagaagagtattattttatatttgagtttttataaaagttttatatatgaggtagaatttttgttagtttttttatttttaatggtaattatttggaaagatatattagtttaagtgattttagtgagagttttttgaatatttataaaagttatttggtgaaattggtttttaaaaaagaagtaaagagattttatatagatttagtaattatttttaggggtaagattttatagaagtgttggatgaagttgtaaataagtttttcgaaaattaatttaataagtaatatagtaattgggtattatatatatgatattgttttagagattattagatggtgaaggagtatttttggttggggataaaatgtttagggatagtatttaatatggatttaaagagtaatatattttggttatttaatgagaaatttagatttaatgtgtattggtaatgaataattattatatgagtagaagagtttttgagtagaggaattatgtaataaaagtattattttgggaatatttatttggtgttgttggaaagggaggaagagataagagttagatatatagattagtagaataatttaattgtatgattatgtagattagggttgtttaatttgagtattattgatatttggggtaagttaatattttgttggaagttgtgtattgtagaatgttttgtagtatttttggtttttaattattggatgatttttttatttgtgataattaaaaatattttttagatattgttaaatgttggggtattaattgggagtaagaaggtaaaattgtttagagtaagaattattgacgtgtatttaaattaaattagtattttagaaatttaattataatgtataatatgaaattttaatagtgatttttttttttgtatttttttatattgtttgaagtttttattatttatttattttatggtttttaaaaaagggtagttgattgggtatagtggtttacgtttgtaattttagtatttttagaggttgaggtagatagattatttgagttaaggagtttaagattaataaataaaataaaataaagatagtttttttgataaaaataagaatataaaatgtataaaaaatttaataaaaataagtaaataaattttttgtaataagttttttttaataaaaaatttataatgattataggtcgggcgcggtgttttacgtttgtaattttagtattttggggggttgaggtaggcggattacgaggttaggagatcgagattattttggttaatagggtgaaattattttttttttattaaaaatataaaaaaaattagtcgggtatggtggtaggtatttgtagttttagttatttaggaggttgaggtaggagaatggcgtgaatttaggaggtggagtttgtagtgagtcgagatcgcgttattgtattttagtttgggtgatagagtgagattttgttttaaaaaaaaagagaaaaatttatagtgattatatttaagtttaagtataatttatagaggtttgtttatattttaaataatattttatatttaagaatagttagttggtaaggaattttgtaattttaagttgttggtttatttattttttaaattagtgtatttggggattaatttattaattagttagattttttttaaatattttttaggggagagggagaggagcgttgttttttttggttttataatttttttttagtagtatttcgtttatttggttttaatttgtagaattttagcggtaatgtattgggtgtttttttaagggaaggtttatattattagttgggtagaggtgttgattttagttttgtttattattagttattaatttgtagtgttttagagaataatttgtttttttttttaatttcggtataagagatattgttagttaggaatttagaattgattgagtaaagcgggatggaagtagtatgtgagattttcgagatggtaagttttttttgatgtttttaagaattggtgataagggaatgatgttttgagtaaagtttgattttaagttagaaatggatataatttttgaatatgatattttttttttttttttttttttttcgtttttgttttttatttttttaattttaaaaggatagaaaaaattttaaagttttaggattttttgattttagtatatgtgtgtgaaatttttttagtggtttatagtagtaaaatagttggtaaattatttgagttttttgtggtttatatattgtaaaataagtagttgtagtaggtatgttggggagatgttatgtaatagaaattatatatttattgaatttttttatattaagagattggtaaggaaaaggttttttaagtgtttaatgtatgatagtatattaggagtattataaatggattattttatttaatttataaaataattttaataaataaattttatttattagatgaagagattgaggttgagaaaagttgagtattttttataaagttttattattggaagtgttggtatataaatttgagtacgtttttaaatattaaatttttggtatttttattttatttattatttttttttatttatagtaaaattaaatatgtaggtttttaggaaattttagattttataaaggagtaatttggtggtaattatttgtataataaaataatttttttatttattatagagttttttttaatagagatttttagagattttttattattagatatatatttaggaatataaagaaatttaatgttaagattaacgtataagagtgttaatagtggaagattgttagaaattaaagattatttgtttatttatttaatatataagtatttgttttaaaagtatataatggatattgggagtataataatgagtaaaaatagacgtagtttttattttgtggagtttgtaatatagtaaggaaaatattatttaaatatttttttaaattaatatagaattatagtagtgggaagtattataaaggaaaggtatttggtgtaattagagtgtataataatggtgtttaattttatttttttttttgtatttagataggaatggtaaaattagatatttttgagattttataaaatttaagttatataaataaaggttaaataagaggttttggagattttaaattaagtttattattgtttttttttgaggaaatagaaagggttaagttatttattatttttatttttaaaattataattaatatatttattgtagaattattaaatatttatttgtttgtttaataaaatttgttgagtttttattgtatttaaggtatattaattatttaatataatttagatgtattggtataatgttagttagtgattagtaattagattttattggttttcgttgtaatttttttaaattatttaataaattataagttggtgtatgtgttaaaaataaaaaataacgtttgtattatgattaggtgtgagatattttaaaagtagtttattattaaaaatgatttgatattatttagtaaagatgaatatatgtatatttaataatttagtaattttatttttaaatatatattttaatttggagagatttttttttgtgtttttttgatgggagttttgtttttattgtattttagtagttatttataggtatgattatagttttgaatttttggatttaagtagtttttttagtttagttttttgagtcgttgggattaaaggtttatattatcgtgataggttggagagatttttaaatatatattttaggagatgaatttaagattgttgtagtattgttataattggaaaaataaaataaaataaaaaaatattttagaaataatttaaatgtttatatgttgtaaaatagataaaatatattttggattttgatatgtttatataatggaaatattatttatttagtaatgaaaataaatgaattttagttatatatattaagaatgaatttttaaaatattggattttaaaagtaaatcgtagtagaatgtatataatatgattgtatttatttaaagtttaaaaataggaaaaagtaaatgttatattgtttagagatgatatgtataaatgtataaaattgtgaagaaaattaagagaaaggttaagaaaatttagtgtggtggttttttttttggggtagggagaggttttggtattaataaggaatatatagggagttttagagatattttattttttaagttgggtggtgagtatatgggtttaaatgtttttggttattgttatttaaaatgtttttttattttatatatattttaggttatatgttttgtaattttaaaagagaaaatatatatttaaaaaattaaaagttatttttatgataattttatttatttgtattttaatatgttttttggagtggatgagaattgagtggtattaaaggtaatagatagggaagtttttgtgggaggatgatatatattttaatatttttgttatgtatattatataaagtggttgagaattattgttgttaaaagtttgtagtttagtagggttggtagttttgttaataaataattatgttatgagtgttttattagaagaggtattttaaaaaagaaatggtttgatattagttaggaaagttttatggggtagatgttatttaagttggatttttagggacgagtagtttataaggggagattggtgaggggagtttatattgtttaatggaggaaaagggtgtataaaggtatagaagtttaaaagtttatagagagttgagtgaggaaatttagatatgttaggagttatattgtgaagagttttgttcggtatattttggagtttgttttgtgggtattggggttttattatttaaattagggatattaattttagtatttgatgtaaggttgtgtgttagtagttattttgaaagtttgtatgtatgtatatttatgtttttttttttttatttgtagg

SEQ ID NO: 58 - DNA, 12592 bp, Artificial Sequence
  chemically treated genomic DNA (Homo sapiens)
tttgtaaatggaggaaaaagaatataaatatatatatatatagatttttaaggtaattattagtatatagttttatattaaatattgaaattaatatttttaatttaagtgataaaattttaatgtttatagagtaaattttagagtgtgtcgggtaaggttttttatagtatggtttttaatatatttgaatttttttatttaattttttatggatttttaggtttttgtgtttttgtatattttttttttttattgggtaatgtgggttttttttattagtttttttttataaattgttcgtttttaaagatttagtttaaataatatttgttttataaagtttttttggttgatgttaagttattttttttttaagatattttttttagtagagtatttataatatggttatttgttaataggattgttaattttattaaattatagatttttagtagtagtggtttttaattattttatgtgatatatatgatagagatattaaaatgtatgttatttttttataaaaatttttttatttattatttttaatgttatttaatttttatttattttaggaagtatattggaatgtaaatgagtaaagttattataggaataatttttaattttttgaatatatgtttttttttttagaattataaaatatataatttaaagtatatatgagatagaaggatattttaagtaataataattaaagatatttaggtttatgtatttattatttagtttaagaaataaaatatttttgaaattttttgtgtgttttttgttgatattaaaatttttttttgttttaaagaggaaattattatattgaatttttttgattttttttttggttttttttataattttatatatttgtatatattatttttaagtagtataatatttatttttttttgtttttgaattttaaataaatataattatattgtatatattttgttacgatttgtttttgaaatttaatgttttgaaaatttatttttgatgtgtgtagttagagtttatttgtttttattgttgaataaataatatttttattgtataaatatattaaaatttaaaatgtattttatttattttatagtatgtggatatttgggttatttttagggtgtttttttgttttgttttgtttttttaattataataatgttgtaatagttttagatttattttttggggtatatatttaagaatttttttagtttattacggtggtgtgagtttttagttttagcgatttagaaggttgagttgggaagattgtttgagtttaggagtttaaggttatgattatatttgtgaatagttgttggagtgtaataggagtaagatttttattaaaaaaatataaaaaagaatttttttaaattaggatatatatttaggaataaaattattgggttgttgaatatgtatatgtttatttttattaggtaatgttaaattatttttagtaataaattatttttgagatattttatatttgattatgatataagcgttattttttatttttagtatatatattagtttataatttgttgaatgatttaaaaaggttataacggaaattagtaaaatttggttattgattattagttaatattgtattagtatatttaaattatattaagtgattaatatgttttagatatagtaaaggtttaataaattttgttgaataaataagtaaatgtttaataattttgtaatgagtatattaattataattttaaaaataaaagtagtaaatgatttagttttttttatttttttaagaaagaatagtaatgaatttagtttgggatttttagagttttttgtttaatttttgtttatatagtttaaattttataaagttttaaagatgtttaattttattatttttatttagatataaggaaaaagatgagattaggtattattattatatattttaattgtattaagtattttttttttgtaatattttttattgttataattttgtattaatttaggagagtatttgagtgatgttttttttattatattataaattttataaggtaggggttacgtttgtttttgtttattattatatttttagtatttattatgtgtttttaaagtaggtgtttatatgttgaatgaataagtaaatgatttttaatttttagtagttttttattgttgatatttttgtacgttagttttagtattaagtttttttgtatttttagatgtatatttaataataaagaatttttgggagtttttattgaaagaaattttgtgataaatagaagaattattttattatgtaaataattattattaaattatttttttatgaaatttgggattttttaagaatttatatgtttaattttgttgtaagtgaaagaaaatggtgagtagaatgaagatattaaagatttgatgtttggagacgtgtttaaatttgtgtgttagtatttttagtagtgggattttgtgggaaatatttaattttttttagttttaatttttttatttgataaatggagtttatttattggagttgttttgtggattaaatgaaatgatttatttataatgtttttagtatattattatatattaagtatttggaaaattttttttttgttaattttttaatataaagaaatttaataaatatgtagtttttgttgtataatatttttttagtatatttgttataattgtttattttgtaatatataagttataaaagatttaaatgatttattagttattttattattatggattattaggaaaattttatatatatatattaaagttaaaaagttttagagttttgaaattttttttgtttttttaaaattaaagaaataagaggtaagggcggggggaaaaaagaaggaaaaaaggtattatatttaagagttgtatttatttttgatttaaaattaagttttgtttagaatattatttttttattattagtttttaagagtattagaaaaaatttgttatttcgagaattttatatattgtttttatttcgttttgtttaattaattttaagtttttgattaatagtgttttttgtgtcgggattggggggaagaatagattattttttaaggtattatagattagtagttgatgatgaatagggttaaaattagtatttttgtttaattgatggtgtgggtttttttttaaaagaatatttagtgtattatcgttagagttttataaattaaagttagatgaacgaaatgttgttaaaagaaagttatgaagttaaaaagaataacgttttttttttttttttttaaaaaatgtttaagagaaatttgattgattaatgggttagtttttaggtgtattaatttaaaagataaataaattaatagtttaaagttgtaaaattttttattagttagttatttttaaatataaaatattatttaaaatataaataaatttttataagttgtatttagatttaaatgtaattattataaatttttttttttttttttgagatagagttttattttgttatttaggttggagtgtagtggcgcgatttcggtttattgtaagttttattttttgggtttacgttatttttttgttttagttttttgagtagttgggattataggtgtttgttattatgttcggttaattttttttgtatttttagtagagaaggaatggttttattttgttggttaggatggtttcgattttttgatttcgtgattcgtttgttttagttttttaaagtgttgggattataggcgtgaggtatcgcgttcggtttgtaattattataaattttttgttagagaaagtttattataaaaaatttgtttatttgtttttgttaaattttttatatattttgtgtttttgtttttgttaaaaaagttgtttttattttattttatttgttggttttgaattttttggtttaagtgatttgtttgttttagtttttgaaagtgttgggattataagcgtgagttattgtgtttagttagttgtttttttttaaaaattataaaataaatggataataaaggttttagataatgtaagaagatataaagaaaaaaattattgttgaaattttatattatatattataattgaatttttaggatattgatttagtttagatgtacgttagtggtttttattttgggtaattttgtttttttatttttaattaatgttttaatatttagtaatgtttagagggtatttttggttgttataaatggaggggttatttagtggttagaagttagggatgttataaaatattttataatgtatagtttttaataaagtattagtttgttttaaatgttaatagtgtttagattaagtagttttggtttatatgattatgtagttggattattttattagtttgtatgtttaatttttgtttttttttttttttttaatagtattagataaatatttttaaagtggtgtttttattatataatttttttgtttaaaaatttttttgtttatataatggttatttattattaatgtatattaaatttaaattttttattgagtagttaaaatatgttattttttgaatttatgttagatgttgtttttgaatattttatttttagttaagagtatttttttattatttaatgatttttaaaatagtattatgtatatagtatttaattgttatattgtttattaaattaattttcgaaaggtttatttataattttatttaatatttttgtgaagttttatttttaggaataattgttaaatttatataaaatttttttgttttttttttaaaaattaattttattaggtgatttttataaatatttaaaaagtttttattgaagttatttaggttagtgtgtttttttaaatagttattattaaaaataaaagaattgatagaaattttgttttatatgtgagatttttgtaaggatttaaatataaagtaatatttttttgagaggtagtaatttgagacggagttttaatttaggtatatatggtatatcggattggttattttatattaaaattttaaagaaaaaaaaatgtagaaaatagttttttatattttttgtgaatttttttttatgtttagtaatattattaattttgaggtattttaagaaagaataattttttaatttatttttattgttttttaaatatacgtaatttgttattatagttttttttttaataaagatagtattttatatatttgttttatttttattttttttttaatttttttttatttgtagtattatttttgattattgatttttattattgtagttaaagttgtttgttttttttattgttttaaatttatttttgaatggttttttatattatataattaaaatttttatttagttatattttaaaattttttattattattttaaaaatttaatggataatgttgttatgaaaaagaagtaaatttgatatttaagttttaaaaatattaaagtgtattattgtttagagtattttaaggataaataggaaatttgatgggtattatttagaaataggttatatatttttttttttttttatgtttttattttttatttatttatttattttgagatggagttttattttgtcgtttaggttggagtgtagcgggattatgtcggtttattgtaaattttattttttgggtttaggtaatttttttgttttagttttttaagtagttgggattataggcgtttattattacgtttggttaattttttatatttttagtagagatagggttttattgtgttggttaggtaggtttcgaatttttgattttaggtgatttattcgttttagttttttaaagtgttgggattttaggtgtaagttattacgttcggttttttatgtttttataaagtttgaaattattattaaatggtggttatagtttattaatgtaattagtttattattttagaagatttttggggttagagaaggtaaaaaaaaaaaaattattaattattaaaataaaattataagaatatgtaatagaaattaaataatttgagtaatttgtttatttatttaagtttatgttaggttttaaaaaattatatatatataattattttatttatagttagaataaaaaaaaattttaaaagaaattatattggtaaaaagaatttggatggaaatagttttagaaaaattaatataatttatagataggtaaattttataagatataattttacgttttattaatttaaatattaatagttgttatatgtaaatagttggagaaaaaaattaaattagaagaaatgagtattttatgttgtttagaaaaatgaaataaatatgaaagtagtgatatattaaaatatttattgtttgatattttaagttttttaagggtaatatgaaggaatttttaaaaattagtttgttttataattttaaaataaagtttatgatttaatgatagtagttgatagaggttaattttgattaagttaaagattatatagtgggatgaagttttttagatttggtttattattaaggtataaaagatatagtttttttagatgttaggggggaaaatgatttggtatcgtattatatatttaaaatttaatagggtttttttaatgtaatatagtattgtgcgttaaagtatattttggtgtaaaggtagtgaaatggatagaaatattattatttgtgttttattttttgaatgttttataaatatgtataataaaatgtttttgatttttattagagaggatgaaaataatttaaatgtgttttttttatttttttttttggtattggtgtttgcgttttagtattgaggtttggagttgtttttttaaattattattgttcggtgggaaatttatcgagaaaggaaacgtgggataggaagtttgttattaaaatagaaattagtattaaaaagatcgattttacgttttttttatttttttatataagataaaataaaaaaaattttcgtaaatttgttttatcgttacgaagattatataagtttcgattaaatgtgtttttcgattattttttaggtaagagagcgtttggggtgtattttcggttttttattttttatttttagttaagttaggtttttggattgataggaaaggttggtcggacgttggttcggacgggaaaggcggttattttcgtcgaagtcgtttacgttaagggtgaagtaatgtagggttagaggtaatacggtttaggttgtgggtaaggttttcgaattgattaaagataggtaggatacggtagtaggggaggcgggagaagtagtcgggtttaggtcgtattaggtcgcggagtggttttacgttgttgtttttcgatcgaggttgttagttaagttttagagaagaaggttattattatttggacgggtttttgtagtatcgttattttcgaggtttaggtttattttttgtagtgttttaggttttttttgtagcggtttcggttcggttagtttttgtttatttaaatttattagcgatcgttatcgggggatgggggaggtcgagcgattgtcgagtgttttcgagcgggatacgggaatattcgaagtggagaaagtcgagcgggaattagacggaaaagttcgaagggagtcggaaatattcgaggttggtcgacgagagagaaaatcgttgtcggaaattgtcgaagattatcggaagttatcgagtttgatttaaagcgtaggtttttttttttagttacgtttttagttacgtatattacgtttaatcggtcgttttagggttgggttacgttaaatttgtaattagtaggttgggcgtggcgtgatagcgcgggcgggtagcgttacgtggcggggttgtagtgtggattagttttttagtttttttggattaattggtgtgttgtagattatgaagtaaagggtgaaatagtagagtttggggttgtttttaatgaattaataagtatttgtttattgagtttagattattcgtttattttagaagtatttatttacggttttgggggaaagttaaagaaatttggaaagattgttattttttaaagatataggatagtttttgtttttaaggagattaaggtttatttaagggaaaagtagtgtaatagagaacgttatattatatggtgtttattataagtaatataaaaatttagagagggtaattgtgataagataaggaaagttttatggaaggaaaaaaaagtttaaaatggagtttgaaggatgggtaaaattagaggaaaaagaagtataggaaagtgaagggaggaaaaatgggattagtttgttaagaaggtattaattggaaatagttatttaggtgaagagattatggaaaagtttaataggttattagaaatttttatttttgataggtgaggtatttcgttgtggtgggaagagtagggggtcggaaatttagaggtttggttttgaattttatttttagtattaattagttataggtttttggtaaattatttttttgaatttatgttcgtttagtttgaaaaaaaaggattaagagaattcgatgtattataaatgtggtcgtgtttagtatgtaatgtagatttttttatattttttttttgttttttttttttttttaaaaagagtgaattaggggattgtttaaattttgttttttagtagatgaggaaatagtttttgaaagttatttttttagttaggagttttttaggttagatgtgagaattatgatatattttattgtttggaaatttttttttgggtgatgttagagggagatatttttttttttatttttaaaaataaggttgatagagttatattgtatttttttttatcgttttgttttgttattgtatatatatttatagtttttaaagggtaggtgttaagatgatttttggttgttttgtgtttagttgttttagcgggattatgttggatgatttgagtggtaatagatttttatattggtttggaaagtagttattagttatttaaagtttaagttaaaatgaaattaaaaatgaagttttttagatgttttagttatattttaaggatttagtagttttgtatgtggttagtgattgttatattggatagttatatagatatagaagaatattattagtattggtttggttagggttgaaagatttaagatggttttatttatatgtttagggtgttagtggtagttattggttgggttttttattttttttttgtatgatttttttttttatattggttttttatgagttagtagtttagttttagttttttgatttggtggttgataataaagtgcgtaaaaatagaagttgtgaggttttttaggtttaggtttgtgagtattattttttgttggttagagtaagatttagagttattttggatttattaggaggaatagtttattttttaatgggaagagtggtaaagtaatattataaagggcgtgtgttatgggaggagtttttgggttatttttggaaataatttattacgttagatatgagatgagagtatttaagattgggaatggaaagaaagggataagtaagagttattatttttaaaatgtgatttttttaattgaatatagtattttagatttattttgaataatttagaatgtagttggattattattatttggatacgtttattaaagtggattatagttgtatttatatttttttttttcgagattgagttttgttttgttgtttagagttggagtgtaatggcgtaatttcggttgattgcgtttttcgttttcggggtttaagtaatttttttgttttaacgtttcgagtagttgggattgtaggtgcgtattattacgttcggttaatttttgtatttttagtagagacggggttttattatgttggttaggttggttttaaatttttgattttatgatttatttatttcggttttttaaagtgttgggattataggtgtgagttattgtgtttagtttgtatttatattttttagtagttatatgatattgtttgtttatgttaaatttgtgtggttatttacggatttagtttttttttatataatatgttgttaatttaagttttgtatgtgtgtagtagagttttgtaaatttaaatataggattttattatagaggatatataaagatgatattttgtgaaaatatggatttagagttagtatttaaagagtttttgatgtttggtattttggtttataggtttagaatttgtttaaagttttttttttttttttaatttaaaaaagagtattttttggttgggtgaggtggtttacgtttgtaattttaatattttgggaggttaatgtagacggattatttgaggttaggcgttttagattagtttgattaatatggagaaaatttgtttttattaaaaatattaaattagttgggcgtggtggtatatgtttgtaattttagttatttgggaggttgaggtaggagaatcgtttgaatttgggaggtggaggttgcggtgagttgagattgcgttattgttttttagtttgggtaataagagtaaaatttcgttttaaaaaaaaaaaaaggttaggcgcgttggtttacgtttgtaattttagtattttaggaggttaaggcgggtagattataaggttaggagatcgagattattttggttaatatagtgaaattttatttttattaaaaatataaaaaattggtcgggcgtggtggtgggtatttgtggtttttagttgttggggaggttgaggtaggagaatggcgtgaatttgggaggcggagtttgcggtgagttgagatcgggttattgtattttagtttgggtgatagtgtaagattgtgttttaaaaaaaaaaaagtattttttttttgattgttgttgattaggttaatatatttgttgtggtttttatttatttatagtaaagttatattgtttgaagtattttgatggggtattttggagtgtttttatttttttttttgtttttaattgatttatttaaattcgttatttattaattatttgggtattttgttgttattcgttatttaatatgtttggttagtgagtggagttgggttataatagtattattttaaaaatggaattggaaaattatttttttttttaagtttgttttttggtttattttatatttagttagatttggaggttggtatttagggaattatttaaaaagttagacgtgatattagtagtaaaatgtaggttttattgaaatatagtttagagtaagtgtatttttttgaagttttttagttttttttgtttgtattttttattttgtttttgttgcgtgcggttttatggtttttttatttgattttgtattttattatttttattttatttttattatgtttattttttggttaaattattttttttttttggtttttttaatgatattattttttagttttttttttattgttttgtttttgtttgtttgtttgtttgagagagtttcgttttgttatttaggttggagtgtaatggcgttatttcggtttattgtagttttcgttttttgggtttaagcgatttttttgttttagttttttgagtagttgaatttataggtgtgcgttattatatttagttaatttttgtatttttagtagagacggagtttcgttatgttggttgggttggtttcgaatttttgattttaagtgatttgtttgttttagttttttaaaatgttgggattataggtatgagttattgcgtttggtttattgttttgttttttaatcggttttttttgtagtttttttgttagtttttttaatattaagtatgttttaaggatttgttttaggttttttttttatttattttatatattttttttaggtaaaattatttttttttttttttttttttttttttttttttttttttttttttttttttttttttttttttttttttttttttttgagatagagttttattttgttatttaggttggagtgtagtggtgtgattttagttcgttgtaatttttattttttaggtttaagcgatttttttgttttagtttttcgagtagttgggattataggtatacgttattatgttaggttaatttttgtatttttagtagagatggggtttcgttatgttggttaggttggttttttgattttaggtgatttatttattttggttttttaaagtgttgggattataggcgtaagttattatatttcgtttttatttatttttgtggttttagttttttatttataaatggtttgaaaaatttgtatttttagttagattattttttagagttttaggtttaaatgattaattgttaagaggatatttttatttggatgttttataggtattttgttcggaatggaattttttattgttttaaaatatt

SEQ ID NO: 59 - DNA, 6019 bp, Artificial Sequence
  chemically treated genomic DNA (Homo sapiens)
ttgggtttaagtgattttttcgttttagttttttaaagtgttgggattataggtatgagttattatgtttggattaaagtagagagtttgaagggagtttttagaaattagatatgaattttgtgggtataggatttgtgatgtagaaaaggttgagaatttttggatatataaggttgtaggggttaaaagtagatataggtgtttagattttggagtaggtgggagttggaagatgattttgatggtgttgagtagttggaaatttgaaaatgggggtaggatgtcgggcgcggtggtttacgtttgtaattttagtattttgggaggttgaggcgggtggatcgtttgtagttaggagtttgagattagtttggttaatatggtgaaattttatttttattaaaaaatataaaaattagttgggtatggtagtagttgtttgtaattttagttattcgggaggttgaggtaggagaattatttgaatttgggaggggaggttgtagtgagttgagatcgtattattgtattttagtttggttgatagagtgagattttgttttaaaaaaaaaaaaaaaaaaaaaaaaattgggggtgggaataggggttggaagaggtatagatttgggagttattatttagagggtagggataagtattttatgggtagataagtagggtaggggtggtagtgatttattaagagtttggtagttataagtaatagaaatttatttaatttcgtttaggtaatagagggaatttattgttaatgtgattgaagattgaagtaagattggatttgatgttttatgtaatgttattgggatttggttttatgtttttattttttagttttgtttttttttttgttttggttttatttttaggtagtatttttgtttgtagtgggaagttggttgttagtagtgttacgattatattttatttttagtaaatagagatttattgaattgaatagttgtgattaaagttttagaattaaattttattgggttatatgtttgttgttgaaatggtgtggtaatagggttttttataatgttgtgattggttaagtttgggttacgtgtttattttcgtaattagagatagtgttatttttagagttatatggattgagagttggggtaggggttgttttaggagaaatggaagtgttgttattagaaggaagaatggatatcggaatggtagttatcgggaagggagtcggagttttataggttgttttttttgttaatatgaggtagttatagtagtggggtagtagcggggaggtattaggaggttgggggttgggttagtagtgagggatatggtagattgggttaagtaatagtaatattattgttattgttgtttggggttgtgaaaaggtttaggagggtttttttgataaaaaatttgataatataaaagatatagtgttaagtaagtttttgtttttagaataaaggtaggaaaagttgaatagttgggtgatattttattaagatattgttgttattggaaagggtagacgttgtttggggatatttatgggattgtgagataggatgaaggaaagggtattgttagttggatttgtgaagggaagaaataattattttttttttaagtttaaaaaatgaagtttatgtatttttataatagtaataaatttataatagtttaaaataatttaaattttaatagtaggagtttgggtaaatattgtaatgttcggagagtaaaatgtagtttttataaatgatgttttatttgatatggaaagatgtttataatgtagtttttttgttttgttttgtttttgtattttttgtagagatgggtgggggtaggttttgttatgttgtttagattggttttgaatttttgggtttaagtgatttattcgtttcggttttttaaagtgttaggattataggtgtgagttatattagaggtaggattatagttgaagtttatttttttgttttttttttttaggtggggttttgtttttgttgtttaggttagagtgtaatggcgtaatttcggtttattgtaatttttgttttttaggttttagcgatttttttgttttagtttttcgagtagttgcgaatataagtgtatgttatatttagttaatttttgtatttttagtagagaaagggttttattatgttggttaggttagttttgaatttttgattttaagtgattcgtttatttcggtttttcggagtgttggaattataggcgtgagttatcgtatttggtttttttttttttttttttttgagatagagttttatttttttgtcgtttaggttggagtgtaatggtatgatttcggggttattgtaattttcgttttttggatttaaatgatttttttgttttagttttttaagtagttgggattataggtatttgttattatatcgagtaaatttttgtgtgtgtgttttttagtatagatggggttttattatgttggttaggttggtttttaatttttgattttaggtgatttattagttttagttttataaagtgttgggattatagatgtgagttattgtgtttggtttgaagtttattttttaatttttttataataaatttgtttgatagtgtggtagtgttatagttaattagagttagttttttgagtgtaagttttagttttgttattgtttggtatggcggttatggataagttttttaatatttttgagttttagtttatgtaattataaagtgggggtaatagtttttaatttatagggtggttgtgagtattaaattagttattattatttgtaaagttattagttatatttgtagtaaatattaaaaaatgtagtttttatttttgggtaattaaaaaatttaaaagagggttgggtgcggtggtttatatttgtaatcgtagttttttgggaggttaaggtaggtggattataaagttatgagtttaagattagtttggttaatatggtgaaatttcgtttttattaaaaatataaaaattagttgggtatggtggtgggtatttgtagttttagttatttgggaggttgaggtaggagaattgtttgaattcgggaggcggagattgtagtgagtcgagatcgaattattgtattttagtttgggtgatagagcgagatttcgttttaaaaaaaaaaaaaaaatttaaaagaaaatatgattataagttaatatattggaattaagtgtttttgttggttaaatagttgtggtagtagataataaatgagttgttattaagataagtaatttttttttattttttttgagatagagtttcgttttgttgtttaggttggagtgtagtggcgcgattttggtttattgtaagtttcgtttttcgggtttacgttatttttttgttttagtttttcgagtagttatgattataggagttcgttattacgttcggttaatttttttgtatttttagtagaggcggggttttatcgtgttagttaggatggtttcgattttttgatttcgtgattcgttcgttttggttttttaaagtgttgcgattataggtatgagttatcgtgttcggtttaggataagtaatttaagcgatttttttttaatatggggaaatatttaagaataagagagggaagttttttatttttttgaagtttttatattagtagagaagataaataatagatattgcgaagataggatgattgaagaatgtagtgatataaatttgggggaagaggagggaggtagagtaaagaaatttaaggttttggttagacgtaatgttttatattttgtaattttagtagtttgggaggttgaggtaggttgatagtttgtgtttaggagttcgagattagtttgggtaatttagtaaaattttgtgtttataaaaaaatataaaaattagttaggtatggtggtatgcgtttgtggttttagttatttgggaggttgaggtgggagaatcgtcgggacgtcgagattgtagtgagttgagatcgtgttattgtatttttgtttgggtgatagagtaagaacgttttaaagaaaaaataataataataataataataataataataaaaatataaggtttgtggttgggggaaggttgtaattttaaaaaagatttatgtggttatagcgagggatattgggtgtaggtagagataagaagagtgatatttagtttttatattacggcggattgaatataggttcggggagtgagagattatttatttttgtgatttggggtaagttattagtttttttagagaagttttcgttttttttgtaaaatgggataatattttgttttataagtttgtaaggattaaaagaattggtagtgggtcgggcgcggtggtttacgttcgtaattttagtattttgggaggtcgaggtaggtggattatttatttgaggttacgggttcgagattagtttgggtaaaatggtgaaatttcgtgtttgttaaaaatataaatattagtttggcgtggtggtaggtgttagtgattttagttattcgggaggtagaggtaggaggatcgtttgaatttaaggggtggaggttgtagtgagttgagatcgcgcgttgtattttagtttgggtaatagattaagattgttttagaaaaaataaataaaaaagaattggtagaggaagcgttttgtatattatcgtttatagtattattataaatataattattaggaaaatatgtagagtatagtttcgaatttacgagttgcgtcggttcgcgcgtgcgcgataggcgggcggagttagggtagtttaggtatcgttttgattcgttttagttttttttttttttttgttttttttattttcgcgggtatttaattgtgcgttttttgcgcgttgacgttaggtgcgtgtttttgttcggtagtcgaggagatttcgcgtagtgttgttaacgtttcggtggagaagttgaggtgagtgcggggttcgaggtttttcgcgggagttgttattttatttttttattttcgtcgttttcgtttttttttagttttcggggatatttcgtttgcgggatcgtggggggttcgggagtacgggttgtgggggagtgttcggttcgcgttgcgtttttcgggcgggcgcgggttcgcgttttgtgggggagtcggggcgggggtcgcggtcggggaggtagggggcgttcgtttgaggaggggcgcgcggtcggggttcggggcgcgagcgggatcgggttgttatcggtagcggcggaaggaagggggttatatttattttgggcgttcgggtttttttttttttagttcggttcggcgggtttttaagggcggtcgggggttttagagcgattcgcgggcgtttgggtcgggtcgggcgtcggtttttcgtgttggtaggttgcgtttcgtgttttgcgtttcggtttggattttttgtttcgtcgggcgtcgtcgcggatattttgcggcgggggtgggggggcgggggaggggagtggcgttgcggtcgcggcggggcggtggtaggagggtagttcgttggttgttcgcggcggtgtttgttcgagttttttttcgcgtcggtcgcgttttttgggcggggtggtttcgagttacggtttttaggttgttttttttttcggaggtcgagtttttagtatttttattcgtttttttagttcgttttttgtcggtttagttgaagtttttttttcggggagttatttaattatttttcgaagtcgtcgttttgttgtttggttaattttttttatcgggggggaattttttttgttcgtttgtttttttttttttttaagtttaagataaatgtagtgtggaagattacgttatcgcggtataaggagtgagatttaatttttataagttagggatttaaatttaaatagtattttgtagttttagtcggttatttagtggtttattttgtttg

SEQ ID NO: 60 - DNA, 6019 bp, Artificial Sequence
  chemically treated genomic DNA (Homo sapiens)
taggtaggataagttattgggtgatcgattaaggttgtaaaatgttgtttgaatttaagtttttgatttgtaggagttaagttttattttttatatcgcgatgacgtaattttttatattatatttattttggatttaaaggggaggaaaaataaacgaataaagaaaattttttttcgataagaggaattaattaagtagtagaacgacggtttcgggaggtagttaggtaatttttcgaaagggaagttttagttaaatcggtagggagcgggttggaggagcggatggaaatgttaggaattcgattttcgaaaggaagagtagtttggaggtcgtggttcggggttatttcgtttagaggacgcggtcggcgcggaggggagttcggataggtatcgtcgcgagtagttagcgagttgtttttttgttatcgtttcgtcgcggtcgtaacgttatttttttttttcgtttttttattttcgtcgtaaaatgttcgcggcggcgttcggcgaagtaggaagtttaggtcggagcgtagggtacggaacgtagtttgttagtacggaagatcggcgttcggttcggtttaagcgttcgcgagtcgttttgaggttttcggtcgtttttaggagttcgtcgggtcgggttggggggaggggagttcgggcgtttaggatgggtgtgattttttttttttcgtcgttgtcggtgatagttcggtttcgttcgcgtttcgagtttcggtcgcgcgtttttttttagacgggcgttttttgttttttcggtcgcgattttcgtttcggtttttttatagaacgcggattcgcgttcgttcggaggacgtagcgcgagtcgggtatttttttataattcgtgttttcgggttttttacgatttcgtagacggggtgttttcgaggattgggagaggacggagacggcggggatgggaaggtagggtggtagttttcgcggggaatttcgggtttcgtatttattttagtttttttatcggggcgttggtagtattgcgcggggttttttcggttgtcggataggggtacgtatttgacgttagcgcgtaggagacgtatagttgggtgttcgcggaagtgggaggaatagggaaggggaagaggttggggcgggttaaggcggtgtttggattgttttggtttcgttcgtttgtcgcgtacgcgcgggtcggcgtagttcgtgagttcggggttatgttttgtatgtttttttaatggttgtatttgtaataatattgtgaacgatagtatgtaaagcgttttttttattagtttttttttgtttgttttttttgagatagttttgatttgttgtttagattggagtgtagcgcgcgattttagtttattgtaatttttattttttgggtttaagcgatttttttgtttttgtttttcgagtagttgggattattggtatttgttattacgttaggttaatgtttgtatttttagtagatacggggttttattattttgtttaggttggtttcgaattcgtgattttaagtaagtgatttatttgtttcgattttttaaagtgttgggattacgggcgtgaattatcgcgttcggtttattattagtttttttgatttttgtaagtttgtgaagtaaggtattgttttattttgtagagaagacggaagtttttttgaaagggttggtgatttgttttagattataggggtggatggttttttatttttcgggtttgtatttagttcgtcgtgatgtgagaattgagtattattttttttatttttatttatatttagtgtttttcgttgtagttatatgggttttttttagagttataatttttttttaattataggttttgtgtttttgttgttgttgttgttgttgttgttgttgttttttttttgagacgtttttgttttgttatttaggtaggagtgtagtggtacgattttagtttattgtaatttcgacgtttcggcgatttttttattttagttttttaagtagttgggattataggcgtatgttattatgtttggttaatttttgtatttttttgtagatatagggttttgttggattgtttaggttggtttcgaatttttggatataagttattagtttgttttagttttttaaattgttgggattataaggtgtgagatattacgtttggttaaggttttgaatttttttgttttgttttttttttttttttttaaatttatattattgtattttttaattattttattttcgtagtatttattatttgttttttttgttagtatgaaagttttaggaaaatagagaattttttttttttatttttagatgtttttttatgttagagaaaaatcgtttaaattgtttattttaggtcgggtacggtggtttatgtttgtaatcgtagtattttgggaggttaaggcgggcggattacgaggttaggagatcgagattattttggttaatacggtgaaatttcgtttttattaaaaatataaaaaaattagtcgggcgtggtggcgagtttttgtagttatagttattcgagaggttgaggtaggagaatggcgtgaattcgggaggcggagtttgtagtgagttaagatcgcgttattgtattttagtttgggtaatagagcgagattttgttttaaaaaaaataaaaaaaaattgtttattttaataatagtttatttattgtttattgttatagttatttggttaataaagatatttaattttagtatattgatttatagttatatttttttttggattttttttttttttttgagacggagtttcgttttgttatttaggttggaatgtagtggttcgatttcggtttattgtaattttcgtttttcgggtttaagtaatttttttgttttagttttttaagtggttgagattataggtgtttattattatgtttagttaatttttgtatttttagtagagacggggttttattatattggttaagttggttttgaatttatgattttgtgatttatttgttttggttttttaaagggttgcgattataggtgtaagttatcgtatttagtttttttttggattttttaattatttaaaaataagaattatattttttagtgtttattgtaggtatggttaatagttttgtaggtagtagtagttaatttaatatttatagttattttatgagttaagaattgttatttttattttatggttatatgaattgaagtttagaggtgttaagagatttgtttatagtcgttatgttaagtagtggtagagttgagatttgtatttaggaggttggttttagttgattatgatattattatattattaagtaggtttattatagagaaattagaagataagttttaggttaggtatagtggtttatatttgtaattttagtattttgtgaggttgaggttggtggattatttgaggttaggagttgaagattagtttgattaatatggtaaaattttatttgtattaaaaaatatatatataaaaatttgttcggtgtggtggtaggtgtttgtaattttagttatttgggaggttgaggtaggagaattatttgaatttaggaggcggaggttgtagtgatttcgagattatgttattgtattttagtttaggcgataaaaaagtgaaattttgttttaaaaaaaaaaaaaaaaaaaagttaggtgcggtggtttacgtttgtaattttagtatttcgggaggtcgaggtgggcggattatttgaggttaggagtttaagattagtttgattaatatggtgaaattttttttttattaaaaatataaaaattagttgggtgtggtatgtatttgtattcgtagttattcgggaggttgagataggagaatcgttggaatttgggaggtagaggttgtagtgagtcgagattgcgttattgtattttagtttgggtaataagaataaaattttatttaaaaaaaaaaaataggaagataagttttagttgtagttttatttttaatgtggtttatatttataattttaatattttgggaggtcgaggcgggtggattatttgagtttaggagtttaagattagtttgggtaatatagtaagatttgtttttatttatttttataaaaaatataaaaataaaataaaataaaaaaattatattgtgaatatttttttatgttaaataaagtattatttgtaaaggttgtattttatttttcgggtattgtaatatttatttagatttttattgttggaatttgggttgttttgggttattgtgaatttattattattgtaaaaatgtataagttttattttttaaatttgaggggaaaatggttgttttttttttttataagtttagttggtagtgtttttttttttattttgttttataattttatgaatgtttttagataacgtttgttttttttagtagtagtaatattttgatggggtgttatttaattgtttagttttttttgtttttattttgaggataaggatttatttagtattatgttttttatgttgttaggttttttgttagaagaatttttttagatttttttatagttttaaatagtagtggtaatggtgttattattatttgatttaatttattatgttttttattgttggtttagtttttagttttttagtgttttttcgttattgttttattgttatagttgttttatgttaataggagggatagtttgtgggatttcggtttttttttcggtggttattatttcggtgtttatttttttttttggtaatagtatttttattttttttagagtagtttttgttttaatttttaatttatgtggttttagagatgatattatttttagttgcgggaatggatacgtgatttaggtttggttaattatagtattatagagagttttgttgttatattattttagtaataggtatgtgatttaatgagatttaattttggaattttggttataattatttagtttagtgaatttttgtttgttgagagtaggatgtaatcgtggtattgttggtagttagttttttattgtaagtagagatgttgtttgagaatgagattaagatagagggggaaatagaattgagagatggagatatgaaattaagttttagtggtattgtatgagatattagatttagttttgttttaatttttagttatattagtaataaattttttttattgtttgaacgaggttgagtaggtttttgttgtttatgattgttaaatttttgatgaattattgttatttttgttttgtttgtttgtttatgaggtatttgtttttattttttaggtaataatttttaaatttatattttttttaatttttatttttatttttaatttttttttttttttttttttttttgagatagagttttattttgttaattaggttggagtgtaatggtgcgattttagtttattgtaatttttttttttaggtttaagtgatttttttgttttagtttttcgagtagttgggattgtaggtaattgttattatgtttagttaatttttgtattttttagtagagatggggttttattatgttggttaggttggttttaaatttttgattataggcgatttattcgttttagttttttaaagtgttgggattataggcgtgagttatcgcgttcggtattttatttttatttttaaatttttagttatttagtattattaaaattattttttagtttttatttattttagggtttaagtatttatgtttgtttttggtttttatagttttgtatatttaggagtttttaattttttttgtattatagattttatatttataaaatttatatttaatttttagaggttttttttaagttttttgttttagtttaggtatggtggtttatgtttataattttaatattttgggaggttgaagcgggaggattatttgaatttag

SEQ ID NO: 61 - DNA, 5768 bp, Artificial Sequence
  chemically treated genomic DNA (Homo sapiens)
tatagtaattgatatatatgcggttagtgaatatttttttaatgttgttgaatttgttaaataaatgaataatatggaataagtgttatttatgttattgtgataaaagttggagtataggttgttagggaagtacgtatttaggaatttaatttatttagttggtgaggtttttttgagaaagatatgttttatgttgggttataaaagataaatatgaaaattgtttattttagttattagatatatattaagttatttaagagtggagttttttttttagttatttgtatattataagtatttattgtgttgttgggtatagtaagtgtgagaaggtatttattgaatgaaaaaataaatttaaatgttaggtgttttttatgagtttttttagaagttttaaatattatttggtttgtgtaataattttgtaggtagtttttttttgttttatattattaattgagaaattaaattttggtaaatttgtggatttttgagtattttaaatttttttgttgttttattgtagttttagaattgatttatattttttagatttttaaataatttgtaattttgtttttgaaataaaaattttttttattaaattttaagtgtttcgttttggtatattttataatgtttggttagaattttattttataatttaggaatttttttatttatttggtattgttttaagaaataatttttgtttagttttaaaagttgtgtattttttttattttatttttttttttttttttttttaagattaggttttgttttgttatcgaggttagagtgtagtggtgttattatagtttattgtagattaaatttttaaggtttaagtaatttttttattttagttttttaattagttgggattataggtatgtgttattatgttgagttaattttttttatttttatttttattttttggtatttttttgtagagatagtattttattatgttgtttaagttggttttaaatttttggatttaagttatttgttcgttttaattttttaaagtgttgggattataggtatgagttattatattcggtttgttttatttttattttaggttaataaattttttaaagataggaggttttaagatagtgtgttagttatttatatatataatagtggaaagggggataagatttttattaattttttttttgttattttttttttttttagttatttttttttttttttttttttttttggtgtgtgtgtgggggggcggggtgtgttttttagtagggatatttatggagagagagatgagtaaaattatttgaaagttgttttgggaatttattttgagtttatcgtataattgattagagattttttattttttttagagtgagaagttgtatttaatttaaatttttataggttttaaggtttttagtagttgggtatttggtttttttagataatttttagaattatttggtttttaaatgtagattatttggtgtttaagtagtttgaagtttattaataagattgtttttatgtgttttttttaagataagaggatatttaggagggtaggatttttttgtaatagtatagatttataattttattggtataaataggtttatggttttttttgttaattttgagttagtaattttttttagtttataatgggttagtcgtgagttagggaagggatagattttgggttaggttatttaaagaaaattttattgattttggaggatgtagagatagaaataaaagataaaaagatatatatatatatatatatatatatatatatatatatatatatgtatatgtagtataaatagatttggaggtagaataaatatgttatgaaggaaaaatggtaaaggtattggtttgattttaaagaaaattgtgtgtatgtagttattaatatttttaaataataatttttattaaataatttatttttatttttaatttgtttataggagatataagtgtaattaattatttgaaatttaatgtttagttgagtatggtgatatatagttgtaatttttgttatttgggacgttgtggtaggagaattgtttgagtttcggagttatagtgatttatgattatgttattgtattttagtttgggtaatagagcgagattttgtttttattaagtaaatatataaatgaatgaataataaaaataaataaataaaatttaattttttattgtatattaattttatagttatttattaaatttatattatgtgaatagttatgtgttaggtattagggatgggattattgataaagggggaaaaagtatttattataaattaattaatataagttaataatgtttaggtttatgggattaagtattttatatgtattatgttattttatttaatttaatttttatagtaaaattaagtaagtattttatttatgttatatttttgaaataggagtgttatagatattgaataatttgtttaagttatacggttagtataaagtttataaataatttgatattgtagttattattttatttgtgcgttttattttttaataaagataagaaattaaattaagaaataaattaaattttaagagttgtttttatttgtagattttttgttcgttaataaatttaatatagtttttttgttttattttaaagttgttttttttgaaggttttaatgattatttttgattaattttgtatttttattatttttgtgaagtatttgttatagttgattatttttttttaattgtaaaattttttgtttttgatttttatgatattatttttttattttatagattattattttttagttttttgttggttttttttttttttttgtttaattatgaaatgttggaagttattatagtttaattttttatttataatttttgtttagataatatcgtatagtttaagattaggttttatttataaatttataattgttaagtttatttttttattttgaattatattttagattaatatatttatttgtttttttgatattattatttgtatattttggatttgattattgttaacgatttttcgataatgattattaggaatataattatagttgagtaatttggatgtattgtttgttttagtacgtgagaatgtatattatggggaattatgggatgttttaggaagagggtgttaaaaaggatttgttatagaatttgagtttgtgttaggagatttacggaagggtgtaagaaagagggattttggtttggattggaagttgtaaggaagtaaggataattttataattgggtattttaataagtattatgtagaaggaaggaagattagattgaggttaaaattataattggtaaagaagtagtaggtatttatattagttaggataaggagatatttgattatttttatggtttgggtaatgttgatgttgtgtttgtgtttatatatgattatagagtgattttatttttgttttgatttattacggttataattttgttttgtttgatgttttgtgaaattgtttatgtttaatagaagaatattaatgtttggttgtgattgttaggttagtttaaagtaatagtaaattaagttggtagtattaggttattttttggatgttaaggtttgtttttttttttttcggtatttatattagaatttttgatttatttttttttattttatttaattaaaaattattattttatagattttttttttatgtggtattattatttatatatatgttagtttaaaatttaagatttattgttgatgatgtttttttttttattttttatagttaattattaaattttattgtttttttttttttatttttttcgttattgttttggtttaaattattattatgttttttttaaatataaagtgtattttattttttttgtttttatatttgtttttttataatttattttttttataatagatagattatattatttttttgttttaaaatttttaaatagtttttaattgtatttagaataaatattaaattttttattttggtttttaaggattttggtttggtttttgtttaattttttatttttatttatttgggattattttgcggtttatttattatgttttttttatattggttttttttgttttgtttttgtaatatattaagtttttttttttttttgtatttgttttattttttttttgttaggataatagtttttttattagtttttttttatttaggtttttttgagagggtttttttgattatttagatgttatttttttggttagtattttttttaagtagtaattaatgtcggaaagaatattgtttatttatttattcgttattgttatcgttttattggaatttagttttttatagggatggtgtttattttgtttattatgattttagtttttagaaaaatttatttattttatagttaagggtttagtaaatagtatatattgtttttttgttattgtgttaatttttattaatatagttataaataattagtaattatattttttgtttgtttttaacggggaagtagggtatttaacgaaaaggaaataaaagtagagttaagaaagtgttttttatttatggagtgtttaatgtgttgtgcggtcggttacgtatatagggatgtgttagtatttgagatttttttttttttgagttagttttttttttggaaattatgttgggtttttagttttatggtttattttgttttttaagattatttacgggttttattttcgtaatcgtttttttagttggttaaggcggcgggaagaaattttatttttttgcgtaaacgtttagtagcggaattcgcggggtcgagggttttagtgtgcgtatgtgtaattagagcggcggcgggaagtgttgcgtaggcgtattcgatcgattcggtaggtggggattttttggagacggcgatttaggtatttggggagttatagaagtcgtatttttttaaatcgtgagttttcgacggtttgttttatggcgcgggattgtgagggattaggaacgaattttggatcgtgatttcggttttttcgtcgtgtagttttttttttcgttttttttcggattttttcgatttgcggcgggaaagtcgcgcgtttgcgtattaagtatttggttcggtttttggttcgagggaagtcggtttttttcggttgagttcgcggttagcgttggtcggcggatttttatttatttattttttttttttttcgtttagtattcgtggttagggtcgtattagtttttcgttaatttgtttggggttttggacgagttttttggcgttttttgttagtggcgaaaaggtttttttttttagttttttttttgattttaaatcgttttcggcgttcggttttttttttacgcggtttcgttggttgtgtcggattggtagtttcgtcgttttttattgcgtttgttgttgcgcgggtgtttaagtcgggaaattttttttgtagttttttgtcggtgtttttgataggtgaaaataaagtatatggaattttttagataaggttatagtatgttttattgtggaggtttggatatatcgtgcgtttgaaaatgtttgtttttttggggggtagtagtatgtttttagtgcgtggtttagcgagtgatttaaatttttttagtgttttaatttttatagt

SEQ ID NO: 62 - DNA, 5768 bp, Artificial Sequence
  chemically treated genomic DNA (Homo sapiens)
gttgtgaaaattagaatattagagaaatttagattattcgttaaattacgtattaaaaatatgttattgttttttaaaggggtaaatatttttaaacgtacgatgtgtttaaatttttatagtagggtatattgtggttttgtttaaggaattttatgtgttttatttttatttattagaaatatcggtagggggttgtagggagaatttttcggtttgggtattcgcgtagtagtaggcgtagtgggaaacggcgaggttgttagttcggtatagttagcgggatcgcgtgggggaggggtcgagcgtcgggggcggtttgaagttaggaaaagaattgagggagaaaattttttcgttattgataggaagcgttaggaggttcgtttaaggttttaagtaagttgacggagaattgatacgattttggttacgagtattgggcggaggaggagaagggtgaatgaatgggaattcgtcggttagcgttggtcgcgagtttagtcgggaaggatcggtttttttcgggttagagatcgaattagatgtttagtgcgtaggcgcgcgattttttcgtcgtaggtcggagggattcgaaggggggcgggaaaaggaattgtacggcgagaaaatcgaagttacgatttagaattcgtttttaattttttataatttcgcgttatggaataaatcgtcggaaatttacggtttaagggagtacgatttttgtggttttttagatgtttgggtcgtcgtttttaagagatttttatttatcgagtcgatcggatgcgtttgcgtaatatttttcgtcgtcgttttggttgtatatgcgtatattaaagttttcgatttcgcggatttcgttattgggcgtttgcgtaagagggtggggttttttttcgtcgttttggttagttagaagagcggttacgggaatgaagttcgtggatgattttaaaaaatagggtgaattataaggttaagggtttagtatgatttttaggaaagaagttagtttagagaaggaaaaattttaggtgttgatatatttttatatacgtggtcggtcgtataatatattgggtattttatggataaaaggtatttttttgattttgtttttatttttttttcgttgagtgttttattttttcgttaaaaataagtagaaaatgtaattgttgattgtttgtggttgtgttagtagaaattagtatagtggtaggaaggtagtgtatattatttattgagtttttggttatgaggtaggtgggtttttttaggggttggaattatagtgagtaagataaatattatttttgtaggaagttaaattttaatgaagcgatgataataacggatgaataaatgaatagtatttttttcggtattgattattatttgagggaaatattgattaggaaggtggtatttagatggttagggaagtttttttaaagagatttggatgagaaagagttggtagggagattgttgttttggtaaagaaaggatagggtaaatgtagagagaaagaggaatttggtatgttgtaggggtagggtaggaaaggttagtgtgggggaagtatagtgagtgagtcgtaagatagttttagatagatgaaggtggagagttaggtagaagttagattagggtttttgaaagttagggtaagaagtttagtgtttgttttgagtataattggaagttatttgaaagttttaaagtaagggagtaatatgatttatttgttatgaagagaatggattgtagaggggtaagtgtggaagtagaggaaataggatgtattttatgtttaggagaaatataatggtagtttggattagaataatggcggaagaaataaaagaaagaagataatgggatttggtgattggttatggaaaatgaagaaaagggtattattaatagtgaattttaggttttgggttagtatatgtgtgggtggtagtgttatatagaagggaagtttgtgaggtaatggtttttgattgagtgaggtggaagagagtaaattaaggattttagtgtggatatcgagaaagagaaaagtagattttgatatttaggagatggtttggtattattagtttggtttgttgttgttttgagttggtttggtaattatagttaagtattggtatttttttgttgaatataaataattttatagaatattagataagatagagttgtgatcgtgatagattaagataaaagtaagattattttataattatatgtgaatatagatataatattaatattgtttaagttataaaaatgattaaatatttttttattttagttaatatgagtgtttgttgtttttttattaattatagttttaattttagtttagttttttttttttttatataatatttattaaaatatttaattatagaattatttttgtttttttatagtttttaatttaggttaaagttttttttttttgtattttttcgtaaattttttaatataaatttaaattttataataagttttttttaatattttttttttaagatattttatggttttttatggtgtgtatttttacgtattgaaataagtaatatatttaagttgtttagttatagttgtgtttttggtggttattatcgggaggtcgttaataataattaagtttaagatatgtaagtgatgatgttaaagaaatagatgaatatattggtttggggtatagtttagggtgaagaaataaatttggtagttatgaatttatagatgaaatttagttttggattatacgatattatttaagtaaagattgtagatggagagttgggttatgataatttttaatattttatagttgagtagaggaggaggaagaattagtaagagattgagaagtagtagtttgtgaggtaagaaggtgatgttatagaagttaagagtagaaagttttataattagaagaaagtggttagttatagtaaatgttttatagaagtagtgaggatatagaattgattagagatagttattagagtttttagaaagagtagttttggagtgagatagaaagattatattgaatttattgacgaataaaagatttataaatggagataatttttgaggtttggtttgttttttagtttggttttttgtttttattggggggtagggcgtataaatagaatagtggttatagtgttaaattgtttataaattttatattagtcgtgtaatttgggtaagttatttaatatttgtgatatttttattttaaaaatgtaatatggataaaatatttgtttggttttgttatagggattaaattagataaagtgatataatatatgtaaagtgtttggttttataggtttggatattgttagtttgtattagttaatttataatgggtattttttttttttttgttaatgattttatttttaatatttagtatatggttgtttatatagtatggatttaataaatggttatggaattaatgtataatgagaagttaggttttatttatttatttttattatttatttatttatgtatttatttagtagagatagagtttcgttttgttgtttaggttaaaatgtagtggtatgattatgaattattatagtttcgaggtttaagtaatttttttgttatagcgttttaagtagtaaggattatagttgtatgttattatgtttagttagatattaggttttaaatggttggttgtatttatgttttttgtaagtagattggaggtggagatagattgtttaataaaaattattatttagagatgttgataattatatatatatagttttttttagggttagattagtgtttttattattttttttttataatatgtttattttgtttttaggtttgtttgtgttgtatgtgtatgtgtgtgtgtgtgtgtgtgtgtgtgtgtgtgtgtgtgtgtgtttttttgttttttgtttttatttttgtattttttaaagttagtgaagttttttttagatagtttagtttaggatttgttttttttttaatttacggttgatttattatgggttggaagaagttattaatttagagttagtaagaaaagttatggatttgtttgtgttagtgagattgtggatttgtgttattgtaaagggattttgtttttttaagtgtttttttgttttagagggagtatatgagaataattttattagtagattttaaattatttaggtattaggtaatttgtatttagaagttaagtgattttaagagttgtttgggaaaattagatgtttagttattggagattttgaggtttgtggaaatttgagttgggtgtaattttttattttgggagaaatggggagtttttggttagttgtacggtgaatttagaataggtttttagaataatttttaaataattttgtttatttttttttttatgaatgtttttattaaaggatatatttcgtttttttatatatatattaaaaaaaaaaaaaaaaaaaaaaaaatgattaggaaagaaagaaatgataaaggaaaagttagtggaagttttatttttttttttattattatatatataaatagttgatatattgttttagaattttttatttttaaggaatttattaatttaggatagaaataaagtagatcgggtgtggtggtttatgtttgtaattttagtattttgggaggttgaggcgggtagatagtttaagtttaggagtttgagattagtttgggtaatatggtgaaatattgtttttataaaaaaatattaaaaaataaaaataaaagtaaaaaggattagtttagtatggtggtatatatttgtagttttagttaattgggaggttgaggtgggaggattgtttgagttttgggggtttagtttgtagtgagttgtgatggtattattgtattttagtttcggtgataaagtaagatttagttttaaaaaaaaaaaaaaaaagagataaagtaaaggaaatatatagtttttgaaattgaatagaaattattttttagggtaatgttaagtaaatgaagaaatttttaggttataaaatgaaattttagttaggtattataaagtatattaggacgaaatatttagaatttaatggggaaaatttttattttaaaaataaaattgtaaattatttaaaaatttaaaaggtatgaattaattttgaaattataatgaaatagtaagaaaatttgaaatatttaaaggtttataaatttattaaagtttgattttttaattagtaatgtaggatagaaaaaaattgtttataggattgttatataaattaaataatatttaaagtttttaggagagtttatggaagatatttaatatttgaatttatttttttatttaatgaatgtttttttatatttgttgtgtttagtaatataataggtatttgtaatatgtaaatgattaaaaagaggattttatttttaagtagtttgatatatatttaatggttgaagtggatagtttttatatttattttttatgatttagtatggagtatgttttttttagggaagttttattaattgaataggttgagtttttgggtgcgtgtttttttagtaatttgtattttagtttttattatagtaatatgaatagtatttattttatgttatttatttatttgataaatttaataatattggaaaaatatttattgatcgtatatatgttaattattgtg

SEQ ID NO: 63 - DNA, 5919 bp, Artificial Sequence
  chemically treated genomic DNA (Homo sapiens)
agtatgatttgtttttttaagttataggtaattgaaatatagattttataatatacgatgtaatggttttattgggttttatatttttattttacgaagtataacgatatgttgatttaggagaataagtaggaaagaaaggttttagaaattttatatgtagattaatatatagatagatttttggtttgaaagatgattttttttgttttggagtatagatttatgattaattagtagaagttagaaggtagatttttatagataaaaaattttataattatggaggatgttttgtatttttacgttttttagttaggagaatattttataatgaaaagtggagagttttttaaaatatattataatggtcgggcgcggtggtttacgtttgtaattttagtattttgggaggtcgaggcgagtggattataaggttagaagatcgagattattttggttaatatagtgaaatttcgtttttattaaaaatataaaaattagttaggcgtggtggtaggcgtttgtagttttagttattcgggaggttgaggtagaagaatggcgtgaattttggaggcggaatttgtagcgagttgagatcgattattatattttagtttgggcgaaagtgcgagatttcgttttaaaaataaataaataaaataaataaaatatattataacgattagtaaagtatttagtgagtggggcgggtaggtagggatgttatgaatagaattgtttaatttaataagttgaaagtaatttttattgaggaatatggtaggtaattatttattaaaaattatttttaggttagggatagtggtttacgtttgttattttagtattttgggaggttaaggcgggtagattatttgaggttaggagtttaatagtagtttagttaatatggtgaaattttgtttttattaaaattataaaattagattaggtgcggtggtttacgtttgtaattttagtattttggggggtttaggtaggtagattaattgaagttaggagtttaagattagtttggttaatacggtgaaattttgtttttattaaaaatataaatattagttgggtatggtggtaggtgtttatatttatttagttatttaggaggttgagataaaagaattgtttaaatttgggaggcggaggttgtagtgagttaaaatcgtgttattgtattttagtaggtgaaagagtgagattgttttaaaaatataaataaaaataaaaataaaaatattgatgaattattttgtgattattttgtagcgggttttgatattcgttggcgagatggtgttttaaatagggtttataaaattatgtaattgattaagagaggtttgagtatttataaggatatgttggatttttatttgttttatttaggtttaataattattaatattttgttatatttgttttgtttatttttattagttgttgtttttgtttttgttttggttaaagtatgtaaaagtaaattttagatatcgtgttattttaattttataaatttaaaatgtatgagtatttttttgtataagtataatgttattttatgttagataaaattattaaatttagtttatataaaattttatgaatatttggaaaaatgttttatgatttttaaaattaggatttaaaatataagtatagtttttttgttaagagttttaggtgggtgggtgtgaatagattttttttaggatatattaaggaatatagtaaaagaaaaagatttgaaattgtagtatagcgaggaaagttatattaaggagaattttttagaaatttgtgatattaaatatttagggagaaagtagggttgggatataatgtatgtattttagtatagtagaaattatttttattttattttttttttttttgtagaaatttttttttttttttttttttttttttttttttttttttttgtatatagtttagtatagtaaaaattatttttattttattttttttttttttgtagaaattttttttttttttttttttttttttttttttttttttttttgatatagggttttgtttttttattttgcgtgtagtggtacgtttattatttattgtagttttaaatttttaggttgaagttattttttttattagttttttaagtggttaggattataggtgtttattattaagtttggttaattttttttttttttttttttgagatagagtttcgtttttgttgtttaggttggaaggttggagtataatggtacgattttagtttattataattttcgtttttcgggtttaagcgatttttttgttttagttttttgagtggttgggattataggtatgtattattacgtttagttaattttgtatttttagtagagattgggtttttttatgttggttaggttggttttaaatttttaattttagttgatttatttgttttggtttcgtaaagtgttgggattataggcgtgagttattaagtttggtttaggtttggttaatttttttacgtttcgtagagataaggttttattatgttgtttaggttggttttgaatttttgggtttaagtaattttatgattacggttttttaaagtgttgggattataggtgtgagttattatattcggtttttttattttttttttttttttttttttttttatttttttgagatagagttttgttgttgtttaggttggaatgtaatggtgtgatttcggtttattgtaatttttgttttttaggtttaagcgatttttatgtttcggttttttaagtagttgggattataggtgcgtattattatgtttagttaatttttgtatttttagtagagatggagttttattatattggttaggttggtttgattttaagtgatttattcgttttagttttttaaagtgttaggattataggtatgagttattgtgtcgggttttattttttttttttttttttttttttttgagacggagattcgttttgttatttaggttggagtgtattggtgtgattttggtttattgtaatttttgttttttgggtttaagtgattttttagttttagttttttgagtagttgggattataggtatgtgttattatgtttagttaatttttgtatttttagtagagacgggggttttattatattggttaggttggtttcgaatttttgatttcgtgatttatttgttttagttttttaaagtgttgggattataggcgtgagttacggcgttcggttttattttttttttaatgtgtgttgtaattttagttgattttgttgggggaggatttggaattatttattgagtattttattattagaataagagaagttataagatattttattttttttttatttttaattttttttagagtagtacgggatattttagatttttttattattttattttcgttttttgtttttgttacgaggtttaattttttagagtttttttatgtgatgtttagttgagatttttttgtttatttttttagttttagaataaaaggtttgggttgtgtttattcgtatttattttaagaggagaggattgtatttttttagtgtttttatttaatattatattttttgattttttattttaaattttttattttaagagacgttttttaaaagagttttttgtatattttatttttttggagttcgtgttttagtttattgttaaggaagttttagaattagtgttatagagattttttatttttttgtttttttaagtatatgagattatttttaggtaaaattttaaatttttatgtagggagggagtttaggtgtttatatttttattaaattaaatgagtgggagacgtttgaaatattgtcgttattttttattaggaggatagaaattagagtagggggaatttatttttaagtttatatttgtttatgtttatatatttatatatattttttgtagtttttatagttagtaaagtatttattatagttaaatgaagaaggtatttttttagtattagatttattgtgtttttttttttagtaattaaaggtattggggggattgggataggtttttatataagaaaagggtgtttatttgtatagttttttttttttttttttagagaaggtttgggaggggtcggaggagaggaaaaaggaaaaattgataaagggattttggtttttagatattgtttttttattttgttatttaatgatagtttttggttttattgggttatttttattttgatgtattttcgggtaagagttaattgaaaggtagttgcgtaatatatattagatataatagtttattatgggagagtgaattaaattaggaattttttaaaaagatagaaatagaattttgtattttaaaatagagatagtgtcggggtatgttatgaggtagaggtaacgatttttttgaggtttaggatttttttgtaacgagattttcggttttttggtttttaaaggaggtttttgggttaggtggaatttaattttaggtcgatatatattttttttaggattggtgaaaatagtgagttagaaattaagaaatttttatagattagagatataggtaggaaatttggatttaaagtaggtatttgggaagagtgtttagtcgttttatcggggaagaaatttgtttagtttttaagaattaaatttgtttggggcgggattatttgcggggaggagcgttgggttcgtttttcggttttgacgttgattaatagaaaggtttgggggcggagttagggaaacgcgggaagtaggggcggggtttttggtggcggtcgggaattcggtgggaggcggtaatattgttttaagttggttaaattgataagagcgagaggtatattgcgttttatttcgattcggggttacggtattgggttttgttttttttttttcggttttcgagagttagggttcgttttttgtagggtttttaggttttcgttttagggtcgggttgattcgattcgttggcgttttatggagaatttttaaaaggtggaaaagatcggagagggtacgtacggagttgtgtataaagttagaaataagttgacgggagaggtggtggcgtttaagaaaattcgtttggatacgtgagtggtttttgtattcgggatttttaattggggatttttttgattgttttttttaattttttacgggcgggtagtcgtttagggatcggaagagagtagggagggatttttttagaagtggagaggtgggttgggggttagtagaaggtgaagagtatatttatattttttggggagagtatagggtggtgtggaatttatggaaaattttttttttaaattgagtcggatcgtgtttttaaatgtgcgattatagattcggggagagaaaggaggtttttgagatgaggtttaagattttttatggagtggagttatgtgggaatcggcgagaatcgtttttttgaatgaagagttttttttattgttttatttttattttagaatttttttttttttttaaagaatggtagttgaattttattggtttttttggggaggttgggggttatttttgtatttttttttttttattatagtttttttgttttatttttattaggcggttttatttatttatttttgggaaaagaggagataatggttttaatatatttaaaaattatattttgattatttaagaattagtttttattattattttttttttttttttatttttttagggggtgttgggtggtgtttttttgggggaaagaaatgattaggtgggggggaaaggaatatttgtaattatatttttatttttgtttttttaatttttttaagt

SEQ ID NO: 64 - DNA, 5919 bp, Artificial Sequence
  chemically treated genomic DNA (Homo sapiens)
atttggagaggttgggaaagtagagatgggaatatggttataaatattttttttttttttatttagttattttttttttttaaggagatattatttagtattttttaggaaagtgagagaagagaaagggtgatggtaagagttaatttttgggtagttagggtgtggtttttggatatattaaggttattattttttttttttttaggggtaggtaagtaaagtcgtttggtgaaggtgaagtagggagattgtaatggaggggaaaaaatgtaggagtagtttttagtttttttagaggggttagtgaggtttaattgttattttttggaaagaggagagaattttaaggtgagggtggggtagtgaagagggttttttatttagaaaggcgattttcgtcggtttttatataattttattttatggagagttttggattttattttagagatttttttttttttttcgagtttgtagtcgtatatttgggggtacgattcggtttagtttgggaagaaagttttttatggattttatattattttatattttttttagggagtataagtatattttttattttttattggtttttaatttatttttttatttttaaagaagtttttttttgttttttttcggtttttggacggttattcgttcgtggggggttgggggggataattaaggaggtttttagttaggagtttcgggtatagaggttatttacgtgtttaggcggatttttttaagcgttattatttttttcgttaatttgtttttggttttgtatataatttcgtacgtgtttttttcgattttttttattttttggaagttttttatgaagcgttagcgagtcgggttagttcggttttggagcgggggtttgggaattttgtagaaggcggattttggttttcgggggtcgaggagggggaaatagggtttagtatcgtggtttcgggtcgggatggaacgtagtatatttttcgtttttgttaatttggttaatttgaaataatgttgtcgttttttatcgagttttcgatcgttattagaggtttcgtttttgtttttcgcgtttttttggtttcgtttttaggtttttttattggttaacgttagagtcggggggcgagtttagcgttttttttcgtaaatgatttcgttttaggtaagtttggtttttgggggttagataagtttttttttcggtggggcggttgaatattttttttaagtatttgttttgggtttaagttttttatttatgtttttagtttgtagggattttttgatttttaatttattatttttattaattttggggaaaatatgtatcgatttaaggttaaattttatttggtttaggagttttttttggaaattaggaagtcgggaatttcgttgtaaaggaattttgggttttagaggagtcgttgtttttgttttatagtatatttcgatattgtttttgttttgggatgtagggttttgtttttgtttttttgagaagtttttggtttaatttatttttttatgataaattgttgtgtttggtatgtgttacgtagttgttttttagttagtttttgttcgggagtgtattaagatgagagtgatttagtgaaattagaaattgttattgagtagtaggatgggaaagtaatgtttagggattaggatttttttgttagtttttttttttttttttttttcggttttttttaggttttttttgagggagaagaggaagggttatgtaaatgagtattttttttttatataggggtttattttagtttttttagtgtttttggttgttggagggaagaatataatggatttggtgttaaaaagatgttttttttatttggttgtgataggtgttttgttggttgtgggggttataaaaggtatgtgtggatatgtggatatgagtaggtgtgaatttggggatgaattttttttgttttggtttttgtttttttaatgggagatagcggtaatattttaggcgttttttatttatttgatttagtgaggatgtgggtatttgggttttttttttatatggagatttgggattttgtttgaaaataattttatatgtttggaggggtagaaggatagaaggtttttgtggtattgattttgaggtttttttggtagtgagttggagtacgggttttaaaggggtgaaatgtgtaggagatttttttaggaaacgttttttggggtaggagatttaaagtggggagttagagaatgtggtattgggtaagaatattaaggagatataattttttttttttgggatgggtacgggtgaatatagtttagattttttgttttggggttggagagataggtagaggggttttagttgagtattatatgaaagggttttgggggattgggtttcgtgataggagtaaggggcgggggtggggtggtgagagggtttggaatgtttcgtgttgttttgaggagagttggaagtggagaaagaatggggtattttatgattttttttgttttagtggtgggatgtttaatagatgattttagatttttttttagtagaattaattagggttatagtatatattagaaagggaatgaggtcgggcgtcgtggtttacgtttgtaattttagtattttgggaggttgaagtaggtggattacgaggttaggagttcgagattagtttggttaatatggtgaaattttcgtttttattaaaagtataaaaattagttgggtatggtggtatatgtttgtagttttagttatttagaaggttgaggttggagaattatttgaatttagaaggtagaggttgtagtgagttaagattatattaatgtattttagtttgggtgatagagcgagttttcgttttaaaaaaaaaaaaaaaaagaaaggggatgaggttcggtatagtaatttatgtttgtaattttagtattttgagaggttgagacgggtggattatttgaggttagattagtttggttaatatggtgaaattttatttttattaaaaatataaaaattagttgggtatggtggtacgtatttgtaattttaattatttgggaggtcgaggtatgagaatcgtttgaatttgggaggtagaggttgtagtgagtcgagattatattattgtattttagtttgggtaatagtaagattttgttttaaaaaaataaaaaaagaaaagaaaagaaaagagataaggaggtcgggtgtagtggtttatatttgtaattttagtattttgggaggtcgtggttataggattgtttgagtttaggagtttaagattagtttgagtaatatagtgagattttgtttttacgaaacgtaaaaaaattagttaggtttaggttaggtttggtggtttacgtttgtaattttagtattttgcgagattaaggtaggtggattagttgaagttgggagtttgagattagtttgattaatatagagaaatttagtttttattaaaaatataaaattagttgggcgtggtggtgtatgtttgtaattttagttatttaggaggttgaggtaggagaatcgtttgaattcgggaggcggaggttgtagtaagttgagatcgtgttattgtattttagttttttagtttgggtaataagagcgaaattttgttttaaaaaaaaaaaaaaaaaaaattagttaggtttggtggtgagtatttgtggttttagttatttgggaggttaatgaggaagatggttttagtttaggagtttgaggttgtagtgagtgatgaacgtgttattgtacgtagggtgagagagtaaaattttgtattaaaaggaaaggaaaggggaaagggaaaggaaagggaaggaagtttttgtaggaaagggaaaaatggggtgagggtagtttttgttgtgttgaattatatatagaaaggagaggagaggggagggaaggggaggggagagaggtttttgtaggaaagggaaaaatggggtgagggtagtttttgttgtgttgaaatatatatattatattttagttttgttttttttttagatgtttagtgttatagatttttaggaagttttttttgatgtgatttttttcgttgtgttgtagttttaagttttttttttttattatattttttaatgtattttggaaagagtttgtttatatttatttatttaaggtttttaataaaaagattgtatttatattttggattttgattttaaaaattataagatatttttttagatatttatgaaattttatatggattgagtttgataattttgtttagtatgaaatgatattgtgtttatgtaagaaaatatttatatattttaaatttgtagggttaaaataatacgatgtttgggatttgtttttatatattttagttaaaataaaaataaaaataataattagtaaggataaataaagtaaatgtggtaaggtgttgatagttgttggatttgggtggggtagatggaggtttagtatatttttataaatatttagattttttttggttagttatataattttgtgggttttgtttaaaatattatttcgttagcgggtattaaaattcgttgtaaaataattatagagtggtttattaatatttttatttttatttttatttatgtttttgagatagttttatttttttatttgttggagtgtaatggtacgattttggtttattgtaattttcgttttttaggtttaagtaatttttttgttttagttttttgaatagttgggtgaatataagtatttgttattatgtttagttaatatttgtatttttagtagagatagggttttatcgtgttggttaggttggttttgaatttttgattttagttgatttgtttgtttaggttttttaaagtgttgggattataggcgtgagttatcgtatttggtttagttttgtagttttagtagagatagggttttattatgttagttaggttgttgttgaatttttgattttagatgatttgttcgttttggttttttagagtgttgggataataggcgtgagttattgtttttggtttaaaaataatttttaatgggtgattatttattatgttttttagtagaggttgtttttagtttgttgggttgggtagttttgtttatagtatttttgtttgttcgttttatttattaaatgttttgttagtcgttgtaatatgttttatttattttatttatttatttttgagacggagtttcgtattttcgtttaggttggagtgtagtggtcgattttagttcgttgtaagtttcgtttttagggtttacgttatttttttgttttagtttttcgagtagttgggattataggcgtttgttattacgtttggttaatttttgtatttttagtagagacggggttttattgtgttagttaggatggtttcgattttttaattttgtgatttattcgtttcggttttttaaagtgttgggattataggcgtgagttatcgcgttcggttattgtgatatgttttaaaaaattttttattttttattatgaaatgtttttttagttgaaaaacgtagagatgtagagtattttttatagttgtaaaattttttgtttataggagtttgttttttagtttttattgattggttatagatttgtattttaaaataaaaaaggttattttttagattaaagatttatttgtgtgttgatttgtatatagaatttttggagttttttttttttgtttgtttttttgggttagtatgtcgttgtgtttcgtaaaataagagtatagagtttagtaaggttattatatcgtgtattatggagtttatattttagttatttatgatttagaggagtaaattatatt

SEQ ID NO: 65 - DNA, 5714 bp, Artificial Sequence
  chemically treated genomic DNA (Homo sapiens)
ggagtagttgggattggtagaatatcggataagagaaggtgagcgggttagggggttggttttttttttttgtgaggaaggtttttgtttattttttggtttttttaagcgtttagttttatttttattagaagtagtttcgtgggacgaggggacggggagaggcgtagggagtttgtcgttatggggagagagggtcgtagatttttcgtatttgaggtcgtaggaggaagtttatggtcggtaggggtgaatttgagaaggagggggaggggattagtttgtgtttttttttagttacgtgtttttttgggttagtgtgattaatagcggagttgattgtggtacggggttaattattaagattttttaggaaaatttaaagggggttatgtggagcggtggttacgtgggggtagggaggggcgggtttgggtggtacgtgggtagggggcgtggttagtcgtggtaggcgagtttcgtttagaattttggttcgcgtgtagatttgatttgcgtttttaaggttagtcgggtttgagacgggttgttgggtgagagatttagggtttttaaagttttttaatcgttgaggttaagttatttaggtttttaggtaatagttttaattttttttttaggattggaagacgtttgatatttttattatttatttttttttacgattattatgtaaagttagggtagggatggtagtatttttttagtttttatatttatatacgtttatatttttggttggcgaggatttttggtcggagtatttaaggttgtttagggagggaaggttgggttggcgatttgggggttatatttatcgtatagaaagaatttgcgtttttggcggggcgtcgaggggcgttgtttatggtcgaattttagtttttttcgttgtcgttgcggtttttagggtaacgaggcggaggtataatttggatgggggagaggtttgattattatcgagagttttgggagggtaggagttattacgcgtaggttgcgttgttggggatttttttggagtatgaagggttttagagtggtttttagcggtagttatagtatagaggagagttatttataggaagaaaagagaagaataaggagataggagaggattgaggcgaggggggtcgaaaagggtcgagaggttgagtagagggaggaggagagaggaggtgggaaaggtcgtaagaaaaatgagggagaaaggagttaaggtttaggttcggagagaaagtaataaagatgagggagggagtgataatgagttggggaaagaggggagtgaaggtttaggtagataacggagtttcgtagggttagggtatttattagaggtgggtttgagattagagagggtgtggtggggagggtgagatatttcgtggagtcggggtcgggttgtcgagataggaagtagacgaatggaagaattttggagagagtttaagatgtttttgtagggagggggtgttttttttttagtataggtcggtaggaggttttttttttttaggtttttggggatcggtaggagggaagtaggttggttgggtggagggtaggagtttaattttatttatttattgagagagaggaaggtatagaaggtgggtatgggttgggtagagttttataatgggggaggggtatgtgatgggttgggagggggtgggtatcgtaattttgaggttttgtttttgaggggtagtttggatttcgtttttttagagtttggagttaggaaaatttgagtggtagtgttgttatttttttgattgtgattgtagggagtttggggaggatattgtgtggtgggggtagagaaggagttgtaggagggagtttaatttttgtaaatagggggcgtatttttagcgggttagtatagggggtatttaagattggtaaaaagtgacggtatttaataatttatgtttttagtgtgttgttggggattgggggtgtttgatttaggagtaagataagttagtgtagcgttaaataatataggtttgggggggttatttaggatggggagtttggtaatatatttttggtaagtattttaatttggttaattacgtttttttttttttttttagtaggtttttagttagggcgggtggtgtgggtgagcgtgagtgtatttagtttgggaagggtgtggggagagttcgtttagagtatttgtaggcgtttatttttattttaggttgtgttttcgtcgcgtttttttatatttttttgtatttttttttttgttgttttagaatataaagtagtttttgtttagagtatcggtgtcgataattcgggtaggggtatattttcgggattagtttcgatcggtttagaggattagtatttttttttttgattaagggattagtatttcggatttttatttgggtattaattattttttaagtgaattcgtaaatttcgtagtttttttatgtggggttggcgggggaaacgaagggggataaagtagattttgggttttaggtagtgtcgttttttatatttagtatagaatttttcgtttggataaatcgatttcgggagttaggtttaatttttcgggtttattttttttatttttatttagttgtttttttttttgtttgattttttgttcgattttattcgttattcgttttttttggtttcgttttttaattcggagattggggatgggggtttcgggtaatttttagtttgggcgtttcggacgggattgaaggattatgcgggggggtcggaggggaggggtggtttggagttagtcggggagtgggagggtcggcggcgtttcggggagattatttttttttggtggtagggggcgcggtattttggttttagggaattttgagaaggggatttcggaatgttcgttttcgattagtattttattcgtttttttatttttttttttaagatcgcggtttttcgcgttttagttttcgtttttttttttatttttatttttttttcgttcgagtttcgagtttttttttttttttttttttttttttttttttttgcggttttggtcgtttttcgttattatttttcgtttatcgttcgttttggatttcgtgttcggggtttcggggttttttttcgtttttcggcgtattcgcgcgttttcgacgattgtttcgtgtttatttcggggcgcgttttcgtcgtttttaattttttttaatttaattttttttcgcgtcgcgggtaggttagttttttgcgtgcgcgtttttcggcgtatcgtgcgcggtttcgttttcgcgggtggggaggcgggagcgggggtcggggcgggggcgcgtttttaggtatagttcggtattaggggtcgttttcgtcgtttttttgttttaagtttttttattcggggttcgggagtttcgaggatgtcgttttttggttttattacggtatttttgagtgtaaaggagttttttttacgttagggattttaggtagtaaaacgtaggtataaggaaattcggggaagtcgaaatataaacgtatcggggttgagatttttttgttttttttaataattttcgtgtttttaagaaagtttttgagggacgggtggcgagtgggtgagaagggtgataggggttggaggttggtcgttcggtattttgagttgatttgggagagggtaatttgttagaggttttttatttttagagagggatagagattcgttgtgttggtttttttttttttgaatggaatttttatattgaatcgaattttaggtagagttattatttattatttaagatttttgtgtgtagtttttttttgtttaacgaaattataaagttttttagataaggaatatattttttgtttttttttttttgtgtatgtaaaagtatttagatagaaacgagttaattaatacgtgtttagtagtaattttggtttcggtgttgaggagtgttgtttgggatttttttttttcggtttatagtttttaagaatgtaattatgagataattagagaggtagcgtaagggaatttataattagtttttttaaggggtgaggtagaggttgttgtaagttgagtatcggtttgtggttttgtttgtggagggggttaattaatttgtttgttatattttggttgattttagtgggttttgtttcggagattggggtttgagggggatttttagggttttatttagttttttttagtatgttagagtttagcggttagagtcgggtgggtttcgagataataaacggggtttagtagagagggggtttttggcgtgtgtttttttattaaaatttagtttcgaaggggtatagttgtttttttagttttgcggttagttgttttttgtgaggttattatcgtttataggtattttttagttaattttggggttattaggtggtttggggagaggtggaaattcgtgttgaggtcgttaagaggtcgttgggaatataatgttattaattaggttagcgttgggtcgttagtgttcgggatttaggtcgttaaattttaaatttttaatcgagagcgtttcgtttttattttcgttgtattttggaacgcgtagtttcggagcggttttttttaagagggttgggagtatataaaaggaataataatagcggggtatattgggaattacggcgtcgcggcggggcgttcggaaaacggatacgcgttgttttttgggatttgaagtttaaggtttgttttcgcggtagaaacggagttttggagtcgagtgttgtagagagcgtgagcgtagacggttgggggttgtagtttttttgttttcggtttcgggtattgcggggagatttagtcgttttaggattataagttttagaaggttttgcgcgggtagacggggcggggttggaggtttaggtgtcgttttttttgtaacgtcggggttagagttttaaaatcgagggttcgtaggggttttcgcggtcgtcgcgatgtagaaatacgagaaattggaaaagattggggaaggtaatggaatttcgagatgtttttgtaagagtttttttgtagatttttcggtattttttgaagttttggtttttttatcgttagtaatgtttataggtttcgattttagtagcggttgtagttttggttttttagtttagtatttcgtgtagatattagtttttttcgtgttagtatttttcgtagggtttttattttaattttagcgtttttagtagattcgattttttaatcgcgatattttttgaaattttttattttagttttagtagtatttggataattttatttcgatttttagtttcgttttttgttgtagatttttaattttaatatttttgtagttttttagtttttttttagatttttttttattatttttagattttttcggagtatcgtttttattttagatatttttgttttggtaatcgtattcgttttttttgtcgagtttttggagtttcggtgggtatttttttttttttttttatttgttatatttttatttataaagtttattaatttatttttattttgaatttttttttttgtatattgagacgttgtttttattttttttaggaggtattttttggtttagggaagagtgtcgtatttttattttgatttttgattttttttttttagg

SEQ ID NO: 66 - DNA, 5714 bp, Artificial Sequence
  chemically treated genomic DNA (Homo sapiens)
tttaggggaaggaggttaggggttagggtgaggatgcggtatttttttttaagttaggaaatgttttttgagagaggtgaaggtagcgttttagtatgtaagggaagggatttagggtgaaggtaggttggtgagttttgtgagtgaggatgtggtaggtggggagggaggagaaggtgtttatcgaggttttaggggttcggtaggaggggcgagtgcggttgttagggtaaggatgtttaaaatgaaggcggtgtttcggaagggtttggaaatagtgaggaggggtttgggagaggattgaggggttgtagaaatattgaggttggaggtttgtagtaagaaacgaggttgggggtcggggtgaggttgtttaagtgttgttgaggttggggtgagaaattttaggaagtgtcgcggttgggaggtcgggtttattgggaacgttaaggttggagtgagagttttgcgggaaatgttaatacggggaagattggtgtttgtacggagtgttgagttagggggttagggttgtagtcgttgttgagatcggagtttgtaggtattgttgacggtaagggagttagggttttaaggaatgtcgaaggatttgtagaggagtttttgtaggaatatttcgagattttattattttttttaattttttttagtttttcgtatttttgtatcgcggcggtcgcggggatttttgcgggttttcggttttaagattttggtttcggcgttgtagaggaggcggtatttgagtttttagtttcgtttcgtttgttcgcgtagggttttttggggtttgtagttttaaaacgattaggttttttcgtaatgttcgagatcgaggataagaagattataatttttagtcgtttgcgtttacgttttttgtagtattcgattttagggtttcgtttttatcgcggaggtaaattttggattttaagttttaggaagtaacgcgtgttcgtttttcgggcgtttcgtcgcggcgtcgtggtttttagtgtgtttcgttgttgttattttttttatgtgtttttagtttttttgaaaagggtcgtttcgggattacgcgttttagaatgtagcggaaatgggggcggagcgttttcggttaggggtttggggtttggcggtttagatttcgggtattggcggtttagcgttgatttggttggtggtattgtgtttttaacggttttttgacgattttagtacgggtttttatttttttttaagttatttagtgattttagaattgattggggaatgtttgtgagcgatgatgattttatagggaatagttgatcgtagggttgggagaatagttgtgttttttcgaggttggattttagtggagggatatacgttaaagattttttttttgttgagtttcgtttgttgtttcggagtttattcgattttagtcgttgaattttgatatgttgaggaaaattgggtggagttttgggggttttttttagattttagttttcggaatagggtttattggagttagttagggtgtggtaggtaggttggttaattttttttatagataagattatagatcgatgtttaatttgtagtagtttttgttttattttttaaaggagttgattatagatttttttacgttgtttttttaattgttttatgattgtatttttgagggttatggatcgagggaaaaggattttaaatagtattttttagtatcggaattagagttgttgttaaatacgtgttaattaattcgtttttatttgaatgtttttgtatatataagggaaaagaagtaaaaagtgtattttttatttggaagattttgtgatttcgttgggtaaaaaagaattatatataaaggttttgaatgataagtgatggttttgtttagggttcggtttagtgtggaggttttatttaagaggaaggaggttagtatagcgaatttttgtttttttttggaagtggagagtttttaataagttatttttttttagattagtttagggtatcgggcggttagtttttagtttttgttattttttttatttattcgttattcgttttttaggggtttttttggaggtacgggggttattgaggggggtaagagaattttaatttcgatacgtttatgtttcgattttttcgaatttttttgtgtttgcgttttgttgtttgggatttttagcgtgagaagggtttttttatatttagaggtgtcgtaatggagttaagggacggtattttcggggttttcgagtttcgagtggagaagtttggggtagagggacggcgggggcggtttttggtgtcgggttgtgtttggaagcgcgttttcgtttcggttttcgttttcgtttttttattcgcgaaggcgggatcgcgtacggtgcgtcggggggcgcgtacgtagggggttggtttgttcgcggcgcgggggaaagttgagttgggagaagttgggagcggcgggggcgcgtttcggggtgggtacggggtagtcgtcgggagcgcgcgagtgcgtcggaggacggggagagatttcgagatttcgggtacgaagtttagagcgagcggtaggcgagaggtggtggcgggggacggttagggtcgtagagggaggaagggagggggaaggagaggggggaattcgggattcgagcggggagggagtggaagtggaggaaagggcggagattggggcgcggggaatcgcggttttggggagaaggatggggaggcggatggagtgttggtcggaagcgggtatttcggggttttttttttagagttttttaaagttagggtgtcgcgttttttgttattaggagggggtagttttttcgaggcgtcgtcggtttttttatttttcggttggttttagattatttttttttttcggttttttcgtatagttttttagtttcgttcggggcgtttagattgggggttgttcggggtttttatttttaattttcgggttgagaggcgaagttaggaaaggcgggtggcgggtaaggtcggataaggggttagatagaagagggagtagttgggtgggaatgggaaagatgagttcggagagttggatttgattttcggggtcggtttgtttaggcgggaagttttgtgttgggtgtgagaggcggtattgtttgaaatttagggtttattttattttttttcgtttttttcgttagttttatatggaagagttgcggaatttacgagtttatttggggggtggttaatgtttaagtgggggttcgaggtgttaattttttggttaaggggagagatattaattttttgggtcggtcggggttggtttcgggaatgtgtttttattcggattatcggtatcgatgttttggatagaagttgttttgtgttttgggatagtaggggagggggtgtagaggagtgtggaggagcgcgacgagggtatagtttgaggtgggagtgggcgtttgtaggtgttttgggcggattttttttatattttttttagattgggtgtatttacgtttatttatattattcgttttggttgaaggtttgttgagggggaggggaagagcgtggttagttaagttggagtgtttgttaagaatgtgttgttaggttttttattttgggtgatttttttagatttatattgtttgacgttatattgatttgttttatttttaagttaggtatttttagtttttagtaatatattgggagtatgggttgttgggtatcgttattttttgttagttttgggtgttttttgtgttgattcgttaggaatgcgttttttatttgtagggattgggtttttttttgtagttttttttttgtttttattatatagtgttttttttagattttttatagttatagttaggagggtggtagtattgttatttagatttttttggttttaggttttagaggggcgggatttagattgttttttagaggtagaattttaaggttgcggtgtttatttttttttagtttattatatgttttttttttattataaagttttgtttagtttatgtttattttttgtgttttttttttttttagtgagtgagtggagttgagtttttgttttttatttagttagtttgttttttttttgtcggtttttaaggatttgggggagggaagttttttgtcggtttgtattggggagggggtattttttttttgtaggggtattttgggttttttttagagtttttttattcgtttgttttttgtttcggtagttcggtttcggttttacggggtgttttattttttttattatattttttttggttttaggtttatttttggtgggtgttttgattttgcgaggtttcgttgtttgtttgggtttttatttttttttttttttagtttattattatttttttttttatttttgttgtttttttttcgggtttgggttttgattttttttttttttattttttttgcggttttttttattttttttttttttttttttttatttagtttttcggtttttttcggtttttttcgttttagtttttttttgtttttttgttttttttttttttttttataaataatttttttttgtgttgtggttgtcgttaagggttattttgaggttttttatattttaggaggatttttagtagcgtagtttgcgcgtggtggtttttgtttttttagggttttcgatggtgattaggttttttttttatttaggttatgttttcgtttcgttgttttgaaagtcgtagcgatagcgaaaagggttaagattcggttatgagtagcgtttttcggcgtttcgttaagggcgtagattttttttgtacggtgagtgtggtttttaggtcgttagtttaattttttttttttgggtagttttgggtgtttcggttaagggttttcgttaattaggggtgtgagcgtgtgtgagtgtggagattgggaggatgttgttatttttattttgattttgtatgatggtcgtagggggggatgggtagtgggggtattagacgttttttagttttggggagggagttgaggttgttatttgaagatttaggtagtttagttttagcggttgaggaattttgagaattttgggttttttatttagtaattcgttttagattcggttggttttagaggcgtaggttaagtttgtacgcgggttagggttttgggcggagttcgtttgttacgattggttacgttttttgtttacgtgttatttaggttcgtttttttttgtttttacgtggttatcgttttatatggttttttttggatttttttaaggagttttaatgattaatttcgtgttataattagtttcgttattggttatattggtttagaggggtacgtgattgggaaggggtataggttggtttttttttttttttttttaggtttatttttgtcggttatggatttttttttgcggttttaggtgcgaggggtttgcgattttttttttttatggcggtaagttttttgcgttttttttcgttttttcgttttacggggttgtttttggtgggagtggggttgggcgtttaggggagttaggagatggataggagttttttttatagaggggagaagttagttttttggttcgtttatttttttttattcggtgttttgttagttttagttgtttt

SEQ ID NO: 67 - DNA, 6350 bp, Artificial Sequence
  chemically treated genomic DNA (Homo sapiens)
taaatatgttaattattagtaagtaaattttgttttaaaaggtaaatgataagtgtgaataattattaaaatggaggatttttatttgtgtttttggtttaaagtttaattagtgatttgtagtgatttaatatttttatgtaaatataaaatttaatgatttgtttttttaaatttataaggtatatgagattatagatagttttataaatataaattttgtttagaaaattggattttattttagaagatatgtttttaatataaatgtattttatgaattattttaagtttaaagatatataattatttatttttatttttaaagaaaaaagtattataatgtattgtaaaatatgtgttattgaaaatgtattaatttttatttttttagttttattttatattataatatagaattagttttataaaggtaaaaatttgatttattgtgagattagtaatatggttttaaagttaaaagatttatagaagtagtatttttaatttaaatagaattttgttaggttttaatttttttataaagtatttaagtaaataattttgtgaaaagttttgttttaagatgttttaaagggttttaagtattttatagatagagattttggggagaatattaaattttttttaaaaagatagttattttaagtttttttttattttattgtagaaagttttaaagatttttttttttttaaaatttaatttttatttgaaataattgtatttaagggttttttagtaggtaaagtatatatttttataaggttttaaattttagatttttaataatgtatttaaattgagtatttttttttttgtgtatgtatttattatttgtagttttattatttatattaaattttagtttttttagtttttttgaaatacgttagtgaatttttagtagttattaattatttaataattgtgagttcgttagtttttttaagtagatcgttaattataagagtgtttgataatttttaaattatattttttgtttaaaaggaaaagatagggttttgtgaggtagaaaggaagcgaaggaaaataaaataaatgtagtttatgttgaaagtgaaaagtgtttggatagattagtatttttttttttgtaaggtattttgttaaattttttttttatttttttaagagaagagttattttttggtttgattttttagttttttggaaagtattggtatttattatttttattggtcgtttataattattgttggttgttttgtgttttttttattcgtttacgttatatagtgaggatgtttttcgttttattttgttaaaattttaattttgggcgattttgggtttggaaatttcgtcgattttcgacgatacgttttatttttttttattaatgtcgtttattttagtcgtaggatttttttattatagttttagcgaaagtcggaaatttttatttaatttttttttttatttttatttttatcgcgtttttttagttttcgattcgtagaagggagttagggagttcggagttcggagtattgtcgggattcggtcgttttattttttttcggaaggttttaatttgtatatttttttgttattgcgttacgagtttttagtttcgtcggggggtgggttttcggtagagttggtttcgcgggtttttgtttttatttcgtacggtcgttttagttgttttttcggttggggtttttagcgtcggtcggagtttagcggttttcgttcgtttttagcgagcggcgcgggcggcgtttttcgtcgttttttcgtttttcgtcgttgtgtttattttttcgtcggagagagtgttggtaattttttttttagagtttgattatttgtttcgcgaggtcgcggatacgtgcggagagtcgattgatattcgtagttttttcgggaggttcgacgcgattgggttttttaggtgaggagttgtgcgttcgggtgggtgggttgcggggtggggggtttcgggggagatttgggggattggtcggggttcgaggtagaattgtgggtggggtaagtggagggtggcggggggtgggggggatttgtgtttttttggaatcggttttggttaattttttacgaattgagacgggattggttatgggggttagttttggggagttagaggattttttttatttgatgagagggggagattttagtttagggatattcgcgatatcgagattttgtttttacgtattcgtacgtatatatatttatacggaatacgttttatatagtttttttaaacggaattggaattttattcggatatttatataataatttatatttagggtttaaaatgtattgtttttagggattttatgttggagaatgtgtttgtatttttttttcgaaaattttttttttagttcgttgaggtgtgggtgtgggttttatttttttttttacgagataaatgttaacgtaggttttttgcgggcgtgttatatatagaaaagtgtacgtagtcggttagtgtttaggtttggagtttcgcgaagacgtacgtttgttgtagtttttaagtttatttttataatttaaaatattggagttaaatatacgtttcgtagtgagtagttttggttttcgtagcgcgttcgttcgtgtgtatatgggcgtatttgcgtgtgcgtatacgcgggagtcgcggttttcggtgtggttttttgtcgttgtgttggtggcgatttttgtggtgtttggtaggtttcgggagaggcgtatgaaggattttattgagtgtgaagatagagagtagagatagaaagtagaaggaggcggttgtagtttttgtagtcgcggaggaatgcggaaatgttgaagtattatgttaaattttttttgaaatggggttaagttatatttagttagcgtgggaaagtaataataataataaaaaaaagtggaggagagggggggaaaaggtattgttgttttcgttttttttcgtcgaagtcgatcgtttggggggcgagtggggggagagttagggtagtgcggggttcggcgggggtagtaggcgtagttttttgcgggggtgggacgttttcgacgtttttttcgttgcggagttcggggttagattcgagcgggagggggttggggggatgtaggataggcgggttgggcggtcggcggcggtttttcggttatttgtgtggttttcgatttggtttagattttcgggtagtttttgggggtttttttttcggtttttaaggaaagttttgaatgtagtgagtgttagaagttttgttttcgtcgcggttcgttttattcgtttatcgtgggggtcgcgtcgtttgtttaatttttggtaaaaggcgagcgggttagcggttgcgaggtaggtaatttcgaggtgtttcgggaatttcggatatgcggtcgtcgtggtgaaagttttgtcgaggtcgcggcggttttggaggagggaggttttttaggttttagatagttgttgaatggggagggaaagttagggtattttattttggcgttttgttgtgtagagggtttcgggggcgttcggttgtagattggatcgggtttttagtcggagggggaatggggtagttatttttgttatttatagcggggaggttttgggaatgggaaaaggttcgcgagttcgggtttcgaggatagagatttttttttttatttttggaggcgtaggatttaattttttattttttattttttgaaagggaggttgagttttgtttaggtcgaaattagtttaaaatttaaggacgaggcgcgattatgttattttttttttgaagttattttttaaggagacgataagcgaaattgtggcgaatattttttttttttatttttgggatttcgtgggggacggtgtttttttttttttaggatcgttcgttcgtttattttcgataagttttaatttttttcgattagatggttggtttttttaaggtttttattagggaggtttttttagtcggagagagaatttcgtttttaatcgagatttttttattttaaaaagattatttgtgtatgcgagtcgtttttaaatgttttttcgtagaaaaattgaaagtagaaagaaaggaagtaatttttgagtagatgtttgattattttttttcgtatatttttagtatcgggttatagggttttgggagtttttatttatattttgcggttttatacggatggatttatagttttttcgttttagtttgtgcgcgatttttgaacgtttttcggtatttttggatttcgtttttttgtacgttcgggttttaggaggcggggagggtagcggcgtaatataatgatatagggataaatattaagtcgtgatattgacgtgttcggcgttttttttttttcgcgttttcggtatattttgggttgttcggtacgttttttttcgttttattgcgtttcgcgtcgttcgtttattttcgaggggtttttgtaattttttcgcgcgaagacggttttagttttgtagggaaagaaaagtaatttcgtttttttcggaggaattaggaaggattaagcggtttgggagagggtaggagcgcgcggagggtagcgatggaggtttcgtaaaggaggaggaggggagtttggaggaatttcgaggaaggtttttgggttgtttgattgtattttttttttattttttcgtttttttttttaggtgtaatgattttggattgagacgcgtttgggtagaggttatgtaatcgtgtttgtgttgaggatttcgtttcgaggagggaagaggagggatcggttcgttttttcggcggcggcggcggcggcgattttgtaggcggagtttcgcggcggcggtattagggttacgttagtttcgcggggaggtttttttatttagtttttgtagcggcgaaagttttagcgttcgagcgtttgagtcggcggggagtaagtaaagttagatcgattttcggggagtttcggagtaggcgagcggcggtcgttagttagttgagcgtatttttcgttcgttttagcggcgtcgcggcgggcggcgtttaggcggtatggagaaggacggtttgtgtcgcgttgattagtagtacgaatgcgtggcggagatcggggagggcgtttatgggaaggtgtttaaggttcgcgatttgaagaacggaggtcgtttcgtggcgttgaagcgcgtgcgggtgtagatcggcgaggagggtatgtcgttttttattattcgcgaggtggcggtgttgaggtatttggagattttcgagtattttaacgtggttaggtgagttagggagttgcgttttcgttatttggggtttcgcgcgcgcggggagggtcgagtcgggaatttttaggtttagaaaggtgcggggtagagggcgattggggaggttttgcgcgatttgttggttttatagagtgagagttaagttttgtcgatagagtcgcgagttagagtcggtgattttgttagatagcgagtcgaaagataagttaaaaaaatatgatttgagtaggtttttttgtagttgtgtaatttagaagcgttttttttttgtttattttgaaggagggtttgggggaagtgggtgcgttttagggataggataagttaatttgagatatgtttcgttagttttcgtatatttttcgtggttatgtcgttggggaatttttgaaagatagagtaggtgagattggagaatgaggatgtcgtgtgataattagtgggaattttatgggtggagttaagtgtaaattaggttaataagatgtagaaatattataatatttttgttagttatatttttagtttttttttattaaagttgcgtagtaagaatgatttttggtggtttaaggagtttgagtgttgatgtttaattttaaatagcgttataaaaattttttttaaaattgttatttttgtgtttgttttattttatatttttgggcggatatattttttagattaattttttaaagggttaaatgtgagtttaagatgtggtatggttagattataaatgttttgtttatgttttttttagatggattgtgcgagtgggtggggagatagtagtttttatttttttttgtgtggtaattagtattaaatgaaaatgtgtgatttaggataatggtgtttttttagtgattttggaatttttttattgtgtggttgatattgtttggttgtgttattttttttttttttaaatagagatgtatagttttatattgaaaaggaatgtttagaaatttttgtaaattgggttgtg

SEQ ID NO: 68 - DNA, 6350 bp, Artificial Sequence
  chemically treated genomic DNA (Homo sapiens)
tataatttaatttgtagaagtttttaggtatttttttttaatgtaaagttatgtatttttgtttaaaaaagaaaaggatgatataattaaataatgttaattatataatggggaaattttaggattattaagaaaatattattattttaagttatatatttttatttaatattggttattatataggagagagtaagaattgttgtttttttatttattcgtataatttatttgggaaaagtatgggtagaatatttatgatttaattatattatattttggatttatatttaattttttggagaattagtttaaagagtatgttcgtttagagatataaagtaaaatagatatagggataatagttttggaagaaatttttatgacgttgtttgagattgggtattagtatttaaattttttagattattaggagttatttttattacgtaattttaataaagagaaattgagagtatgattggtaaaaatattatgatgtttttgtattttgttaatttgatttatatttggttttatttataaagtttttattgattattatacggtatttttattttttagttttatttattttgttttttaaaaattttttaacggtatggttacgaaaaatatgcgggggttagcggggtatgttttaggttggtttattttgtttttaaaacgtatttattttttttagatttttttttagggtgggtagggagaaaacgtttttaagttgtatagttgtagggaagtttgtttaggttatgtttttttgatttgtttttcggttcgttgtttggtaaggttatcggttttggttcgcggttttgtcgataaaatttaatttttattttgtaagattaataggtcgcgtaggatttttttagtcgttttttgtttcgtatttttttgggtttgaggattttcggttcggtttttttcgcgcgcgcgaggttttagatggcgagggcgtagttttttggtttatttgattacgttggggtgttcgaaggtttttaggtgttttagtatcgttatttcgcggatggtggagagcggtatgtttttttcgtcggtttgtattcgtacgcgttttaacgttacgaaacggttttcgttttttaagtcgcgggttttgaatatttttttataggcgtttttttcgattttcgttacgtattcgtattgttggttagcgcggtataggtcgtttttttttatgtcgtttggacgtcgttcgtcgcggcgtcgttggggcgggcggggggtgcgtttaattagttggcggtcgtcgttcgtttatttcggggtttttcggagatcggtttagttttatttgtttttcgtcggtttaggcgttcgggcgttggggttttcgtcgttgtagaagttggatggagagattttttcgcggggttggcgtaattttggtgtcgtcgtcgcgaaatttcgtttgtagagtcgtcgtcgtcgtcgtcgtcggaggagcgagtcgattttttttttttttttttcgaagcgaagtttttaatatagatacgattatatagtttttgtttaagcgcgttttagtttagaattattgtatttaaaggaggagacgggaggataagaagaaagtgtaattagatagtttagaagtttttttcggggtttttttagattttttttttttttttttacgaagtttttatcgttatttttcgcgcgtttttgtttttttttaagtcgtttaattttttttggttttttcgagaaaagcgaagttatttttttttttttgtagggttgaagtcgttttcgcgcggagaggttgtaggggtttttcggggatgagcgagcggcgcgggacgtagtggaacgggagggggcgtgtcgagtagtttagagtgtgtcgggagcgcgggggaggggaggcgtcgggtacgttaatgttacggtttaatatttatttttatattattgtgttgcgtcgttatttttttcgttttttgaggttcggacgtgtagggagacggggtttaggggtgtcggagggcgtttaggggtcgcgtataagttggagcggaaggattgtgggtttattcgtgtggggtcgtagaatgtgggtgggggtttttaggattttgtaattcgatgttgggagtgtgcgagaaggggtggttagatatttgtttagaaattgttttttttttttttatttttagtttttttacgaggagatatttaaaaacgattcgtatatataaatggtttttttggggtaaaggagtttcggttggaaacggaatttttttttcggttgggaggatttttttggtggaaattttgggaagattagttatttggtcggggagggttggggtttatcgggggtgggcgagcgagcggttttgggggaggggagatatcgttttttacgggattttaagggtgggagaaaggggtgttcgttataatttcgtttgtcgtttttttaaagaataattttaggaaggggatagtataatcgcgtttcgtttttaagttttaaattgatttcgatttgagtaaaatttaattttttttttaaagggtggggggtggggggttaaattttgcgtttttaggggtgagagagaaggtttttgttttcggggttcggattcgcgaatttttttttatttttaggattttttcgttgtaggtagtagaggtggttgttttatttttttttcggttaaaggttcggtttagtttgtagtcggacgttttcggagttttttgtataataaagcgttagagtagggtattttaattttttttttttatttagtagttatttgggatttagggggttttttttttttagggtcgtcgcggtttcggtaggatttttattacgacggtcgtatgttcggaattttcggggtatttcggaattatttgtttcgtaatcgttggttcgttcgttttttgttaggaattaaataaacggcgcgatttttacgatgagcgggtggagcggatcgcggcgagagtagagtttttggtatttattatatttagaattttttttaaaagtcgaggaaagagtttttagggattgttcgggggtttgagttaggtcgagggttatataggtagtcggggagtcgtcgtcggtcgtttaattcgtttgttttgtatttttttaattttttttcgttcgagtttagtttcgggtttcgtagcgaaggaagcgtcggggacgttttattttcgtagggaattgcgtttgttgttttcgtcgggtttcgtattgttttggttttttttttattcgttttttagacggtcggtttcggcggagagaaacgggagtagtaatgtttttttttttttttttttttatttttttttgttgttgttgttgtttttttacgttggttgaatgtgatttgattttattttaaaaaaagtttgatatagtgttttaatattttcgtattttttcgcgattataaaggttgtagtcgtttttttttgttttttgtttttgttttttgtttttatatttaatgaaattttttatgcgtttttttcgaagtttgttaagtattataagggtcgttattagtatagcgataagaggttatatcggggatcgcgattttcgcgtgtgcgtatacgtagatgcgtttatatgtatacggacgggcgcgttgcggggattagggttgtttattgcggggcgtgtgtttaattttaatattttaaattataaaagtaaatttggaaattatagtaaacgtgcgttttcgcggggttttaagtttgggtattggtcggttgcgtgtatttttttgtgtataatacgttcgtaggaagtttgcgttaatatttatttcgtggaggggaaggtggagtttatatttatattttagcgagttggagagggagttttcgagggggaaatgtaagtatattttttagtatggagtttttagaggtagtgtattttaaattttaaatgtgaattattatgtgagtgttcgagtagagttttagtttcgtttggagaaattgtatgaggcgtgtttcgtgtgggtgtgtgtgcgtacggatacgtggaagtaggatttcggtgtcgcgggtgtttttaggttgggattttttttttttattagataaggagaattttttagttttttaaaattggtttttataattaatttcgttttagttcgtaaggggttaattaaagtcgattttaaggaaatataggttttttttatttttcgttattttttatttattttatttatagttttgtttcggatttcggttaattttttagatttttttcgggattttttatttcgtagtttatttattcgagcgtatagttttttatttgaggggtttagtcgcgtcgggtttttcgagggggttgcgagtgttagtcggtttttcgtacgtgttcgcggtttcgcggagtaggtaattagattttggggaaggagttattagtatttttttcggcgagggggtgggtatagcggcggagggcggagggacggcggagggcgtcgttcgcgtcgttcgttgggggcggacgggggtcgttgggtttcggtcggcgttgggggttttagtcggggaggtagttggggcgatcgtgcggggtgggggtagggattcgcgaagttaattttgtcggagatttatttttcggcggggttgggggttcgtggcgtagtggtaagaaagtgtgtaaattaaagtttttcggagagaaatgaggcggtcgagtttcggtagtgtttcgagtttcgggttttttagtttttttttacgagtcgggggttagaagggcgcggtgggggtgggggtgggggggagagttaaatgaaaattttcggttttcgttgaaattgtagtagggggattttgcgattaaaataagcggtattagtgggagagagtgggacgtgtcgtcgggagtcggcggagtttttaaatttagggtcgtttagagttggggttttgatagggtgaagcggggggtatttttattgtgtgacgtggacggatgggaaaaatataaaataattaataataattatgagcggttaatgggggtggtaaatattaatattttttaagaaattgaaaaattagattaaaaaataattttttttttaaaaaaataaagaaaaagtttggtaggatgttttgtagaaaagaaaatattaatttatttaagtattttttatttttagtatgagttatatttgttttgttttttttcgttttttttttgttttataaagttttattttttttttttagatagaggatatggtttggaaattgttaggtatttttatggttaacgatttatttgaaggggttggcgggtttataattattaagtggttagtaattgttgagggtttattaacgtattttagaggagttaaaaagattaaaatttagtgtaaataatagaattgtagatagtagatatatatataaaaagaggagtgtttagtttaaatgtattattggaaatttgaaatttgaaattttgtaagaatgtatattttatttgttgagaaatttttgaatataattattttaggtgaaaattagattttggagaaaaaaaagtttttaaaattttttataatggagtaaaagaaaatttgaaatagttgtttttttggaaagaatttggtgttttttttaaaatttttatttgtagaatatttgaaattttttaaaatattttaaagtaaaattttttataaaattatttatttaagtgttttgtagaaaaattaaaatttggtaaaattttgtttgaattggaaatattatttttataaattttttgattttaaaattatgttattaattttatagtaaattaaatttttgtttttataaaattgattttatgttatagtgtgaggtaaggttagggaaataaaaattgatgtatttttagtagtatatattttgtaatgtattataatatttttttttttaaaaataaaagtgaataattgtatgtttttaagtttaagataatttataaaatatatttgtgttaagagtatgttttttaaaataagatttagttttttgaataaaatttgtatttataaagttatttataattttatatattttataaatttaagaaggtaaattattagattttatatttatataaaaatattggattattataagttattaattagattttaagttagagatataagtgggaattttttattttgataattgtttatatttattatttgttttttaaaataagatttatttgttggtaattaatatgttta

SEQ ID NO: 69 - DNA, 6154 bp, Artificial Sequence
  chemically treated genomic DNA (Homo sapiens)
tttatttatttatttatttatttatttatttatttatttatttattatttatttatttatttatatatttattatttatttgtttatttatttatttatttatttatttatttatttatttatttaattatttatttatttatttatttatttatttatttatttatttatttatttatttatttatttatttatttatttgtttaatttgtttatttatttgtttatttatttatttatttttttattttttatttatttattaatttatttatttatttatttatttatttatttatttatttatttatttatttatttatgttattatttatttatttatttattttgttttttataattaattttttatatagtattaggatattttttttaaagtataaattatatttggttatttttttttttataattttttgaaaggttgtttgtaaataaaatttaaacgttttgttatggttaaaaaggttatatataatttggtttttgtttatttttttgtttttattttatataattttattttttatttattatatttttgttatttttttgtttttttatttttagttttgttttttgtatttgttgtttgtttaatttgtttggattattttgtttttttatttatagtagattttgttttttaatttttaggtttttgtttaagtattgtttttttatagaaattttgatcgtttattaatttaaaggaatttttttttggttttattttttattatattgttttgttttattttttttataatacgtagggtatttttttttttgtgagttttttatttttattttttttatgttttttaataaaggagtttttatatttttgtatggttttgtttttgtggttatatttagttggtttaggacgggtttgatttagttatattagagttttttttgggatttttagaattagaattgagaaatagttaatttttcgttaatgaaagttattgtttgacgtaaaatttagtaattattggtggttatgttttttgttgtgtggaggaaatgagtttataaaggtaaatgatatttatatggtgaaggggagaagagtaagatatttttgaaagtattttttatattttggttatttttaaggtttaaattatattttggatgtttgtagagttagtaaggatattttttgtatttatagtttttttgaaaattttttaaaaattaggttagaaagatagagtgaaaaaaatgaaatattaaaaaaaagtttttggattgattaatttaatttgtttttttttgtgtcgaatattgtgtttatatgtagatggttaatatgtgcgggatgaacgtgttatttgtagaatgagaggttatatgttttttattgaaagtatgttttaatattgagtgagaaagtggaagttaaagttgtagagattgtagtgattaattatgagaagagttatttgggtttttatattaatatattatgaagtatttagtttttttgtagttataaaaagttttttttagaggtaagattgaggtaagatattaaatgttttataatgattgttttttgataggtggagatttttattattattaatgtttattttaatatttattgaaattaatttaatgaaatatattttaatgaaatataattacgtaaataatatgtgtttggaattgtaggggatatatagatgattaaggtaggaatttagttattaaatttattaaggggtagatttttttaatcgtataaaataaatgattaaaatataaggtagttataatgagttataaataaagtgtaatggtgttagggttggggtagaggtttatgataaagaaaggttatatttagttgtaagaattgggaaagattttatgattaaattaagtatttgggggatgggtaggattgtaaaggttagagatggtatgaggaagtattttagtttttaagaattttaagaatatataaaaggagatatttaaaattaaatattagatgttgttgtttttagtattagttatgtttttttataaggggtttttagtggttattttttttttagttttttattttgatattattttatagggttagtttattttttattattatatttttttaatttagtgtttaggtttttaatttttattttggttttaaagagaaaagtagattttgtttttttttagtttaaggttagtttttttttttgtttttaggaaaagattgatagttaggattgatatttaggatatttagttgatagtgaggatatttaatttttttagggagagtttatttttatttagagtgaagttagttaaaatagtgtataaaagtatatttttaaaagtttgaggttaggtatgtggtttatgtttgtaattttagtattttgggaggttgagataggaggattatttgaatttaggagttaaagattagtttgggtaatagagcgagatttcgttttttaaaaaaaaaaaaaaaaaaaatttagttgggtgtagtggtatatgtttgtagttttagttatttaggaggttggggaggagaattgtttgagtttaggagtttaaggttgtagtaagttgtgatcgtattattgtattttagtttgggtgatatagttagattttgttttaaaataaaaatataaaaagataaataaaaaaggtttgagatttttagtgttttagaatagtgtgtataattggtataggaggtggggaagggggatttaatatagtgtaggggtaagttgagttttatgtttttttataattttttttttagtgtggtagtttgattttttaagatttatgagtaaatatgtgtataaaagatatattttttaaaaaatataaaatatattgtttaaggaagaattttttaaatttatatttagaaaatgatgtaattttttaaggatgtaaatgagtagttttgttagagagttatttaatttttattattgaatggaaataaataatatgttattaatgaaagtttatatttgttttgtgttttgtattttgtaaagaaaaaattttaggttttaagaatatattagtaaatgataatgtaggatttaaatttagtatagtaaaatatttaatatttatatagtatgttaggtaaaaataatttaattttatatagtggtgaagttattaattttttttaaggaaaattatataagagaaagttttttggaggtttttttataagatgatattattattattattattggtatatggatttttttgagataaatatgtttatttatttattaatttaataagtgtttattgtgtattattattaaggtatgatattaggttttatagaagatgtaaatatgattttttataataatttaggatttagtaaggtagaggaaataaaagatgaaaggaatttgataaatattataggaaaggtgggaaaaaaagtgttaaaaagtttatattaaaattgtaaagtttatattttttttgggaagtggggagttttagtggaaatggtaataattggaaaattaaaaattaaaaatagataaggggggtaagataaaatgatagattagtattaagatattaggatttttgaagtaggatatattgttattttaagattattaataaattagtttttatggatttagattttttttgtaattatagttagaaattggtgtttttataggtagtatcgtagaaggttgtattgtatttaatattttttgtatatggataggaaaggtttggatggttatttgttataagagtaataatgtttaggagtagtttggatattggttattgatttatttttattggtgtttgtaatgttagtatgttgatattattgtgtagtttttattagattgtgaatattaagagtattttaattgttggttcgcgagttgtttataaatattatatcggtttttatcgatgatagtggtttttaaaatttggagtttagagtggtataaaatgtgtttttaatgtaaacgatttttttttttacgtgtatttttttgattaagtttgtggttgaaattagattttagttagatcgttgtaaaaataaaaataaattttttttaaatgattgaaacgaattttattttagattacgagttttattatgtaacgtttttatatttttatcgtgtggggcggagtcgtagaaggggcggtagcggcggcggtttgtgtattttgggtattgtagtttggggttcggttatcgttggggttggttttacgtggtgtatttggcggtagttttgggtagtggtttttttgttttttttatacggtttttagggtgttagcgttagtaggggcggttagttatcgcgggagcgggttagagtgtggttcggaggtagttcgaggtttcgcgacgtttttgcgatagtcgcggtcgtgtttcgcgagtgttttttttttttttttttttgaggaggtatcggttgttgtgcggttttgtttttttgtttgagtgtatgggagagtgagtgagtgagtgagtgtgagcgtgtgtgtgagagcgtgaggcgtgagtgcgcgtgtgagaggacgagagttcgtttggtcgtttcgtcgttttcgtcgtagtaggagtagaacgcgcggtcggagagagcggcggagtcggcgtttagggagttcgcggggataagggtagagatatcgttttttatttttagttttcgtttttcggttttttttcgtcgggggatttttttcgtttttttattttcggtcggtttttgtttcgtcgtttttttggatgtttttggcgttttcgcggggtttttttttgtttttgtcgtattagtcgggttggtgttgcggtcggcgggcgtagagcgggcgggttttcgggggttgcggttgttcgtgttttttcggtttttatttttgtttttcggtttttcgatttagtttttcggttttagaggttgtgataatggattatgattttaaagtgaagttgagtagcgagcgggagcgggtcgaggatttgtttgatacgaaggttgtaaagttggtcgaggtatttatggttacgtttataaagttaagaggaaaagatgggtgagtgtgtgtgtttgggtcggtgttcgcgttgggcggcgttttcgtaggtcgaggtaggtagttcggagggagagcgggtcgtcggggtgtcgggttttgattttttcgacgtcggtttttggtttcgttagttaggtttggggaggaagtggtgtacgagggatttaaatttacgagaaattttgcgtgtcgcgtttgtgttttgttttggtggtaagaggtaagatgagtttttgtatcgtgggttgtatattttttaaggattttaaagttgatttatgaaaaaattcgttttaaaacgtcgggttaaatgttttttgtttttttttttttttggtcgatttattatggtaattttttggggatttttttattcgtttttggagtgttatttatcggtttagaaggaaggttgtgatttttttttttattagtttgtgatcgattttttattaaatttgtattttatttgaggaaaggaaggtagcgagtgaatgtggttttggagagagttttttatagtgattatttgtaatataaatgttgtaattgttatttagatattattagttgtgaatttttatatagaataatgggggtttggtgtagggtgggtggtggggaagaaggtaagtgatatagggattatttcgtttaggcggttttttttaaatttagcggttggtagtgaattttaaataatttttttgttttaaatatttttttttagtaataatttaattaaatttatgattggtaatgtttttaatttagttttttaataggtaagtgaattgtttattttttttttttgttagtagatgaatgttttgtaatattgataaaagagaaggtaatttttagttggggggaaaatatattttattaattttatgtttttttgtaaaatggatgttgtttttgttgtttttgatagaatagaaaattattgaaaagttaaagtttattatataatttttggattttattagaaacg

SEQ ID NO: 70 - DNA, 6154 bp, Artificial Sequence
  chemically treated genomic DNA (Homo sapiens)
cgtttttaataaaatttaaggattatataataagttttgattttttaataattttttattttgttaaaggtaatagagataatatttattttataagaaaatatggagttaataaaatatattttttttttaattaagaattgtttttttttttgttaatattataagatatttatttattgataaagagaaaaaatgaataatttatttgtttgttaagaaattaaattggaagtattattagttataggtttaattaagttgttattagggaagaatatttaaagtaaagggattatttaaagtttattgttagtcgttaaatttgggggaaatcgtttgaacgagatagtttttatgttatttgtttttttttttattatttattttgtattaaatttttattgttttatgtaaaaatttatagttaataatatttaaatagtaattgtaatatttatgttgtagatgattattatggggaattttttttagaattatatttattcgttgtttttttttttttaaataaaatataaatttgataaaaaatcgattataaattggtgggggaaaggattatagttttttttttagatcgatggatgatattttagaggcgggtgaggaaatttttagaaggttattataataaatcgattaaggaaaaaaaaaaataaaaaatatttaattcggcgttttagaacgaatttttttatgaattagttttgaaatttttgaaaagtatatagtttacggtgtagaggtttattttgttttttattattagagtagaatatagacgcggtacgtaggatttttcgtgggtttggatttttcgtatattattttttttttaaatttggttggcggagttagaggtcggcgtcgaggaagttagagttcggtatttcggcggttcgtttttttttcgggttatttgtttcggtttgcgggagcgtcgtttagcgcggatatcggtttagatatatatatttatttattttttttttttggttttgtagacgtgattataagtgtttcggttaattttgtagttttcgtattaaataggttttcgattcgttttcgttcgttgtttagttttattttaaagttatagtttattgttatagtttttgaggtcggagagttgggtcggggggtcggggggtaggggtggggatcggggaagtacgggtagtcgtagttttcgggaattcgttcgttttacgttcgtcggtcgtagtattagttcgattgatgcggtaagagtaggaggaggtttcgcgaaagcgttagggatatttagggggacggcggggtagaggtcggtcgggggtggaggaacggggaggatttttcggcgaaggagagtcgagggacgagggttgggggtggggagcggtgtttttgtttttgttttcgcgggttttttgggcgtcggtttcgtcgtttttttcggtcgcgcgttttgtttttgttgcggcgggagcggcggggcggttaggcgggttttcgtttttttatacgcgtatttacgttttacgtttttatatatacgtttatatttatttatttatttatttttttatatatttaaatagaagggtagagtcgtataatagtcggtatttttttaaagagaggaggagggagggtattcgcggaatacggtcgcggttgtcgtaaaaacgtcgcgaagtttcgggttgttttcgggttatattttagttcgttttcgcggtggttggtcgtttttgttggcgttggtattttgaggatcgtgtggagggagtaggggagttattgtttaaagttgtcgttaaatgtattacgtggaattagttttagcggtggtcgggttttagattataatatttagaatgtataggtcgtcgtcgttgtcgttttttttacgatttcgttttatacggtgggaatatgggagcgttgtatgatgggattcgtagtttagggtgaaattcgttttaattatttggggaaaatttatttttatttttatagcgatttaattagagtttgattttagttataaatttgattaaagaggtgtacgtgggaaggagagtcgtttgtattagaaatatattttgtgttattttgaattttagattttaaaggttattattatcgataaaagtcggtatgatatttgtaaatagttcgcgggttagtagttggggtatttttggtgtttataatttgataagggttgtataatgatgttaatatattgatattataagtattaataaaagtgaattaatgattagtgtttaagttatttttaaatattgttatttttgtgatagatgattatttaaattttttttatttatatataggaagtattgagtatagtatagttttttgcgatattatttataagaatattagtttttagttatgattatagaaaggatttaaatttatgggaattagtttgttaataattttaaggtagtaatatgttttgttttaggagttttggtattttgatattaatttattattttattttattttttttgtttatttttaatttttggttttttaattgttattatttttattaaagttttttattttttaaagggaatatgaattttgtagttttaatgtgaattttttaatatttttttttttattttttttgtgatatttattaaattttttttattttttattttttttattttgttagattttaagttgttataggaagttatatttgtattttttgtaaaatttagtgttatgttttgataatgatgtatagtaaatatttgttaaattaatgaatgaataaatatgtttattttaaaaagatttatatattaatgatgatgatgatgatattattttgtgaaaaagtttttaaagggtttttttttatataattttttttggagaaaattagtgattttattattgtgtaaaattaaattgtttttatttagtatattatataagtattgagtattttattatattgggtttgaattttgtattgttatttattaatgtgtttttggagtttagaattttttttttgtaaagtgtaaagtataaaataaatgtaggtttttattaatggtatattatttgtttttatttagtgatgaaaattgggtaattttttagtagaattgtttatttgtatttttaaagaattatattattttttgaatatggatttaaaagatttttttttagataatgtattttgtattttttgagggatgtgttttttgtgtatatatttatttatggattttgagaaattaaattattatattggaggaaaagttgtgaagaggtatgggatttagtttgtttttatattgtattgggttttttttttttattttttgtattaattatatatattattttggaatattgaaggttttagattttttttgtttgtttttttgtgtttttattttgagatagggtttggttatgttatttaggttggagtgtagtgatgcgattatagtttattataattttgaatttttgggtttaaataatttttttttttagttttttgagtagttgggattataggtatgtgttattatatttagttaagttttttttttttttttttttgagagacggagtttcgttttgttgtttaggttggtttttaatttttgggtttaagtgatttttttgttttaattttttaaagtgttgggattataggtatgagttatatatttggttttagatttttaaaaatgtatttttatatattgttttggttggttttattttgggtgaaggtgaattttttttgaaggaattgagtgtttttattgttaattgagtattttgaatgttagttttgattgttagtttttttttgggggtaggaaaagaagttaattttggattagggaagagtaagatttgtttttttttttgaagttagggtgagagttagaggtttagatattaggttggaggaatatggtggtaggaggtaagttgattttgtaaaatggtattaggatggggagttgagaaagagatagttattaagggttttttataggagagtatggttaatgttaggaatagtagtatttaatatttagttttaagtgtttttttttgtgtgtttttaaggtttttaagggttaagatgtttttttatattatttttgatttttatagttttatttattttttaagtgtttaatttggttatgaagttttttttagtttttgtaattagatatgatttttttttattatgaatttttattttagttttggtattattgtattttatttgtaatttattatagttattttgtattttaattatttattttatgcgattaaaaaaatttgttttttaataaatttagtgattgagtttttgttttaattatttatatattttttatagttttaagtatatattgtttgcgtaattatattttattagaatgtgttttattggattgattttaataaatgttgaaatggatattaataataataaaggtttttatttgttagaggatagttattgtaaaatatttagtattttgttttagttttgtttttaaaaagggttttttatagttgtaaaaggattgagtgttttatgatatattaatgtaaaagtttaagtggttttttttatagttaattattgtagtttttataattttgatttttatttttttatttagtattaaggtatgtttttagtggaaagtatgtaattttttattttataggtggtacgtttatttcgtatatattaattatttatatgtgagtatagtgttcgatataaggaagaataagttagattaattaatttaagagtttttttttaatattttattttttttattttgtttttttggtttgatttttaaaaaatttttaaagaaattatagatgtaaaaagtatttttattaattttgtaagtatttagaatataatttagattttagaaataattagaatataaaaaatatttttaaaaatattttattttttttttttttattatgtgggtattatttgtttttgtggatttattttttttatataataggaaatatgattattaatagttgttgaattttacgttagataatggtttttattagcgaagaattgattgttttttaattttggttttaaaaattttaagaagggttttggtatggttgagttaggttcgttttaggttaattaagtgtagttatagggataggattatgtaagaatatgagagtttttttattagggggtatgagggagatgggggtagggagtttataggaggaagaatgttttacgtattataaaggaaataaaataggataatgtgatagaaagtgagattaggaggaaatttttttagattggtagacggttaaggtttttgtaaggagataatgtttaagtagagatttgaaggttgagaaataaaatttgttgtggatgagggagtagagtagtttaggtagattaaatagatagtaagtgtaaaaggtaaagttgggaatgaaggaatagaaagatgataagaatataatgagtaagaggtgaaattgtgtgaggtgaagatagagaggtagatagggattagattatatatggtttttttgattatagtaaggcgtttgggttttatttgtaggtaattttttagaaggttataaggaggggagtgattagatatgatttatgttttaaaaagaatattttggtgttatgtgaagaattaattgtaggaggtaagatggatggatggatggatggtgatatagatagatagatagatagatagatagataaatgaatggatagatagatgagtgaattgatggatagatagaagatagaggaatggatggatggatggataaataggtagatagattagatagatagatagatagatagatagatagatagatagatagatagatagatagatagatagatagatggatgaatagttagatgaatgaatggatagatagatgggtgaatagatgaatgaatagatggataatggatatatagatgggtgaatagatgatagatggatgaatgaatggatggatagatagatgggtggatgga

SEQ ID NO: 71 - DNA, 6510 bp, Artificial Sequence
  chemically treated genomic DNA (Homo sapiens)
ttttttaatagagatagggtttcgttatgttgtttaggttgatttttaatttttgggtttaagtagtttttttattttaattttttaaagtgttgggattataggtattatttattgtgtttagttagggatttgttttatgaaattgtagaaaggaaaaaaaagtaaaagtggaggtgggaaatagattgataagattggaaaaatgttaatgatggttgaaattggttggtgatgtattattttattgtttttgagtatgtttgtaaatttttataagaatgttttgtaaggaagtagtagtgatattgttatatattgttgagaaaatgtaaaattaaatataaagttaataaaaagagataaattatgtatatatagataatatatgtatatatatatatatgtgttgtgtgtatatatatatattatgtgtacgtgtgtatgtttataatatatagatatatatatgttatgtatacgtatataaaagaaggtagaaaggttgtgggtagatattttgattaagagtttttgtgatattattatagtggttttgtagtttttatttaggggtttttgttgatatgaatttatagtagtgtgttttttaattaggtttgtatttttttaatttgttagataggaagttatttttggtatttggttaggttaaatataagaagtgtttgatgatttttttttaattttgttaattattgaaaatttatgttagaggaaaaaaattgtttttattttgaatttatttatttattgagatagagttttgttttgttgtttaggttggaatgtagtggtgtgattacgatttattgtagatttgattttttaggtttaagtaatttttttattttagtttttaagtagttgggattataggtatacgttattacgtttagataatttttatattttttgtagtgatagggttttattgtattgtttaggttggttttaaatttttgagtttaagtgatttttatattttggttttttaaagtgttgggattataggttgttttgaatttaggtaataattgtttgtgggttttgaagtaaatttttttaaatatgttggttattaattaattattagggttgggttttgtaagaagggtgttggggtaaagatggttgtaaattttttgttatttaagtagaaaggatttttttgttatgaatttgggatggtgttagtagtttgtttgattaattaaatgaggtagatatgatgttgtatagttttcgaggttaggtttttagagttgtttttaggttttttggaatatttgtttttgaaatttagttgttatgttatgaggaagtttaagtaggtttgcgaagggagttataggtagtagtttttagggttttgttaggtatgggagtgggttatattggaagttgattttttaattttaattaaattattttagttgatattttataatatatagttaagttattttgttaattgttttttaatttttgatagaattataggtataaataaaattattgggtttttttgtttgtttttttgtttttttgaggtggagttttgttttgtcgtttaggttggagtgtagtggtgtaatttcggtttattgtaagtttcggttttttgggtttaggttatttttagttttagtttttcgagtagttgggattataggcgtttattattacgtttagttgattttttgtatttttttggtagagacggggttttattacgttagttaggatggttttaattttttgatttcgtaatttttttatttcggttttttaaagtgttaggattataggcgtgagttatcgtattcggttaaaattattgttttaaattataaagtgttgggatagttgtttatttggtaggagattatgagaataggtgtaattatgttaatagaagaggaggtatcggttgtttgtttatattcgattttatgttttagtgttgaatagtagagtagtggttgtgatttggggtagaagggaatggtgagtatatatagttgtttgatattggagtaggtaagttttgttaagaaagttttgtttttgagggtttttaagtaatagttaagattagagcgttttttttttggcgttattaggttattagaggttatttttattttttattttaaggggtttgtttatggagtagagtttggtgatataattaatattttagttgtttttgaaataattattttaaggtttaaataatataatttttaatttttagaataagtaattgcgattttttttttttttttgagacggagttttgtttcgtcgtttaggttggagtgtagtggtgttattttggtttattgtaatttttgtttttcgggtttaagcgatttttttgttttagttttttaagtagttgggattataggtacgtattattatgtttggttaattttttgtatttttattagagacggggttttatcgtgttagttaggatggttttgattttttgatttcgtgatttgattgttttagttttttaaagtgttgggagtataggaatgagttatttcgtttagttattttttttttttttttttttttttgagatagggtttcgtttatattgtcgtttaggttggagtatagtggtataattgattatggtttattgtaattttcgtttttcgagtttaagtgatttttttattttagttttttagggagttgggattataggtgtatatatattattaaagttggttaatttttaaaatttttttatagatggagttttgttatattgttttaagttggttttaaatttttgggtttaagtgatttttttattttagttttttaaagtgttttgattataggtatgagcgttcgtatttagttaggatttttttaggatgttagagtgtgggtagttagttttatttttgagattttgatttttttttaaattataattattttatttttttattaaagaaaaaaaagatgatttattagatagttgttaaggtatttatataaaattatacgatagtaggatagatggtaattaagagggaatttaggattcgttattattagttggaaatatttgatttttagtttgtaaatgtgataagttagattaatattagtaggatattgaatatagtttgtagggatgagtttttgcgttatttttggatatgtgtttaagtaattagaataatttaaaatgttattaggtttttgttgttatttttataaatttcgaatagtgagttgggtttttaaggaatttgtttttgttagtttattttatgttgtataataaataggtttaaagtttttggtagcgtatattaagtatggaggattttttatttattacgatagttttttcgttggagggttggggttgtattttatttttttttttggaaggggcggtttttgtttgaggttttatttgttttatagtagagggatgaaacggtaggattttggttttgacgggttttatttggtaatggtatatgttaagtgggttacgttttattgtttagagtaagttatatggttacgtttgatattgacgtgcgggaaatgtagaatttttttgtatttggggaggtagatatttggataatatgtaatttattatagggttagttggatgaagaacggttaagggtttaggttttttatttcgagttaggtcgaattagtcggggtcgtgagattaagttacggttattagtgttcgtttggaattatgttttgtttttgtcgtgtttatattgtagtagggtttttgttttttaatttatttgaaattggtggtgggtgtggtatatagatgagaaataggaattttttacgttgggttttaataggagttgcggtgggaatataaatggtgtagttattttggaagatagtttggtggttttttataaaattaaatgtattttttatatatgattcgttatatattatttagtaattgtattttttggtatttgtttagatgagttaaaaatttgtatttatataaaaatttgtacgtggatgttgatagtagttttatttataattgtttaaatttggaagtttttaggaggtgagtgggtaaataaattgtggtgttttcggttagcggaatattatttagtgttaaaaagaaatgagtttaagttatggaaagatatgaaagaattttaagtattattaagttaaagaagttaatttgaaaaggttgatgttgtatgagtttatatttatgatattatagaaaaggtaaaattataaagatagtaaaaggattagtggttgtaggagttagggaggagggagggatgaataggtggggtatagaggatttttagggtagtgaaattattttgtatgatattgtaatggtggatataggatagtaagtatttgttttttatttcgtagaatgtacggtattgagaacggatttttttgtaatatatggatttttagttataatattgaatttttttcggggtttcgtatcgttcgtagcgttttttaattttcgttttcgtttcgtttatcgttttttttttttgttatagcgcgttcgtttcgcggtcgttaattagtcgcgcgtttcggtcgcgcgtttcgtttcgttttcggtgggtgtgcgcgcggttaatgggcggtgcgcgggggtcgggtcgcggcggggcggggtagcggggcggtcgttaatcgtcgtggtgttgttgaaattgaaaatattatattatgttaatcgcggtcgggttcgcgcgtacgggggtggggttcgcgcgtataaagggggcgtaggcgggttgggcgttttataggttaagtgcgttgtgttcgaggggtgtcggttaggtttgagcgagcgagttagttagtaggtatcgagggggcgcggttgtcgttcggacgagataggcgaattcgacgtagaagagtttattatcggatagttaggtagtcgtcgcgtttttcgtatacgtagagtcgggcggcgcggggttttttttgcgttcggttttcgttttttttttttttttttttttttttttttcgttgtttttttttttttcgttgttcgcgtttgcgtagtttcgggttatgttcgacgcgttttttcgtagtatatttacgatggagcgttttgtcgttcgtgggatttttttagtattagtgcgtattagcgtttgtcgtagttttttcgggtcggtggattacgaggagttgagtcgcgagttgtaggttcgtttggtcgagttgaacgtcgaggattagaatcgttgggattacgatttttagtaggatatgtcgttgcggggttttggacgtttgtagtggatcgaagtggatagcgattcggtgttcgcgttttatcgcgagacggtgtaggtggggcgttgtcgtttgttgttggcgtcgcggttcgtcgcggtcgcggtggttgttagttcgtttttcgagtcggtcgttgagtttttcgacggtttcgaggaggcgtcggagtagttgtttagtgtttcggtttcggtttcggcgtttatttcgtttttagtttcggttttggttttagtttcggtttcggtttcggtttcggtcgcggtttcggtcgcggtttcggtcgcggtcgcggttttggtttcggtttcggtttcggtttcggtttcggtttcggtttcggttttagtcgcggtttcggttttagtttcggtttcggtttcggtttcggttttcgtttcggtttcggtttcggacgcggcgttttaagagagcgtcgagtagggcgcgaattaggggtagcgcggttaggagtttttcgttgattagttgtattcggggatttcgggacgtttcgcggtcggtatcgcggtcgttagcgttaacggcgcggcgattaagaagttgttcgggtttttgattttcggtgagtttcgtacggtttcgtttcggttcggttcggtttcgttttgttcggtcggtcggtttttttagttttcgggggtttcgttgggttttcgttttttttcgtggtattaaagggttcgtagcgtttagggcgcggttgcgtttttattttttttttcgtttcgttgttgtgttttttagcggtttcgcgcgggcggggtgggaggttgaatttcggtcgcgatttttcgggagcgtagttttcgttttcggtcgcgggagttttttttcgggcgcggtcgggcgtcgtgagtacggcgtggagggggttaagcgcggcggcggtttcggggggtttggtcgcgggataaggggaaatgtttatatagtatattgcgcggcgacgtaaataaagttgattcgtcgcggatttcggcgcgggcggggacggcgtttttatttcggtcggttcgcgtttcgcgttttttttcggttttttttcgggttttcgggtcggtttcgttttgatcggtcgcgcgcgttgtcgttcgtaga

SEQ ID NO: 72 - DNA, 6510 bp, Artificial Sequence
  chemically treated genomic DNA (Homo sapiens)
tttgcgggcgatagcgcgcgcggtcggttagggcggggtcggttcggagattcgagagggggtcgggagagggcgcggggcgcgggtcggtcggggtgggggcgtcgttttcgttcgcgtcgaggttcgcggcgggttagttttgtttacgtcgtcgcgtaatgtgttgtgtaagtatttttttttgtttcgcggttaagtttttcggggtcgtcgtcgcgtttaattttttttacgtcgtgtttacggcgttcggtcgcgttcggggaggggttttcgcggtcgggggcgaaaattgcgttttcggggggtcgcggtcgggatttagttttttatttcgttcgcgcgaagtcgttggagggtataataacggggcggggaggggggtaagggcgtagtcgcgttttgagcgttgcgggttttttaatgttacgggaggaggcgggaatttagcgaggttttcgagggttggggggatcggtcggtcggataaagcggggtcgggtcgggtcggggcggggtcgtgcggggtttatcggagattagaggttcggatagttttttgatcgtcgcgtcgttggcgttggcggtcgcggtgtcggtcgcgggacgtttcgaaattttcgagtgtagttggttagcgagaggtttttggtcgcgttgtttttggttcgcgttttgttcggcgtttttttgaggcgtcgcgttcggggtcggggtcggggcgggggtcggggtcggggtcggggtcggggttggggtcggggtcgcgattggagtcggggtcggagtcggagtcggagtcggggtcggggtcggggttaggatcgcgatcgcgatcggagtcgcgatcggagtcgcgatcggagtcggagtcggggtcggggttggagttaggatcgggattgggggcggggtggacgtcggggtcgggatcgggatattaggtagttgtttcggcgttttttcgaggtcgtcgagggatttagcggtcggttcgaggggcgggttgatagttatcgcgatcgcgacgggtcgcggcgttagtagtaggcggtagcgttttatttgtatcgtttcgcggtagaacgcgggtatcgagtcgttgtttatttcggtttattgtaggcgtttagggtttcgtagcggtatgttttgttggaagtcgtaattttagcggttttggttttcggcgtttagttcggttaggcgggtttgtagttcgcggtttagtttttcgtggtttatcggttcgaagaggttgcggtaggcgttggtgcgtattagtattgggaaggttttacgggcgataagacgttttatcgtggatgtgttgcggagggacgcgtcggatatggttcggggttgcgtaaacgcgggtagcgagagaggagaggatagcgagaagaaggggaaaggagaggaggagagggcggaggtcgggcgtaagggagatttcgcgtcgttcgattttgcgtgtgcgagggacgcggcggttatttggttgttcggtggtggatttttttgcgtcgggttcgtttgtttcgttcggacggtagtcgcgttttttcgatgtttgttggttagttcgttcgtttaggtttggtcggtatttttcgagtatagcgtatttggtttgtggaacgtttagttcgtttgcgttttttttatacgcgcgggttttattttcgtgcgcgcgggttcggtcgcgattagtataatgtagtatttttagttttaataatattacggcgattggcggtcgtttcgttgtttcgtttcgtcgcggttcggttttcgcgtatcgtttattggtcgcgcgtatatttatcgggggcggggcggggcgcgcggtcggggcgcgcggttgattggcggtcgcggggcgagcgcgttgtagtaggggaagggggcggtgagcggggcgggggcgggagttaaagggcgttgcgggcggtacggaatttcgaaagggatttaatattataattgaaagtttatatgttataggagggttcgtttttagtgtcgtatattttacgggataaaggataaatgtttattgttttgtgtttattattatagtattatataaggtagttttattgttttaaaaattttttgtgttttatttatttattttttttttttttttagtttttgtaattattgatttttttattgtttttgtagttttgttttttttataatgttatagatgtgaatttatatagtattagtttttttagattggtttttttgatttaataatatttaaggtttttttatgtttttttatgatttgagtttatttttttttagtattgaataatatttcgttgatcggaggtattatagtttgtttatttatttattttttgaaggtttttaggtttgggtaattatgaataaagttgttattaatatttacgtgtaagtttttgtgtggatgtaagtttttgatttatttgggtaaatattaaggggtataattgttggatggtgtgtggcggattatatgtgaagggtatatttagttttgtaaggagttattaaattattttttaaagtggttgtattatttgtgtttttatcgtagtttttgttaaagtttagcgtggagagtttttgttttttatttgtgtattatatttattattaattttagatgaattaaaaaatagaaattttattataatgtggatacggtaaggataaggtataattttaaacgaatattgatgatcgtggtttgattttacggtttcggttggttcggtttggttcggggtgaagagtttgggtttttggtcgttttttatttagttggttttgtaatgaattgtatgttgtttaaatatttgtttttttaaatgtaggaagattttgtatttttcgtacgttaatattagacgtggttatgtaatttgttttgggtagtgaaacgtgatttatttggtatgtattattgttaaatggagttcgttaaagttagggttttgtcgttttatttttttgttgtgagataaatgagattttagataggggtcgttttttttaaaagagaaaatggagtataattttagttttttagcgaagggattgtcgtggtgagtgagagattttttatgtttgatgtacgttgttaagagttttgggtttgtttgttatgtagtataaggtaagttgatagagataggttttttgaagatttaatttattgttcgaggtttatgggaatgatagtaagggtttggtggtattttgagttgttttggttatttggatatatgtttagaaatgacgtagagatttatttttgtaagttgtgtttagtgttttgttggtgttggtttagtttgttatatttgtaggttggaggttaggtgtttttagttggtagtgacgggttttgagtttttttttggttattatttattttgttatcgtgtagttttatgtgagtgttttaataattgtttagtaagttattttttttttttttgatgaaggaataaaatgattgtgatttggggaagggttaaagttttagagatggagttggttgtttatattttagtattttgaagaaattttggttgggtgcggacgtttatgtttgtaattaaagtattttgggaggttgaggtgggaggattatttgagtttaggagtttgagattagtttggggtaatatagtaagattttatttgtaaaaaaattttaaaaattagttagttttggtggtgtgtgtgtatttgtggttttagttttttgggggattgagatggaaggattatttgagttcgggaagcggagattgtagtgagttatgattagttgtgttattgtattttagtttgggcgatagtgtgagcgagattttgttttaaaaaaaaaaaaaaaaaaaaaaagtggttgggcgaggtggtttatttttgtatttttagtattttgggaggttgaggtagttagattacgaggttaggagattaagattattttggttaatacggtgaaatttcgtttttaataaaaatataaaaaattagttagatatggtggtacgtgtttgtaattttagttatttgggaggttaaggtaggagaatcgtttgaattcgagaggtagaggttgtagtgagttaagatggtattattgtattttagtttgggcgacggagtaagatttcgttttaaaaaaaaaaaaaaaatcgtaattgtttattttgaaaattaaaaattgtgttatttaagttttgaagtggttgttttaggggtagttgagatattgattatattattaagttttgttttatgggtaagttttttgggataaaaaatgaaaatggtttttgatgatttagtggcgttaggaagaaaacgttttgattttagttgttatttgaaagtttttaggggtaggatttttttggtagggtttgtttgttttagtgttagatagttgtgtgtatttattatttttttttgttttaaattatagttattattttgttgtttaatattgaggtataaagtcgggtgtggataggtagtcggtatttttttttttgttagtatgattatatttgtttttatgattttttgttaagtaaataattattttaatattttgtggtttaaaatagtggttttagtcgggtgcggtggtttacgtttgtaattttagtattttgggaggtcgaggtgggaggattacgaagttaggaaattgaaattattttgattaacgtggtgaaatttcgtttttattaaaaaaatataaaaaattagttgggcgtggtggtgggcgtttgtagttttagttattcgggaggttgaggttgagaatggtttgaatttaggaggtcggagtttgtagtgagtcgagattgtattattgtattttagtttgggcgatagagtaagattttattttaaaaaaataaaaaaataaataaaaaaatttagtggttttatttatatttatgattttattagaaattggggaatagttggtagaatagtttggttatgtgttatgggatgttagttagagtagtttgattggggttgaggaattaatttttaatatggtttatttttatgtttggtaaagttttgggagttgttgtttgtggtttttttcgtaggtttgtttgggtttttttatggtatggtagttgggttttaagagtaggtgttttaggaggtttaggagtagttttagagatttggtttcggaagttatgtagtattatgtttgttttatttgattgattaagtaagttattgatattattttagatttatggtagggggattttttttgtttgagtggtaaagggtttgtagttatttttgttttaatattttttttatagaatttaattttggtgattgattgatagttagtatgtttgggggggtttattttaggatttataagtaattgttatttgaatttaaaatagtttataattttagtattttgggaggttaaggtgtgaggattatttgagtttagaagtttgagattagtttaggtaatatagtgagattttgttattataaaaaatataaaaattatttgggcgtggtggcgtgtatttgtggttttagttatttgggggttgagatgggaggattgtttgagtttgggaagttaagtttgtagtgagtcgtgattatattattgtattttagtttgggtagtagagtaagattttgttttaataaataagtaaatttaaaataaaaataattttttttttttagtatggatttttagtaattaatagaattaaaaaaaaattattaaatattttttgtgtttgatttgattaagtgttaggagtggttttttgtttagtaaattagaaagatgtaggtttagttgagaggtatattgttgtgagtttatgttagtaaggatttttgagtaagggttgtaaggttattgtgatgatgttataaaaatttttgattagggtatttgtttatagtttttttgtttttttttatgtgcgtgtatataatatgtatgtgtttatatgttatagatatatatacgtatatataatgtgtatgtatatatataatatatgtatgtatgtgtgtatatattgtttatatgtatataatttatttttttttgttaattttgtatttggttttatatttttttagtaatatgtaatagtattattgttatttttttataaagtatttttatggaaatttgtaaatatatttaaaagtaatagaatagtatattattagttagttttaattattattaatatttttttaattttgttaatttgttttttatttttatttttattttttttttttttttgtagttttataaagtagatttttggttgagtatagtgggtgatgtttgtaattttagtattttgggagattgaggtagaaggattgtttgagtttaggagttggagattagtttgggtaatatagcgagattttgtttttattgaaaaa

SEQ ID NO: 73 - DNA, 8033 bp, Artificial Sequence
  chemically treated genomic DNA (Homo sapiens)
gaggtgggaggattatttgagtttgggagttgtaggttgtagtgagttatgattatattattgtattttagtttgggtgatagtgtaagattttgttttaaataataaataaataaataaataatttaaaaagatattttagttagtaaatgaaggaatagtaaaattagaatattattattttgttatttttaagaaaataataatttatgaaataattatttatggttgttagaattatagaaagagataattatattatgtgttttttggtgaaagtacgtaattttatttattaaatatttttgtttaaatattaaatttgaattatatatagattttaggtttaaataataagttatgagaaatataaatgataaagaaaaatgttaagtgttattataaagaagtatttagtaaaatttaagttttagaaaattatagataaagttaatttttgtaatagataaattgaaagaaaaaaaaagaaggtaaaagggggaaattgtagattaagaggaaataagacgttaggtgtagtggtttatatttgtaatttagtattttggggggtcgaggtgaaagaattgtgtgagtttaggagttcgggattagtttgggttagatggtaagattttatttttttaaaaaagtaaaaatattagttagttatggtggttaatatttgtagttttatttattttggaggatgaggtaggagtattttttaagtttaggaattcgaggtagtagtgatttttgtttatagtattgtattttagtttggtcgataaggtgaatgaaatttgttttttataagaaaaaaaagagagagagagagatataagagattgtagtaattttaattaattttaatattttagttttattttaatttttatttaaatgaataaattattaataatagtttaaaaagaaatgaaaagtaaaatgtgtaaaaattaagatgttgttgttatgggttaaattttgttatttttaaatttttatattaaagttttaagtttaatattttataatttgatcgtatttggaaatagagtttttaaagaagtgattaagttaaaataaggttattggggtgggttttaatttaatttgattggtgtttttaaaagaggaggaaatttggatatatataagagatttaggggtacgtgtgtatagagggatgattatgtgaagaggtagtagtaggatggttatgtgtaagttaagaagagaagttttaggagaagttaaaattttgagaaaataaatatttgttgtttaagttatttagtttgtggtattttgttatggtagttttagtaaattaatacggatattaaaatgatgaataagtttattatttaattaattttgaaaaatatatgggaatatagaagtggatatattgtggattacggagtaataaatttaatttataaaatggagaaaattaaattttttggtgggaaggtgtgtttataaaaaatttgaaaaagttttaaaagtgattatgaatttttttttttttttatttataaatattattttagttttaattatatgtaaaagtgtgtataaatgagggtaaggttaggtcgttgttttttttggttagttaattagttttatttatattttttttttttttagttaatgaaagggatattttattgaggttttagggttatggggtttgggtaggaggttgtttttcgaggaaggaagagttttatttgatttttttggggtgtaggttgttggtgtggttatatttttttttgcggtaattgatagtataggggtgtaggagagtatagcgtttatggtagattattttgttttagttgtatttttaggtgagttggaagagtgaaggtttaataatgttatttcgtaggtgtagtattaggtgcggggtgggttgtttttggacgttgtagtttgagagagtgcggttattttttagttgtttgttggtaaatattagacgttgtttgttaggggggatattttttttgttttgaattttcgtattgatatttttaatggtgttattgggttcgattttaagggtgatggttttgttcgtgagggtttttataaagatttgtatttttgtgtttgtagttcggttgtttcgttgaagaaaaagaggatggtagatttgtttatatttttatattaaggttatatatagataattttattaattagaatataaaaatattattattagtgatttgagttatgtgtaatattggaatggatgttatttatttttttttattgatttttaaaattttatgttaatttattattaattttttttttttttttttttaattataaattttttattttattaaaagatatggttttgataattttaagttttagttgtttattatgtttttatttattttattttttaaatgtgtttaaagtattaataatagattgtgttttattttagagatagttgggttttaaggagaggtaaaatgttttataattttattttattgtttaagataaatgtgttattgtattatatgtgaaatgttatttttgaagtttggtaagggtgtgttgtgaggtgagttatttggaaaatatagtgtagattgaaaaataattataagttagtttattatttttttttagttaagtttattatgatagttgttaaaaaaaatattatgtagtataaagggtaaaaagattttgaagtcgtaaaagttatatttatttttaataatgattagttagtatataagttatttaaattttttgatttttttggtttgtttgtaaaattgaaatatggatatatgttatagaggagttttatgagtattaaatgaaataatagttgtaaagtatttcgtatagagtatataataagtttgattttttttttcgttttttaaatatagattatataatattttttatatagagaatattagataaaatttaattatatttgaaaattaggttgagtaggttggttttttaaagaaatttattgagtttttataatgttttttttatttgacgggagaaaaggggttttggaagattaagtgtgaagttttagaattttgtttggagttggttaggattatttaggtttgagtataagtaaagcgttgttcgtggtgttagtaagcgcgaatgttttcggtaacgttttttttatttaaagttgttttttatttagttaatttgtttcgcgaagtttatatatttgtttcgtgtaagatttttagttattttatttagttattggttttttttttattattattttttatgttttttttaaagaaaaatattattttttatttttttattaattttaaatagtttttatttttttgatatatttattatttaagaaaatggtttaagaattgggttagattattttgttttaatttttttgataagttttagagaaatttaaaggttaaaataagagtataagagtaaaaggtagagaaattaagaaattgaagattaggaaatgggggttggatgggaaagaaaaagaaattgttattaatgttattcggtttttttttttgtttaggtggattttagttttgttgaggttttgttagtagatttttagttttaattagtatttttatggtggtggtatttttattgtttttaaaagaaagagttttttttaattttatagggatttgggggatgaggagttagagttaaggtattttaaaaaaaatatgtgaagatttttattttgtaatatataagtaattgtttttttgttaagattttgttttttttagtatttcgaattaaaatgattttgtaaataaaaattgtttatttttaggagaggtttatttatgtagttttttattaaagtttttaggtaataaatttataatttgcggttttttttttatttaatgtagtattcgttgaaatgttttaaatattttaagtaataaatgttgatttaaatttatttaggaagattaggaaggggaaaaaaagtatttggtatttaaatttttagaagagaatttaatgataggtttagtttgtttaatgataagtttagtattatattttttttttatgatgttttattattattgtataaattttttttattatttatgataaataaaaataagatatttgataaagtgggtttaaataggtaagagtgtaaataaagatttattgtataaatatgatgaaattgggattttagatttttaaagtataatttttttttgttttatgtgtgttaggttgttatttttaatttcgaattagttttttttttttttaagggttgtatttataatgtaaaaatggaaagaattaaaaagtatacgtaaaatatgattttcgggatttttttttatttttatggttgattaatttaaatagaaagatatatttaagagaaaattgttaagtttgatataagttatgaaatttgtgaagtttaagtattgtttggggatgaatttaatttgtatgataggtgtagagttgtcgtttttagatattttaagaaatacggagttattttgaatgattttttttcggttataagggagttattaacgtttttatagtgaaattaattggttggttgaaggaatagaaattttttgtttcgtttattggggattaggagttgagggtagtggtgaatatttttaaaatattagttttggttttattggatatttagcgagtagtgtagttagtatttttggcggttttttggtttagtttttggcgtatgcgttttagtatttttgggtaggttttttcgttttcgtgacgcgtcggttcgggtttggtttttcggcgattatagcggatagggggcggagtttaagggggtggggagacgtcggttttttggtttagttgaaaacggaattttttgtcggttggttttttattttgttagagcgaggcggggtagtgaggatttcgcgacgcgttcgtattttgcggttagagcggttttgagttcggttgcgttcgcgttaggcgtttttttttagaagtaatttaggcgcgttcgttggtttttgagcgttaggaaaagttcggagttaacgatcggtcgttcggttattgtacggggttttaagtcgtagaaggacgacgggagggtaatgaagttgagtttaggttttttaggaaggagagagtgcgtcggagtagcgtgggaaagaagggaagagtgtcgttaagtttacggttaacggtggattattcgggtcgttgcgcgtttgggggttgcggaatgcgcgaggagaataagggtatgtttagtgggggcggtagcgatgagggtttggttagcgtcgcggcgcggggattagtggagaaggtgcgatagtttttggaagtcggcgcggattttaacggagttaatcgtttcgggaggcgcgcgatttaggtagttggggttttagggtttcgtcggtagggggcgcgcgaacgcggggcgcggtttcggcggatcggggttggaatttagatcgtcgatgtagatttgtataggagttttcgttggtcggaggtgtgtattttacgcgtaaaataggtttttatttagtaaaaattttaaagagagatattgaaaaatttattgtttaagttttttttagtggtttttgttttgttattttatgattagagatgtaaggaatagattgaattggggagaaaaggagaaaaggaaagtttatttagggaagaagattattttgtttgtttgtttttaacgataaagataagtaaagtataagttacgtattttagattggatttaaggaattttataaaattatagtatatggaaaaaattaatgtaaatttttaagttattatatgaaatttgttgtattgtttttttatagaggttaattgagaatgagacgggattttttaattatagtatttagttttttttatgttagtagtgttttatgagtgatgtataagagaaaaaatatatagttttataggttttttattttttaattattatatttagtgtttagattataaaaatatttttgtagtaattgttaggttttttttgaatggtaaaggatttttataaataatgtatttttatttttattgttaaaatatatttatttaatgtttaagtacgaattttgttttaattagtattgatattttttattttttttataatttaggataatttttttgtattttatcgttggttagtggttatatttagtatttattttattattattttttaaaattaagttaatattaagggattttgttaatagtatagattttaaagaagtgtttattttttttgaatttttagaataatggtataataaatgagggatttttaaaggagtaaaaatattgtaaagtgtattttaaaaatttaaaattttattaataattataaaaataagttatatatgtaatttattattttttgaaatattaatagtagttatttttttttttttttttatgtaaaatatttttatattattagtagatataatttattacggtttttaagagatgaaatgaatatttttaatattaatgaaataagttaataaaatatgagaagtatattgttttttaattaaatggtatattttaaagtgtataaatttataataaataattcgattttagatatttagttattaaaaattgttttataattgattttaaatatgatagtaaatgtttttataatgtttatgtatataaatggttgttataggattatttttgtaaaatattattttttttaagttatgtattattttgattgattgttaatatttaagttttatttatttatttatttattttattttttttgagatgaggttttattttgtcggataggttggagtgtagtggtataattttagtttattgtaattttttttaggatgtaagcgatttttttgttttagttttttgagttgttgggattataggtacgttttattatgtttagttaattttttattttttgtagtagagacgggattttattatgttggttaggttggtttcgaatttttgattttaggtgatttgtttgttatggttttttaaagtgttgggattataggtataagttattgggtttggtttaagttttttttatatagtaaaatatttattgtttaatatttttaaattttagttattataaaattttgtagtatataaatatagttagttttatattatattaaaaatattatagtttaaatttaaaatgatgaattgttaaggaaaaattatttattataattttataagattttgtatgatttaatttattttttttttttaatttttaattttggtttaaattattatattataagttagttatgagtttagatatatgataaataaaagtttttcgtacgggatttgttatgagaattaaataaattaaaaaaaaaagaaagaaaaaaatttagttgtttatttttttttttaaattattatttttaatttttaataaatagtagttgattatttaataaatatttgtagatttggattatggaggaggggttagtaaggtaaataatttaaaattttaaaagtcgaataaatttaattttgtttttaaattatttaataaaatagatttttatgttttaatggaaattaagatttgtttttttataatgatgattattattttattattaatttttttgtttttgtacgtttagagaataaaatggtatttaatttgtattgagtataatttgaaggtggggtgggaaagtggattgtattagtaaatgaagaaatattagatattagagatttgaatatttttgtattgggtgaaaattttgtaattaggtgtttttttaaatggttttatttgttttgtttcggtcggtattttttatatttgtttttattttggttttgattattttgttttttttggtagg

SEQ ID NO: 74 - DNA, 8033 bp, Artificial Sequence
  chemically treated genomic DNA (Homo sapiens)
tttgttagagagagtagagtggttagagttagggtgggggtaggtatgggagatgtcggtcggggtaaggtaggtggagttatttaaagaaatatttaattgtaaagtttttatttagtgtagaggtgtttaggtttttgatgtttggtgtttttttatttgttgatgtaatttatttttttattttatttttaggttatatttagtataaattaaatgttattttattttttaaacgtgtagagataagaaagttgatggtaaagtgatgattattattatggaaaaataaattttgatttttattggaatatgggaatttattttgttaaatgatttaggggtagagttaaatttattcggtttttaaagttttaaattatttgttttgttgattttttttttataatttaggtttataaatatttattaggtagttaattattgtttgttagaagttgggagtaatggtttaggggagaaaataaataattaagttttttttttttttttttttttaatttatttagtttttatagtaaatttcgtgcggaaggtttttgtttgttatgtgtttgagtttataattggtttgtagtgtgataatttgagttaaagttggagattagaagggaaaagtaaattaaattatgtaaaattttataaaattataataaatgatttttttttaatagtttattattttaaatttagattataatatttttaatgtaatataaaattaattatatttgtatattataggattttataatagttaagatttaaaaatgttaaatagtaaatattttgttatataaaaagagtttgggttaggtttagtggtttatgtttgtaattttagtattttgggaggttatagtaggtagattatttgaggttaggagttcgagattagtttggttaatatggtgaaatttcgtttttattataaaaaataaaaaattagttgggtatggtggggcgtgtttgtagttttagtaatttaggaggttgaggtaggagaatcgtttgtattttggaagaggttgtagtgagttgagattgtgttattgtattttagtttgttcgatagagtgaggttttattttaaaaaaaataaaataaataaataaataaatagagtttggatgttagtagttaattaggatgatgtataatttagaaaaaatgatgttttgtaggagtaattttgtagtagttatttgtgtatatgaatattatgaaaatatttgttgttatatttaaagttaattataagataatttttggtaattaaatgtttaaaatcgagttatttgttatgggtttatgtattttaaaatatattatttaattgaaaggtagtatattttttatgttttgttggtttgttttattaatattagaaatgtttattttattttttaaaaatcgtgataagttatatttattagtgatgtaaggatattttatatagaaaaaaaggggaaaatagttgttgttagtattttagaaaatggtgaattatatatataatttgtttttataattattaataaaattttaagtttttaagatgtattttataatatttttgtttttttaaaaattttttatttgttatattattattttaagaatttaaaagaaatgaatatttttttaaaatttatattattaataagattttttaatattagtttagttttagagggtgatagtgaggtgagtattgaatatgattattagttaacggtaaagtataaaagagttgttttagattgtaaaagaaataaaaaatattagtattaattaaagtaggattcgtatttaaatattgaataagtgtattttaataatgaagataaagatgtattatttatgaagattttttgttatttaaaaaggatttaatagttgttgtaggaatatttttgtaatttgggtattgagtatgataattaaagaatgagaaatttatagaattatatatttttttttttatgtattatttataagatattgttaatataaaaggaattaagtattgtggttgaggaatttcgttttatttttaattaatttttatgagaaaataatataatagattttatatagtagtttagaagtttatattgattttttttatgtattatgattttgtagaattttttaaatttaatttagaatgcgtaatttatattttatttatttttatcgttgaaagtagatagataagataatttttttttttaaataagttttttttttttttttttttttttaatttagtttattttttgtatttttgattatgagatggtagaataaaaattattaaaaaaagtttaaatagtgggttttttaatgtttttttttaggatttttgttgggtaaaagtttgttttacgcgtggaatgtatattttcggttaacggagatttttgtataaatttatatcggcgatttaggttttagtttcgattcgtcgaggtcgcgtttcgcgttcgcgcgttttttgtcggcgaggttttggggttttagttatttggatcgcgcgtttttcgaaacggttgatttcgttgggattcgcgtcggtttttaggagttgtcgtattttttttattagttttcgcgtcgcggcgttggttagatttttatcgttgtcgtttttattgggtatgtttttgtttttttcgcgtatttcgtagtttttagacgcgtagcggttcggataatttatcgttggtcgtaaatttaacgatatttttttttttttttttacgttgtttcggcgtatttttttttttttaggagatttgggtttagttttattattttttcgtcgtttttttgcggtttggggtttcgtgtagtggtcgagcggtcggtcgttagtttcgggttttttttggcgtttaagaattagcgggcgcgtttggattgtttttgggaaaaagcgtttagcgcggacgtagtcgagtttaaagtcgttttggtcgtagggtgcggacgcgtcgcggagtttttattgtttcgtttcgttttggtagagtggggagttagtcggtaaagaatttcgtttttagttgggttaaggggtcggcgtttttttatttttttaggtttcgttttttgttcgttgtgatcgtcgggaggttaggttcgggtcgacgcgttacgagggcggggaagtttgtttaaagatgttaggacgtatgcgttagagattgggttagggagtcgttaggaatgttggttgtattgttcgttggatgtttagtaaagttaaggttaatattttgggaatgtttattattgtttttagtttttaatttttagtaggcggagtagaggatttttgtttttttagttagttagttggttttattgtggagacgttggtggtttttttgtgatcgagagaaagttatttaaaataatttcgtgttttttaagatgtttgaaagcgatagttttgtatttgttatataagttaaatttatttttaggtagtatttgggttttataagttttataatttgtattaaatttagtaatttttttttggatgtgtttttttgtttgaattagttaattataaaaatagagaaaaatttcgagaattatgttttgcgtgtgttttttaattttttttatttttgtattatggatataatttttaaaagagaaaaaaattagttcgagattgagagtggtaatttggtatatataagataaaaaaaaattatattttaagaatttgagattttagttttattatatttgtatagtaaatttttgtttgtatttttatttatttaaatttattttgttaggtattttatttttatttattatgagtaataaaggaaatttatgtagtaataatgaaatattataagagaggggtgtggtgttgggtttgttattaaataggttgaatttgttattaaatttttttttgaagatttaaatgttaagtgtttttttttttttttttaatttttttaggtgagtttgaattaatatttattatttaaaatatttaaaatattttagcggatgttatattggataggaagagaatcgtaagttatggatttgttgtttaaaaattttggtgaggaattgtataagtggattttttttaaaagtgaatagtttttgtttatagaattattttggttcggagtgttgaggaagataaagttttaataggagggtaattgtttgtgtattgtaaaatgagagtttttatatgttttttttaggatattttagttttgattttttattttttaaatttttgtagaattaaaaaaagtttttttttttaaaggtagtggaagtgttattattatggaagtgttggttagggttgaaaatttattgatagagttttaatagagttgaaatttatttggatagggaagggaatcgggtagtattaataataattttttttttttttttatttaatttttattttttagtttttagttttttaatttttttattttttatttttatgtttttgttttgatttttgagtttttttgaaatttattagaaaagttaggataagatagtttgatttaatttttgagttatttttttaggtagtaaatatgttagaaaaatgaaagttgtttggagttgataaggaaatggaagataatgtttttttttgagggggatataaagaatggtgatagggaaagaattaatgattaagtaaaatgattgagaattttgtacgaggtagatgtgtgagtttcgcgaagtaagttgattgaatgaaaaataattttgggtagggaaaacgttgtcgggggtattcgcgtttattagtattacggatagcgttttgtttatatttaggtttgggtggttttaattagttttagatagaattttaaagttttatatttgattttttaaagttttttttttttcgttaaatagaaaggatattatggaagtttaatgaatttttttgaaaaattaatttgtttaatttggtttttaaatatgattggattttatttaatattttttgtataaagaatattatatagtttatatttagaagacgagaagagaaattaaatttattgtgtattttgtacgaagtgttttatagttgttgttttatttaatatttataaaatttttttgtggtatgtgtttatattttaattttatagataagttaaaaggattagggaatttgagtgatttgtatattagttaattattgttggaggtgggtataatttttgcgattttagagtttttttattttttatattatatagtgttttttttagtagttgttatggtaggtttaattggaaaaaagtaataaattggtttataattattttttaatttatattgtgttttttagatggtttattttatagtatatttttattagattttaaagatgatattttatatgtaatataatagtatatttgttttggataatagagtgagattatgaaatattttatttttttttgaaatttagttgtttttagggtgaaatataatttgttgttaatgttttaaatatatttaaaagatgaagtggatgggaatatagtgggtagttgaaatttggaattgttagagttatgttttttaataaggtggagaatttataattgagaagaaagaaagagaaagttaatggtaaattggtatagaattttggaggttagtagaagggaatgagtggtatttattttaatgttgtatataatttagattattagtaataatatttttatattttagttggtgaaattgtttgtatatgattttgatatagaagtatgaatagatttgttattttttttttttttagcgaggtagtcgagttgtagatatagagatgtagatttttgtgaagatttttacgggtaagattattatttttgaggtcgagtttagtgatattattgagaatgttagtgcgaaaatttaagataaggagggtattttttttgataagtagcgtttgatatttgttagtaaatagttggaggatggtcgtatttttttagattataacgtttagaaatagtttatttcgtatttggtgttgtatttgcgaggtggtattattgagtttttatttttttagtttatttagaaatataattgaaataagatgatttgttataagcgttatgtttttttgtatttttatgttgttaattgtcgtaagaagaagtgtggttatattaataatttgtattttaagaaggttaaataaggttttttttttttcggagggtagttttttgtttaggttttatggttttggagttttaataaagtgttttttttattgattggaaaaaaaaaaagtatgaatagaattggttgattggttaagagaaatagcgatttaattttgtttttatttatgtatatttttgtatatgattaggattaagatagtgtttataagtgagaagagaaggaaatttataattatttttggggtttttttaaattttttatgaatatatttttttattaagaggtttgattttttttattttatgagttgggtttattgtttcgtgatttatagtatatttatttttatatttttatgtattttttaagattaattaaatggtggatttgtttattattttagtattcgtattagtttgttagggttgttataatagaatattatagattgagtagtttaaataataaatatttatttttttagagttttaattttttttgaggtttttttttttgatttgtatatggttattttattgttgtttttttatatagttatttttttgtgtatacgtgtttttggattttttgtgtgtgtttaaattttttttttttttgaggatattagttagattggattagggtttattttaatggttttattttaatttagttatttttttaagggttttatttttaaatacggttaaattgtgaggtattgggtttaggattttaatataaaaatttagaggtgatagaatttaatttataataatagtattttaatttttatatattttattttttatttttttttaaattgttattaataatttatttatttgaataaggattaaaataaggttaggatattgaaattggttgaaattgttatagttttttgtatttttttttttttttttttttttttataagggataggttttatttattttgtcgattaggttggagtgtaatattgtgagtaagggttattgttgtttcgaatttttgggtttaagggatgtttttgttttattttttagagtagatgggattataggtgttggttattatgattggttaatatttttatttttttgaagagatgaagttttgttatttggtttaggttggtttcgaatttttgggtttatataatttttttatttcggttttttaaagtgttggattgtaagtgtgaattattgtatttggcgttttgtttttttttaatttatagttttttttttttgtttttttttttttttttttaatttatttattgtagaaattggttttatttgtagttttttaaagtttggattttgttgaatgtttttttataatgatatttaatatttttttttgttatttgtattttttataatttattatttaggtttagagtttgtatgtgatttaggtttgatatttgggtaaaagtatttaataagtgggattacgtatttttattaagagatatataatatggttgtttttttttgtgattttagtagttatggataattattttatagattattatttttttggggatggtaaaatggtgatattttaattttattatttttttatttattagttggaatgtttttttaaattatttatttatttatttattatttgagatagagttttgtattgttatttaggttggagtgtagtggtgtgattatagtttattgtaatttgtaatttttaggtttaagtgatttttttatttt

SEQ ID NO: 75 - DNA, 16720 bp, Artificial Sequence
  chemically treated genomic DNA (Homo sapiens)
tttttttttttttggagattgcgttttaaaggttggagtgtagtggtataattttggtttattgtatagttcgttttttgggtttatattatttttttgttttagtttttttagtagttgggattataggtgtttgttattatgttttgttaattttttgtagagatggggaaatgttatggttttaattttttgattttgtgatttattcgtttcggttttttaaagtgttgggattataggtgtgagttatcgcgtttagttttttttttttttttagataagagttttattttgttgttaaagttagagtgtagtggttaaattttagtttattgtaatttttgttttcggagtagttggaattatagttacgtattattacgtttagttaatttttttgtatttttagtagagatggggtttgcgcggttgaagtgtagtgatgcgattttagtttattgtaatttttgttttttaggtttaagtaatttttatgttttagtttttggagtagttggtattatagtatgtattattatgtttggttaatttttttgtattttagtagagatggggttttattatgttgtttaggttggttttaaatttttgagtttaggtagtgtcgtttttttgattttttaaagtgttagaattataggattgagttatcgtgttttggtttttattttaaaaattttatttttgtaggtaatatgttgggttttttagtatgatagtttatgttttttaattggagtgtttaggttatttattttttttttttaagatagggttttattttgttatttaggttagagtttagtggtaagattatgatttattgtagttttaaattggaatttttggtttaagttatttttttagttcggttttttgagtagtgaagattataggtatgtgttattatggttggttaaattttgtattttttgtagagataaggttttatgatgttgttttagttggttttgatttttagggtttaagtaatttttttattttggttttttaaagtgttaggaatataggtatgagttattatgtttagttatattatatatttttaatttataatagtttatatttaattgatattaaattagtttatttgtagtataagaattttttttagtttggttaatatggtgaaattttgtttttattaaaaatataaaaaaaaaaaaattagttaggtgtggtggtgttcgtttgtagttttagttatttgggaggttgaaatagaagattgtttgaatttggaagtagaggttgtagtgagttgagatcgtgttacgtttaggtaatacgagtaagatttcgttttaaaaaaaaaaaaggcggggttcggtggtttacgtttgttattttagtattttgggaggtcgaggcgggcggattacgagattaggagattaagatcgttttggttaatacggtgaaattttatttttattaaaaatataaaaaattagtcgggcgtggtggcgggtgtttgtagttttagttattagggaggttgaggtaggagaatggtatgaatttaggaggtggagtttgtagtgagttaagatcgcgttattgtattttagtttgggcgatagagcgagatttcgttttaaaaaaaaaataaaaaaaaaattttttggcggtttggtgtggtggtttatatttgtaattttagtattttgggaggttgagattggcggattatttgaggtcgggagtataagattagtttgattaatatggagaaatttcgtttttattaaaaatataaaattagtcgggtatggtggtatatgtttataattttagtaattcgggatgttgaggtaggagaattgtttgaatttgggaggtagaggttgtagtgagtcgagattatgttattgtattttagtttgggtaataagagtaaaattttattttaaaaaaaaaaaataatttttcggttgggtatagtggtttacgtttgtaatttattttagtattttgggaagttaaggtaggtagattacgaggttagagcgagatttcgtttcgaaaaaataaataaatattttttttattttttattatatagtttttgatattgttatgtgttttatttttatatatgttataaaatttatagtatattattatagttagaatttttatattagttagttgcgatggtttatttttgtaattttaatattttgggatgttaaggtaggttgattgttgaggtttagaagtttaagattagtttggttaatatagtgaaattttgtttttattaaaaatataaaaattagatgggtaattagttggacgtggtggtgtacgtttgtaattttagttattcgggaggttgaaataggagaattgtttgaatttaggaggtagagattgtagtgaattgagattacgttattatattttagtttaggtaatagagtgagatttcgttttaaaaaaaaaaattagttgggtatggtggtgtatatttgtggttttagttattcgggaggttgaggtagaagttgtagtgagtcgagattttgttattgtattttagtttggatgatagagtgagatttttgagataaataattggggttgggcgtagtagtttatacgtgtaattttagtattttgggaggtcgagatgggtggattatttgaggttaagagtttaagatcggtttggttaatatggtgaaattttgtttttattaaaaatataaaaatgagtcgggtatggtggtgcgtgtttgtaattttagttattttggagattgaggtaggaaaattgtttgaatttaggggtagaggttgtagtgagtcgagattgtattattgtattttagtttgggtaatagaatgagattttattttaaaataaaataaaaaaatataaatataaaattaaaaaaataaaaataaagggttaggtgtagttgtttatgtttgtaattttagtattttgggaggttaagatgggtaggttatttaggtcgggagttttagattagtttggtaaaaatggtgaaattcggtttttattaaaaatatataaaatggttaggcgcggtggtttacgtttgtaattttagtattttggtaggttgaggcgggtggattatttgacgtttaggaatttaagattagtttggttaaggatggtgaaattttgtttttattaaaaatataaaaattagttgggtatggtggtaggcgttgtaattttaggttatttaggaggttgaagtaggagaattgtttgaattttggttgtagtgagtcgagatcgtattattgtattttagtttgggtaatagagtgagattttattttaaaaaaaaaaaaaaaagagttgaggtttttttttattatttgtgtgaagattttagaaaatttgttttatttttttaaattttagtttttttattttttaattgttatgaggtttttgtgaggaataaatgagttgatatggatgtttttgtagttaataaaataaagggttttataaaataggtaataataataataattatttattattattatatgaagttatatgaatgtgtaagattttggaggaagatagtagagagagagagagagattagagattttagggttaaaagttggagaaattttatagtatattatttaaaagaggagtttatgatggaggtagaggtaaatttggagaggtaagaaattttgaagataggggagtgttttgtggtaggttttgtatataagaatttagtttggttaatatggcgaaatttagtttttattaaaaatacgaaaattagttaggttttgtggtaggtatttgtaattttagttatttgggaggttgaggtaggagaatcgtttgaatttgggaggtagaggttgtagtgagtcgagattttattattgtattttagttcgggtgataagagtaagattcgattttaaaaaaaaaaaaagtttagtttagttggtaagatttattaaaagtgtttatttagattttgggtgtcgtagaatgatttagagtttgaattaatatgaaatcgagaaaacgttttttgtaagggttttagggaatatttgaaattttgaagaattgtttgtatttattttgaagaatgggtgttaataagagatagtttttttttggtatttgttttttatttttaatttaattttaatttatatttttttattttatttggttttttttattttttttgtttttttttatttggttttcgttttttttaagtttattttttattttgttttataagatttgattatattaggatgtttttgtagtttataagaagatgattgggtgtttatacgtatatgagatgtgttttttttaaattttgttaagatatgggtatatatttatttgatgttaatttacggggaaaaaaatttgattatgttattttcgtgtttaaatttttatatatttttattgttttaggatagaggttggattttttagatatataagattttgtatttatgatttgttatttttataggtattttttatttttatttatttggtagttttttataatttttttgggttttcgtggttttttgttattgtaaacgtcgttttttttaggatgttttgtttttttagatttaatttggaaagttgtttttaagtttcggattgagttagatgttttttgggtatttttgttatagcgttgtgtggttgttgatagtttgattttttaattttttttatgtttttttgagggtagggaagatgagtatttttttttttcgtatagattttatcgtataagatttttttaaatagatcgaatttaaggagtttttttggttgttagtttacgtgtttcgatttggggtttttaaaatatacgtttattggaatcgggttaggggagttagtttggttaagggtttttttagttcggttaagggtttttttagttcgggagcgcgttatatgtagattttgggatggtcgttaggggtcgtcgggttttttgttttttttttttattcgggtcggggttagaggtttgtagagcgtatgttttggggtagttcgcggttcggcggggagcgtcggagttttttgtggtcgacgtgtattaaggtaggtttcgtttgggacgcgcggagggttcgggtagagggcggtaacgagcgggttatagcggagtacggtcggtttacgcggtttaagtcgttgttcgttttcgttcgtgtcgcgcggcgtcggttttacgtgaagttcggaggtaggaaggcgcggtgcgggttcgcgatttttcggtttcgcggggcgttttagcggcggttggcgtcgtttcgttcggagttagggtcgcgcggttttgcgcgcgcgtttttacggcgtcgcgtacgcgtcgtagcgacgatttaaattgcgcgagcgcgcgggtcgggttgcgcgcggtcgttcgggcgggggatgggtttttgtcgcgaggaggatggttttgttcggtatgcgtttggagaaggcggtttgtagatcggggagggagtttttgttcgggaagagggtgggtcgtaggagttcgagggtttttcgttgtgtatttttgggagtcgtgtgttttgaattatcgtagtagtttagtttgttagtagattatttgttggttatttattgcgttttttttttgcggggttgggggatagtagtgagaagagtaggttcgtgttattagcgaattatgtttttgaatttaggcgacggacgttattggtaagttatttatacgttatatattgatttaatttcgattacgtgtgatttgtgtgttttagtagaagttgagtgtgtggggtgtttacggggaagtttttagggggattttttattttgtttaggaggtttagggatggttttttaggtgaagtgatttttgaatggggttttgaaggaatagagttttttaggtagtttgagggtagtgggattagggtgatataggtagagggattgtacgtgtaacggtatgaaggtataggtattgtggttagggatattataggttttgtaggtgattggaggaggagagtaataagatgatatagtaggggtttcgggttacgaagcgttttgtgtgttaagatttaaggaattttgcggggtggaggaggtagggaagattttttttaagaagggtattagagtgaaatttggatagatgaattaggagtttacgaggtttttgttttaaagatattttaagagtaggaattttgttttgtttatcgttataatttttttattagatgtttttggtaatttatttagttttttagagtattggtttttttatttgtaaagtaatggtagggggtatgtggtgaggatataatttttttttttttgagacggagtttttatttttattatttaggttggagtgtagtggcgcgattttagtttattgtaatttttattttttaggtttaagtaattttgttttagtttgttgagtagttgagattataggaatatattattaggtttagttaatttttgtatttttttttttttagtagagacggggttttattatgttggttaggttggttttgaatttttgattttaggtgatttatttgtttttagttttttaaagtgttggaattataggtgtgagttatcgtattcggttaattttttttttttttttgatatagaattttggtttatcgtttaggttgtagtatagtgtcgtgtttttagtcgttgtagtttttatttttcgggtttaagcgatttttttgttttagtttttcgaatagtaatattttataatttttataaagtagtgaagttgtgtgtttttttttttaggaaaaatgaatatataggtttaggtataggttgtatagaacggggattttaggtgagaaatttttagtgtgaaatatattatttgtgtgtttggtataatagtagtttattaaatgtatattgttgatatatgagtttttttttttttttttttttggggattttatatatagagattttttagttttagtttggtaggtaagtttttttttttggtgtgggggacggagggtatagttgtagtggtttgggagggttttgtttttttttatagaaatcgaggttgtggtgaggttattggaggttagggtaggagtattaggtttcgggtagattgtttagattggcgtgtttatttattttttttaataaataaggaaggtgaggtgggggtagggtagttttagttttggtggagtatggttatgagattgggattttattttatttttttgtgatttgggttatttttttttgagttttattttttttttagttgtaaaattgggatgagtttgtttattttaaagggtagttgtgggtatttaggagtgtttgatggtggaagttgattttgtagtcgatttatttgtgattgttttattttttttttagagattgtatgttttttgaagatggaagttgtgttgtgtggggcggggtggggaagtatgatgttaaaagttaattttttatttttagtttagatatttattgtttggttaagaaaatagttagagaggtcgggttcggtggtttacgattgtaattttagtaatttgggaggttaaggtgggtagattatttgaggttaggagtttaagattagtttggtcgatatggtgaaatttcgtttttattaaaaatattaagtagtttagttaggcgtggtggtttgtcgtttgtagttttagtattagggaggttgaggcgggagaatcgtttgaatttgggaggcggaggttgtagtagttgagatcgtagtttgattttagtttgggtaatagagtgaggttttatgttaaaaagaagaaaagaaaagtaaataaaggaaaatatatttagagtagtgagagaagtttgtatataacgatttatttgtgtagtagaggttgtgtaggtaggtatcgggaatagggttttattttttagaaggtggttttttggtcgggagtagtggtttacgtttgtaattttagtattttgggaggtcgaggtgggtggattatgaggttaggagatcgagattattttggttaatacggtgaaatttcgtttttattaaaaatataaaaaattagttgggtgtggtggtaggcgtttgtagttttagttattcgggaggttgaggtaggagaatggcgtgaatttgggaggcggagtttgtagtgagtcgagatcgcgttattgtttttagattgggcgatagagcgagattttatttttaaaaaaaaaaaaaaaaaaaaaaaaagaaggtggttttttattttttgtttttttttgcgattgttagtttagtgtagggttttaagttttttattttggagaggaagtttttgggatttaaagacgatttaggtgtcgtttttatcgtagtagggagttgtcgttattgtttttttttatatttgtggtggatttgttattatttattttatttttttttaggttttagttgttttattgttttttttttggttttattattttttttttagttggtttttgttttttgttttttggatttggttaagtgtataggggatattggggaggtttgtttagattgttttagtttttgtttggattaaggtttgtttttagaattagttagataggtttgggttgtttttttaggttgttttttatttgttttgtgaatttaggtcgataaagttatttttttgagttttagttttttaattgtgaaataggagtgatagtgttgttttttttagttttttgtgaggaataaaagggttttgtatatggaagatatagtgagttagtcggtgttttagggtttatattttaggaagttgattggtatggtggataggtatgtaaattaaagtgattgtgatttaaaagtttgttttagttttttagagagaatgattagtttaggatggaggagggattagaggaggtgattttgagatattagtagatgtttttttagtgggataagggatgggaaggcgttttaggtaaagagatgtaaatagtatggagaggatagttagtattttggtttggtgggtttggtaaggagattgtgtgggaagagaagggaggatgtgatagataggaaatgaagttaaaggttttgttagtattcgatgttggagatttttaatatttagttaagaaatgtgggttttattttttaggaaaaggggattattaaggagtttaagtaggttagtagtttgttttaggtttgaggtttggaaagattatgaatgaggtcgggtatggtattttacgtttataattttagtattttgggaggtcgaggtgggaggattatttgagttcgggagtttgagattagtttgggtaatatagtgagattttgtttttataagaaaaaaaaaaattataaattagttaagcgtggtggtatatgtttgtagttttagttattttggaggttgaggtaggagggtcgtttgagtttaggaggtggaggttgtagtgagttgtgtacgtgttgttgtatttatagtttgggtaatagagtgagattttgttttaaaaaaaaataaatatatatatgtatatatatatatatatatatatttattgattacgaatgatttgagaatgagaggaggggatgagggtggggatcggaagattagtgaaaagttgttgttttttttagggaaaggaggaaggaaatatagttttaggtaagttgaaaaattattagggagtatggggaggaaggaagtagaagaaatttttttttttttttttttttttttgagacgagttttgttttgttattaggttggagtgtagtggcgtgatttcgatttattgtaagttttgtttttcgggtttacgttatttttttgttttagtttttcgagtagttaggattataagcgttcgttattacgtttgtttaattttttgtatttttagtagagacggggttttatcgtggtttcgattttttgattttatgattcgttcgtttcggttttttaaagtgttgggattataggcgtgagttatcgcgttcggttagaagaaatttttaataatatttaaggacggttagttttgagtttgattaattggttagattttggtttttttttaattttgagtgagatattttatttttttgagttttagtttttttttttgtagagtgggattattgtggttagtttgtagtgaaacgttttagaatattagttaaatataattaaggagatgttgattgggtttgttttatttatgataatagattttttggttaatgttttatgatattaatattttatatagtttttatgtgtttgattttatttcgggttgtgtttatggtagtttagttattagtattaattgtgttgatataattgttttttgtttttttttttgattttttattgtgagtattttttatgttaatatagttttttttttaggtatagtagattgttatagattattttgatgaattgatgagatgtttgttttggtatatagttgtttatttaaaataagggtgtttttttttttggtggagggatagagttttttttttgttgtttaggttggagtgtaatggtgtaaattcggtttattataatttttattttttgggtttaagcgatttttttgttttagtttttcgagtagttgggattatagtacgcgttattacgtttggttaattttgtatttttagtagagatggggtttttttacgttggttaggttggtttcgaatttttgattttaggtgatttattcgttttggttttttaatttgttgggattataggcgtgagttatcgtgttcggttataaagatgttttttatattttatatttttattttatttaattttgtttgtttgatattttttttgggatggtttttaagtattttagattgaatgaaaatatttagtaatatggagttttacgtttttttttttttgtttgtttaatagtgttttttattttattatatggaagtttattatttatttggttatttaagtttaagtttgggagtttttgtgtttggttaagtttatagggggattttgggtaggtttgttaagaattttttggatttttttaggatgaataaattaagttaagtgttgtggtacgtgtttatgattttaggtttttgggaagttgaggtgggaagatcgtttgagtttatgagttcgaggttgtaataagttaattgtattattgtattttagtttaggtgatagagtgagatttttttttttaaaaaaataaaataaaaggttaggtatggtggtttatatttataattttagtattttgggagtttaaggttagagaatcgtttgagtttaggagttcgggattagtttgggtaatatggtaagacgttgtttttgtaaaatatataaaaattagtcgggcgtggtggtgtatatttgtagttttagttatttaggatggtttaagttcgggtggttgaggttgtagtgagttatgattatgttattgtatttaagtttgggtaggattttgttttaaaaataaatataaaggatgaataaattatgagagtaaaaaagggttagttttttttatttttgttatatttttttatttaaagttaagtagtagtgtagtaggataagtcgtagataaaattttttagatatcgagttaaagaaggaagggttttatttagttgggagttttggtaagatttacgtttttaaaaattgagtttttcgagtgagtagtttttgttttttttaagggtttataattttaagggggtttgtatgaagaggtcgtgattgattgagtaagtaggggatatgtgattgggggttgtatgtattggttattagaacggaatagaataggatagggatttttatagtgtttttttatacgatgtttggaatttatagataatataatcggttaggttaggggtcgatttttaattagatataggtcgcggcgttaggttgtttgtttgtggattttatttttgttttttagtttttatttttttggaggtagaaattgggtataagataatatgaggggtggtttttttttttagtagtaaagtattataaatatttgtggatttataattattttatttagttttgatgatagttttgagaagtagttattgtatttttttttatagatgaggatatagtttagagaggttaaggtaattggttagttataagttttggaaggtgaatttagttttttttaattttaaagaatgtgtattttttagtgtgggataaggggttttaaaagataggtgggaggatttttagttttgggagaataaaagttgggtgaagtttagaattgttattttattagttagaattgggttagtgataatttgtagaagtttagtttgtaaaggtttattaggattttagatttttggttatttttttatttttagtatttagttttttttttttaggataattagtagaaaagtgtttggttttgtgtttatatattatggaggggagagttagagaggcgaggttttcgggaattattagaaggaaggaatgagggggttgttggttaggtttagagttgagatcgagaagggtttttggagtttttttttttttcgtaatattaggtagaggtttagataatttgattgttttttatgattttaaagattgtggtttcggtcgggtatggtggtttatagttgttgtaattttagtattttgggaggttgaggcgggtagatcgtttgagtttaggagttttagattagtttgggtaatttggtaaaattttgtttttataaaatatataaaaattagttggatattgtgatgcgtatttgtagttttagttattttagaggttgaggtgggaggattatttgagtttaagaggttaaatttgtaatgagtcgtgatttggttattgtatttgagtttgggtaatagagagtgagatgttgttttaaaaaaataaataaataaataaataaaaataagtatttgatgattttattggggttaattatgaagagattttttagtgtaagattaggattttttaatagtatatcgaagtttcgagaaattcgtttagttaaatttgataagggtgcgatgtttatgtggtttaaagtattatttttttttggtgtatttatttaggtaagacggttaaagtgggaatttattgagattgtaataattttaaagtttatatcgtgaaattttttagttttgttattagaagtaataatttttgtaggatatataaaggtgaaatttaaaggatagggttgggcgcggtggtttatatttgtaattttagtattttgggaggttgaggtgggtggattatttgagtttaggagtttaagattagttttattaatatgtgaaattttatttttattaaaaatattaaaaattagttaggcgtcgtggtaggcgtttgtaattttaggtatttaggaggttgaggtaggagaattggtttgaatttaggaggcggaggttgtagtgagtcgagattgtgttattgtattttagtttgggtgatatagtaagatttcgtttcggaaaaaaaaaaaaaaagaaagaaatttaaaggatagaagaaaagtattaaatatttttttttaaagttattaaggtttaggtttttgaattttttattgattacggttgtatttttaaaatagggcgtatcgtgggtgatattaggtgtatggtatgaggaattggtattagaattttgtttgatcggaattagattataatatgtttgttaaatttgtttttttagaagtagtaggtttgagggttgtagtggtagaaatgtttttaaggaatggtatttatatgtcgggtaattgatgtttagagtaatttttttatagtagtcgcgatttttagtgtatgtgtgtttttgtttttttgagatagtgtttgtttttttcgtttaggttaaagtatagtggtataattttagtttaatttagttttagttttttaggtttacgttatttttttattttagttttttgagtagttaggattttaggcgtgtattattatgttcggttaatttttgtaattttttggatagaaatggggtttcgttatgttgtttacgttggttttgaatttttgggtttaagcgatttttttgtttcgattttttaaagtgttaggattataggtgtggtggtattttgtttttaaaaaaaattaattaattaaataagaaaagaaaatagtttttttttttttttgattataataatatattattaaagttattggtgtttatatggggttgaatggagttatgatggatattttatttaatgttgtttttttaatgttttaattttttataatagatttaaaaattttttaaatatatgtggttaggtacgatggtttacgtttgtaatttcgtattttgggaggttaaggtgggtggattatttgaggttaggagtttaagattagcgggattaatatggagaaattttatttttattaaaaatataaaataagtcgggcgtggtggtatatgtttgtaattttagttattttagaggttgaggtaggagaattatttgaatttgggaggtagaggttgtggtgagtcgagattgcgttatggtattttagtttgggtaataagaataaaattttgttttaaaaaaaaaaaaaaaaaaaatatgtaatcggttgtacgtagtggttttacgtttgtaattttaggatttcgggaggttgaggtaggtggattatttgagattaggagtttgggattagtttggttaatatggtgaaatttcgtttttattaaaaatataaaatttgggttgggtatagtggtttacgtttataattttagtattttgggaggttaaggcggggtggattattgagattaggagttcgagattagtttggttaaattggtgaaatttcgtttttattaaaaatataaaaattagttgggtgtggtggtgggtgtttgtaattttagttattcgagaggttgaggtaggagaattatttgaatttaggaggtagaggttgtatgagtcgagatcgtattattgtattttagtttgggtgatagaacgagattttattttaaaaaaataaaaataaaataaaatttagtagggtatggtgatgtatatttgtaattttagttattcggaaggttgaggtataagaattgttttaattcgggaggtggaggttgtagtgagttgagattatgtttgtgcgttttagtttggcgatagagtgagatttcgttttaaaaaatagaaaaatatatgtaatgttttttgttaaatattttagataatataggaagataaaacgaaataagtaatgattattttataatattatttttcgaggttattattgttaatatgggatatattttttttttttatattttttttatatattttttgtgtatgtattttttttttaaaaaaaaaaaaaatggatgataggttgtttttttttttttttttttttttttttttttggttggggggtggagttttattatttttttttttaggttggagtgttgagtgtaatggtatgattttggttttattttaatttttattttttaggtttaagtaatttttttgttttagttttttaagtagttgggattatagtcgtatattattatgtttggttaatttttgtatttttttttttttttttggtggcgacggggttttattatgttggttaggttggtttcgaatttttgattttaagtgatttatttattttggttttcgaaagtgttaaagtattgggattataggcgtgagttatcgcgtttaggtttttttttttttttttttttttgagatagtttggttttgttgtttaggttggagtgtagtggttcgattttggtttattataatttttatttcgcgggtttaagcgatttttttgttttagttttttgagtagttgggattataggtgtttattattgtgtttggttaatttttgtatttttagtagagacggggttttgttatgttggttaggttggtttggaatttttgattttaggtaattcgttcgtttcggttttttatagtgttgggattatagatgtgagttattatatttggtcgtttgttttttattttgtttgttttatttggtaatggggaatatttttttatttaatagattgatttttgaaaatattatttttgatggttttatattgttttattatgaatatattatatatttagtttattattattgaatattcgggttttgtttttgttgtttttaaaatgttatgaaggatatagtagagaatatttgtgtaattaatttgtgggtgtatttattattttgtttttgggatatattttgagaagtggaattgttgggtaattttttttaacgtatttttagagtgtttgataaatattgtttgattggtttaggaaaatgtttgttattttttatatgtagtatttgattgatttttagg

SEQ ID NO: 76 - DNA, 16720 bp, Artificial Sequence
  chemically treated genomic DNA (Homo sapiens)
tttgaaagttagttaaatattatatatgagaaatggtaaatatttttttgggttaattagataatatttattaaatattttagaaatacgttaagaggaattgtttaataattttattttttaaaatgtattttaagaatagaataatggatgtatttatagattaattatataaatattttttattgtattttttataatattttaaaaataataaaaatagaattcgaatgtttaatagtagtgaattaaatatgtggtatatttatgatagaatagtatgaagttattaaaagtgatgtttttagagattaatttattgaatagaaagatgttttttattgttaagtaaaataagtagaatgaaaaatagacggttaggtgtggtggtttatatttgtaattttaatattgtgggaggtcggggcgggcggattatttgagattaggagttttaaattagtttggttaatatggtaaaatttcgtttttattaaaaatataaaaattagttaggtatagtgatgggtatttgtaattttagttatttaggaggttgaggtaggagaatcgtttgaattcgcgaggtggaggttgtggtgagttaagatcgagttattgtattttagtttgggtaatagagttagattgttttaaaaaaaaaaaaaaaaaaaaaagtttgggcgcggtggtttacgtttgtaattttagtattttggtattttcggaggttaaggtgggtggattatttgaggttaggagttcgagattagtttggttaatatggtgaaatttcgtcgttattaaaaaaaaaaaaaaaaatataaaaattagttaggtatggtggtgtgcgattgtaattttagttatttgggaggttgaggtaggagaattgtttgaatttaggaggtggaggttgaggtgaggttaagattatgttattgtatttagtattttagtttgggagaaagagtagtgaaattttattttttaattaaaaaaaaaaaaaaaaaaaaaggaagaaaaatagtttattatttattttttttttttttggaaaaaaaatgtatatataaaaaatatgtgagaaaaatgtggggaaggaaaatatattttatattaataatggtaatttcggaaaatggtattataagataattattatttgtttcgttttatttttttatattatttaagatgtttaataaggagtattatatgtatttttttgttttttgagacggagttttattttgtcgttaggttggagcgtataggtatgattttagtttattgtaatttttatttttcgggttgaagtaatttttgtgttttagtttttcgagtagttgagattataggtgtgtattattatgttttgttaagttttgttttgtttttgtttttttgaaatggagtttcgttttgttatttaggttagagtgtaatggtgcgatttcggtttatgtaatttttgttttttgggtttaagtgatttttttgttttagtttttcgagtagttgggattataggtatttattattatatttagttaatttttgtatttttagtagagacgaggttttattagtttggttaggttggtttcgaatttttgattttagtgatttatttcgttttggttttttaaagtgttggaattataggcgtgagttattgtgtttagtttaaattttgtatttttagtagagacggggttttattatgttggttaggttggttttaaatttttaattttaagtaatttatttgttttagtttttcgaagttttgggattataggcgtgaggttattgcgtatagtcgattatatgttttttttttttttttttttgaagtagagttttgtttttattgtttaggttggagtgttatggcgtaatttcggtttattataatttttattttttaggtttaagtgatttttttgttttagtttttggagtagttaggattataggtatgtgttattacgttcggtttattttgtatttttagtagagatggggtttttttatgttggtttcgttggttttgaatttttgattttagatgatttatttattttggttttttaaagtgcgggattataggcgtgagttatcgtgtttggttatatgtatttaaaaaatttttaagtttgttgtaaaaaattaaaatattgaaggaataatattaaatgaaatatttattataattttatttaattttatgtaagtattagtaattttggtaatgtgttgttataattagagggggagaagagttattttttttttttatttaattgattgattttttttagagataaggtgttattatatttgtaattttagtattttgggaagtcgaggtaggaggatcgtttgagtttaggagtttaagattagcgtgggtaatatggcgaaattttatttttatttaaaaaattataaaaattagtcgggtatggtggtgtacgtttgaagttttggttatttaggaggttgaggtgggaggatggcgtgagtttgggaggttgaggttaaattgagttgagattgtgttattgtattttagtttgggcgaaagagatagatattgttttaaaaaaataaaaatatatatgtattgaagatcgcggttgttgtgggaaggttattttgagtattagttgttcggtatgtgagtgttattttttgggggtatttttgttattgtagtttttaggtttgttgtttttggaagaataagtttgataaatatattgtggtttggtttcggttaagtaaaattttggtattagttttttatattatgtatttgatgttatttacgatgcgttttattttaagggtatagtcgtggttaatggagagtttaaagatttaagttttgatgattttgaggggaaatatttggtgttttttttttattttttggattttttttttttttttttttttttcgagacggagttttgttgtgttatttaggttggagtgtagtggtatagtttcggtttattgtaattttcgttttttgggtttaagttaatttttttgttttagttttttgagtatttggaattataggcgtttgttacgacgtttggttaatttttggtatttttagtagagatgggattttatatgttggtgaggttggttttgaatttttgaatttaggtgatttatttattttagttttttaaagtgttgggattataggtgtgagttatcgcgtttagttttattttttggattttatttttgtgtgttttatagaaattgttgtttttagtgataaagttaaggaattttacgatgtgaattttgaagttgttgtagttttagtggatttttattttagtcgttttgtttggataaatatattaagaaagaatggtgttttgggttatataaatatcgtatttttgttagatttaattaagcgaatttttcgagatttcggtgtgttgttagaaggttttggttttgtattaagaggtttttttataattgattttaatggagttattaagtatttgtttttgtttgtttgtttgtttgtttttttgagatagtattttattttttgttgtttaggtttaagtgtagtggttaaattacggtttattgtaggtttgattttttgagtttaggtgatttttttattttagtttttagaatagttgggattataagtgcgtattatagtgtttagttaatttttatatattttgtagagatagggttttgttaagttgtttaggttggtttagaatttttgggtttaagcgatttattcgttttagttttttaaagtgttgggattataatagttgtgagttattatgttcggtcggagttatagtttttaaggttatgaaaaataattaagttgtttaagtttttatttaatgttacgaagggaaggagaattttaagagtttttttcggttttagttttgggtttaattagtagtttttttattttttttttttagtggttttcgagaatttcgtttttttagtttttttttttatggtatatggatataaggttaggtatttttttgttgattattttggggaaggagaattaaatattaaagatgggaaagtaattaaaggtttagaattttgataagtttttgtaggttgagtttttgtaggttgttattggtttagttttgattgatgaggtggtagttttgaattttatttaatttttatttttttagggttgagaatttttttatttgttttttgagattttttgttttatattaaaaagtgtatattttttgggattagagggaattgggtttattttttagagtttgtggttggttagttgttttaatttttttgaattgtatttttatttataaaaggggatgtaatgattattttttagggttgttattaagattgaatgaaatggttgtaaatttataaatatttatagtgttttattattaagggaggagattattttttatattgttttatgtttaatttttgtttttaaagaagtaaaaattaaaaggtagaaatgaaatttataggtagatagtttggcgtcgcgatttgtgtttggttaaagatcgatttttgatttaatcggttatgttatttatagattttagatatcgtatggaaaagtattgtgaaaatttttgttttgttttgtttcgttttgataattagtgtatgtagtttttagttatatattttttgtttgtttaattaattacgatttttttatgtagatttttttagagttgtaagtttttaaaagggataggaattgtttattcggggagtttagtttttggagacgtgaattttgttaaagtttttagttgaataaagtttttttttttttaattcggtgtttggggggttttgtttgcggtttattttgttatattattgtttggttttgggtgaggaggtgtagtaaggataaaggagattaatttttttttatttttataatttgtttattttttgtatttatttttgagatagggttttgtttagatttgagtgtagtggtatggttatggtttattgtagttttaattattcgggtttgagttattttggatagttgggattataggtgtgtattattacgttcggttaatttttgtatattttgtagaaataacgttttgttatgttgtttaggttggtttcgaatttttgggtttaagcgattttttagttttggatttttaaagtgttgggattataggtgtaagttattatgtttggttttttattttatttttttaagagagggggttttattttgttatttaggttggagtgtagtggtgtaattagtttattgtagtttcgaatttatggatttaagcgatttttttattttagttttttaagagtttgggattatgggtacgtgttatagtatttggtttgatttgtttattttaaaaaagtttagaggatttttggtaggtttgtttaagatttttttatgagtttggttaaatataaagatttttaggtttgggtttaaatgattaggtagatggtagatttttatgtagtgagatagagaatattgttgaataaataggagagaagagacgtgaagttttatgttgttaggtgtttttatttaatttgaagtgtttgggagttattttagaaaggatgttaggtaggtaaagttagatggggtagggatgtgggatataagaggtatttttgtggtcgggtacggtggtttacgtttgtaattttagtagattgggaggttaaggcgggtggattatttgaggttaggagttcgagattagtttgattaacgtggaggaattttatttttattaaaaatataaaattagttaggcgtggtgacgcgtgttgtaattttagttattcgggaggttgaggtaggagaatcgtttgaatttaggaagtggaggttgtggtaagtcgagtttgtattattgtattttagtttgggtaataagagagaaattttgtttttttattaaaaaaagaggtatttttgttttagatagatagttgtatgttaaggtaaatattttattagtttattagaataatttgtagtagtttgttgtgtttgggagggagattgtattagtatgaaaagtatttataataagaagttaggagaaaaagtaggaaataattatgttagtatagttggtgttgatggttgggttgttatgagtatagttcggaatggagttagatatataagggttatatgaagtgttggtgttatggggtattaattaaaaaatttgttattatggatggaataaatttagttaatatttttttagttgtgtttggttaatattttggagcgttttattataagttggttataatgattttattttatagagaagaaaattgaggtttagaaaggtgaagtattttatttaaaattggagagaggttaagatttaattagttagttagatttagagttggtcgtttttgagtgttattagaaattttttttggtcgggcgcggtggtttacgtttgtaattttagtattttgggaggtcgaggcgggcggattatgaggttaggagatcgagattacggtgaaatttcgtttttattaaaaatataaaaaattagataggcgtggtggcgggcgtttgtagttttagttattcgggaggttgaggtaggaaaatggcgtgaattcgggaggtagagtttgtagtgagtcgagattacgttattgtattttagtttggtgatagagtaagattcgttttaaaaaaaaaaaaaaaaaaaaagaaattttttttgttttttttttttttatgttttttagtagttttttagtttgtttggaattgtgtttttttttttttttttttaggaaagatagtaattttttattggtttttcggtttttatttttattttttttttttatttttaagttattcgtgattaataaatatgtgtgtgtgtatatatatatatatatatatttatttttttttgagatagggttttattttgttgtttaggttgtaggtgtagtagtacgtatatagtttattgtaatttttattttttaggtttaagcgatttttttgttttagtttttagagtagttgggattataggtatgtattattacgtttggttaatttgtaattttttttttttttgtagagataaggttttattatgttgtttaggttggttttaaattttcgggtttaagtgatttttttatttcgattttttaaagtattgggattataggcgtgaggtattatgttcggttttatttatgatttttttaaattttaaatttgaagtaagttgttggtttgtttggattttttagtggttttttttttttggaagataaagtttatattttttagttgggtattagaggtttttaatatcgggtattgatagaatttttagttttattttttatttattatatttttttttttttttttatataatttttttgttagatttattaggttagaatgttaattgttttttttatattatttgtatttttttatttggaacgtttttttattttttattttattggaagaatatttattggtgttttaaagttattttttttgattttttttttattttgaattagttattttttttgagaaattgggatagatttttggattataattattttaatttatatgtttgtttattatattaattaattttttaaaatatgagttttggggtatcggttaatttattgtattttttatatgtaaaatttttttattttttataggaagttgaagaaggtagtattgttatttttattttatagttaaggaattgaggtttagaaagataattttatcggtttaagtttatagagtaagtaaagggtagtttagaaaagtaatttaggtttatttgattgattttgaaggtagattttggtttaggtaggggttaaggtagtttgggtaggtttttttagtattttttatgtatttggttaagtttaagaagtagagagtagaagttagttgaggagaggatggtgagattagagaggagataatgaggtagttagagtttgagggaaggtggggtgggtggtgatagatttattatagatgtggggaaggatagtggcgataattttttgttgcggtggagacggtatttgagtcgtttttgagttttagaggttttttttttaaaatggaagatttgaggttttgtattgggttggtaatcgtagggaagggtaggggatggagggttattttttttttttttttttttttttttttttgaaggtggagtttcgttttgtcgtttagtttggaggtaatggcgcgatttcggtttattgtaagtttcgttttttaggtttacgttatttttttgttttagtttttcgagtagttgggattataggcgtttgttattatatttagttaattttttgtatttttagtagagacggggttttatcgtgttagttaggatggtttcgattttttgattttatgatttatttatttcggttttttaaagtgttgggattataggcgtgagttattgttttcggttagaggattattttttaaaaggtggagttttgttttcggtatttgtttgtatagtttttattgtataaatgggtcgttgtatatagattttttttattgttttgggtgtgtttttttttatttgtttttttttttttttttttgatatggagttttattttgttgtttaagttggagttagattacgattttagttattgtaattttcgttttttaggtttaagcgattttttcgttttagtttttttagtgttgggattataggcgataggttattacgtttggttaagttgtttggtatttttagtaaagacggggttttattatgtcggttaggttggttttgaatttttgattttaggtgatttgtttattttggttttttaaattgttggggttatagtcgtgagttatcgagttcggtttttttggttgtttttttaattaggtagtgagtatttgggttgggaataaggagttggtttttggtattatgtttttttatttcgttttatataatatagtttttatttttaaggagtatatagtttttgggagaagagtgagatagttatagataagtcggttatagagttagtttttattattaggtatttttgaatgtttatagttgttttttgaggtgagtagatttattttagttttatagttaaggggaagatgaggtttagggaaaggtgatttaggttatagagaggtggaatgaaattttagttttatgattatgttttattagagttggagttgttttatttttattttattttttttatttattgaagaaagtgggtaggtacgttagtttagatagtttgttcggagtttggtgtttttgttttgatttttagtgattttattatagtttcgatttttgtaaaaggagatagagtttttttaggttattgtagttgtgtttttcgttttttatattaggaggaagaatttgtttgttagattaaggttgaaaaatttttgtgtgtaaggtttttaggagggaagggaggagagggtttatgtgttaataatatatatttggtgagttgttgttatgttaggtatataggtggtatattttatattaggagttttttatttgggattttcgttttatataatttgtgtttgggtttatgtgtttattttttttgggggaagggatatataattttattgttttatgaaaattataggatattattattcgggaggttgagataggagaatcgtttgaattcgggaggtggaggttgtagcgattgagagtacgatattatattatagtttgggcgatagattaagattttgtattagaaaaaaaaaaaaaattggtcgggtgcggtggtttatatttgtaattttagtattttgggaggttgagggtaggtggattatttgaggttaggagtttaagattagtttggttaatatggtgaaatttcgtttttattaaaaaaaaaaaaatataaaaattagttgggtttggtggtgtgtttttgtagttttagttgtttagtaggttgaggtagaattgtttgaatttaggaggtggaggttgtagtgagttgagatcgcgttattgtattttagtttgggtaataagagtggaaatttcgttttaaaaaaaaaaaaattatatttttattatatgttttttattattgttttatagataaggaaattaatgttttgggggattgggtgggttgttaagggtatttgatgagaaagttgtaacgatgaatagaataggatttttgtttttgggatgtttttgaaataggagtttcgtgaatttttaatttatttgtttaggttttattttgatattttttttgggggaaattttttttgttttttttatttcgtagagttttttgagttttggtatataagacgtttcgtgattcgaggtttttgttgtattattttgttattttttttttttagttatttgtaagatttgtggtatttttgattataatatttatatttttatgtcgttgtacgtgtaatttttttgtttgtattattttaattttattatttttagattgtttgaaaaattttgtttttttaaaattttatttaagagttattttatttggaaagttatttttgagttttttgggtagggtgggggatttttttgagggttttttcgtaaatattttatatatttaatttttgttagggtatataagttatacgtggtcgaagttaggttaatatgtgacgtatgaatgatttgttagtagcgttcgtcgtttgggtttaagggtatagttcgttaatgatacgggtttgttttttttattattgttttttagtttcgtaagagagggacgtaataaatggttagtaaataatttgttgatagattgagttgttgcggtagtttaagatatacggtttttaaaggtgtatagcgggagattttcgagtttttacgatttatttttttttcgggtaagggtttttttttcgatttgtaaatcgttttttttaagcgtatgtcggataaaattatttttttcgcggtagagatttatttttcgttcgggcggtcgcgcgtaattcggttcgcgcgttcgcgtagtttgaatcgtcgttgcggcgcgtgcgcggcgtcgtgagagcgcgcgcgtagggtcgcgcggttttagtttcgagcgaggcggcgttagtcgtcgttggagcgtttcgcggggtcggggaatcgcgagttcgtatcgcgtttttttgttttcgggttttacgtggggtcggcgtcgcgcgatacgggcgagagcgggtagcgatttaggtcgcgtggatcggtcgtgtttcgttgtggttcgttcgttatcgttttttgttcggatttttcgcgcgttttaggcgagatttattttggtgtacgtcggttataaggaatttcggcgtttttcgtcgggtcgcgaattgttttagagtatgcgttttgtaggtttttggtttcgattcgggtgagaaaggaaaataaagagttcggcggtttttggcggttattttaggatttgtatgtggcgcgttttcgggttgggggagtttttggtcgggttgggggagtttttggttaggttggtttttttggttcggttttagtgggcgtgtattttggaaattttaaatcgggatacgtggattaataattagaaagattttttgagttcggtttgtttaggaaaattttgtgcggtagggtttgtacggagaaaaaagatatttattttttttatttttaagagggtatggagaaggttgaaaaattagattattaataattatataacgttatgatagggatatttagagggtatttgatttagttcggggtttaagaatagttttttaagttaagtttaggggggtaggatattttaggagaagcgacgtttgtaatgatagggaattacgagaatttagggaggttgtgggaaattgttaagtagatgggagtagagggtgtttgtgggagtgatagattatggatatagggttttgtgtgtttaaggggtttagtttttattttgaggtagtagggatatatgggaatttgggtacgggaatggtatgattagattttttttttcgtgagttaatattagatgggtatgtgtttatgttttaataaggtttgagggaggtatattttatatgcgtgtgaatatttagttatttttttatgagttataagagtattttaatatgattagattttatagaataaaatagagaatggatttggggaaaacgggagttaagtggggaggagtaagaggaatgagagagattagataaaatagaagggtgtgagttggggttgggttagagatggaaaataggtattaagaaaaggttgttttttattaatatttattttttaggatggatataaatagttttttaggattttaggtgttttttgaaatttttgtaaaggacgttttttcgattttatgttgatttagattttgagttattttacggtatttaaagtttagatggatatttttgatgagttttattaattgaattgaattttttttttttttgagatcgagttttgtttttgttattcgggttggagtgtaatggtgagatttcggtttattgtaatttttgttttttaggtttaagcgatttttttgttttagttttttaaatagttgggattataggtgtttgttataaagtttggttaattttcgtatttttagtagagattgggtttcgttatgttggttaggttgaatttttatatgtagagtttgttataaagtatttttttgtttttagggttttttatttttttaagtttatttttgtttttattatggattttttttttggatgatgtattgtgaaatttttttaatttttaattttgggatttttgatttttttttttttttttgttgtttttttttaagattttatatatttatgtagttttatgtaataataataagtgattattattattattgtttattttgtaagattttttattttgttaattatagaaatatttatgttagtttatttgttttttataaaaattttatggtagttggaagataagaaaattgaagtttaaagaggtaaagtaagttttttggggtttttatataagtggtggaaggagattttaatttttttttttttttttttgagatggggttttattttgttgtttaggttggagtgtagtggtgcgatttcggtttattgtagttagggtttaagtaatttttttgttttagttttttgagtagtttgggattatagcgtttgttattatgtttagttaatttttgtatttttagtagagatagggttttattatttttggttaggttggttttgaatttttaaacgttaggtgatttattcgttttagtttattaaagtgttgggattataggcgtgagttatcgcgtttggttattttgtgtatttttagtagagatcgggttttattatttttgttaggttggtttggaattttcgatttaggtgatttgtttattttggttttttaaagtgttgggattataggtatgagtaattgtatttggttttttatttttatttttttagttttgtatttgtatttttttattttattttgagatggagttttattttgttgtttaggttggagtgtagtggtgtaatttcggtttattgtaatttttgtttttgggtttaagtaatttttttgttttagtttttagagtagttgggattatagatacgtattattatgttcggtttatttttgtatttttaatagagatagggttttattatgttggttaggtcggttttgagtttttgattttaagtgatttatttatttcggttttttaaagtgttgggattatacgtgtgaattattgcgtttagttttagttgtttgttttaagagttttattttgttatttaggttggagtgtagtggtaggatttcggtttattgtaatttttgttttagtttttcgagtagttgggattatagatgtgtattattatgtttagttaatttttttttttgagacggagttttattttgttgtttaggttggagtgtaatggcgtgattttagtttattgtaatttttgttttttgggtttaagtaatttttttgttttagtttttcgagtagttgggattataggcgtgtattattacgtttagttaattgtttatttaatttttgtatttttggtagagatagggttttattatgttggttaggttggttttgaatttttgagttttagtagttagtttgttttggtattttaaagtgttggaattataggagtgagttatcgtaattggttgatatggaggttttggttgtaataatgtattgtgggttttataatatatataaaagtaagatatatgataatattaaagattatatagtgagaaatggaagaaatatttatttattttttcgagacggagtttcgttttgatttcgtgatttgtttgttttggttttttaaagtgttgggatggattataggcgtgagttattgtgtttagtcggaagattgttttttttttttgagatggagttttgtttttgttgtttaggttggagtgtaatggtatgatttcggtttattgtaatttttgttttttaggtttaagtaatttttttgttttagtatttcgagttgttgggattataggtatgtgttattatgttcggttaattttgtatttttagtagagacggggtttttttatgttggttaggttggttttgtattttcgattttaggtgattcgttagttttagttttttaaagtgttgggattataagtgtgagttattatattaggtcgttagaaggttttttttttgttttttttttgagacggagtttcgttttgtcgtttaggttggagtgtagtggcgcgattttggtttattgtaagttttattttttgggtttatgttatttttttgttttagtttttttagtagttgggattataggtattcgttattacgttcggttaattttttgtatttttagtagagatggggttttatcgtgttagttaagacggttttgattttttgatttcgtgattcgttcgtttcggttttttaaaatgttgggataataggcgtgagttatcgggtttcgttttttttttttttgagacggagttttgttcgtgttgtttaggcgtggtacgattttagtttattgtaatttttgtttttaggtttaagtaattttttgttttagttttttaagtagttgagattataggcgagtattattatatttggttaatttttttttttttgtatttttagtagaggtagggttttattatattggttaggttggggaagatttttatattataagtgaattggtttaatattaattgaatgtggattattgtaagttaaaaatgtataatatggttgggtatggtgatttatgtttgtatttttagtattttgggaggttaaggtgggaggattgtttgagttttggaggttaagattagttgggataatattatgagattttgtttttataaaaaatataaaatttagttagttatagtggtatatgtttgtggtttttattatttaggagatcgagttgggaggatggtttgagttaggagttttagtttaaggttgtagtgagttataattttgttattgaattttggtttgggtgatagagtgagattttgttttaaaaaaaaaaagtaaatagtttaaatattttaattaaaagatatagattgttatattgaaaaatttaatatgttatttatagaaataaaatttttaaaataagggttagggtacggtggtttagttttgtaattttagtattttgggaggttagggaggcggtattgtttgagtttaggagtttgagattagtttgggtaatatggtgaaattttatttttattaaaatataaaaaaattagttaggtatggtggtgtatgttgtagtattagttgttttagaggttgaggtatgaaaattgtttgaatttgggaggtagaggttgtagtgagttgagatcgtattattgtattttagtcgcgtaaattttatttttattaaaaatataaaaaaattagttgggcgtggtggtgcgtgattgtaattttagttatttcggaggtagaagttgtagtgagttgagatttggttattgtattttggttttggtaatagagtgagatttttgtttaaaaaaaaaaaagaggttgggcgcggtggtttatatttgtaattttagtattttgggaggtcgaggcgggtggattataaggttaggagattgagattatggtatttttttatttttataaaaaattagtagggtatggtggtaggtatttgtagttttagttgttggggaggttgaggtaggagaatggtgtgaatttaggaggcggattgtgtagtgagttaagattgtgttattgtattttagtttttggaacgtagtttttaaaaaaaaagaaa

SEQ ID NO: 77 - DNA, 8547 bp, Artificial Sequence
  chemically treated genomic DNA (Homo sapiens)
  unsure (1412, 1717)
gaggaggtagttcggaaattggttattatagagggcgaattggttagagtagaggagcgtgtagaggtgtttgaattaaaatgtggtgatttggtagaagaatttaagaatgttattaataatttgaaatcgtcggaggttgtattggaaagtattttgataaggaggataaatacgaagaaaaaattaaatttttgtttgataattgaaggaggttgagattcgtgttgaatttgtagagataatggttgtaaaattggaaaagataattgatgatttggaagagaaatttgtttaggttaaagaagagagcgcgggtttatattagatattggattaggtattaaatgaatttgattgtatataattaaaacggaagagttttgttttagtagaaatttcggagtttcgagtgtttttttttttttttgtaagaagttttttttgttattgttatttttgttttgttggaaatgttaagtaaattatgaatatatgattatatattttgtattagaagttttgagtattagttaaattttatttttttttttttttaaaaatggtattagtttttttagttttatttttttttttgcgttgtatttatttttaaggtaggtagggtattttttagtaaacgtagttttttaggatagagggcggatagttatagtggtttatatttgtatatttagtattttaggggattgaagtgggtggattatttgaggttaggagttcgagattagtttggttaatatggtgaaatttcgtttttattaaaaatataataattagtcgagcgtggtggtatacgtttgtaattttagttattcgggaggttgaagtaggagaattgtttgaattcgggaggcggaggttgtagtgagcggagattgtattattgtattgtagtttgggcgataagagaataggtaattttatattttggagaatatagattttaatatttagtaatggatttatttaaaacgttgaagaatataattatttgggttaattattggttagacgataggagagattagggattattatatgggtggggattttttatttagaggtaaaaaaaataaaaataaaataaaataaaaatggtgggtgggggtttgttgttgtgggaagttataaattatagatagattaatttaagtattttggtttttttttatattttattatgtagaataaatatttttttaagtagttagtatgagaatgttttataattatttatatattttttggatagatgtttgatgtgatgtttttttgtatattttttttattttaaagttgttttttggttaggtatagtggtttacgtttgtaattttaatattttgggaggttaaggtaggtggattatttgaagttaggaatttganattagtttggttaaaacggtaaaatttcgtttttattaaaaatataaatgttgggtatggtgatatatgtttgtagttttagttattagggaggttaaggtgggagaattgtttgaatttgggaggtggaggttgtagtgagttgagatggtattattgtattttagtttgggtgatagagtgagatattttattataagaaaaaataaaattaaaagttgttttatgaggagtaagtgttttattttaataatgatttatttatttagtaggaatatggtggagtttaaaagagggtttttttnatttttttttttataaaggaaaaagttttgttttttttttaaataaaagggggtttggttttaaaagggttcggttaaattgtggattttttttttaaagagatatggttataaggtattaataaattgagtaaaagagttttgttttattagtagaaagggtttttttggtagtagagattaaaaattggtttaattttatttttatattttaggaatagtaaattgaagttttatttatgtagaatttgaattttttttttaggattaagttgataaaagattaagaaatttttgattaaattggataatggaggattttgaagacggggttgtatattttggtttttttttattttgtttttttagttaatattttagagttgaaatattttatattttttagtagcgtgtgggggttaatttaagtttttaattttgattaaaaattattttgtttttggtttatttgaattttttatttattttattttattattttatttttatttatttagtattatattatttaggaaatatattagtaaattgtgttattgaataaaatttatattttttttaagatttttataattgtattatatgtaatagtattattttttttatattttggttaaataaatttttatataaattaaaaaaaaaagtgtaagggaaataaagttaaaatttgagtaaaagtaatttaaggtgatttttaaatataaaaatatattaataaaataaaatatgttaaaataaaagttgtaaaagaatatgtttttatttgttataatttgttggtaggatgttaaaaaaaaaatttatatttttgttaatattgtaaattgatataatttttagggaaggtaatgtggtaatatttattaaaatttaaaatatatataacgtgaagagtagttttattattagtgttattgattatggatttttgggtttttaatgtaatagaaattgatatgaagttgaaagagtttttttaaataaggttttattggaatttatgtttagatataaggaaagtagtatgagtgagagaattttttgattgatttttagaaaagagtcgtagggtttttttattaggtaaagcgtaggaattgatattagtgatagggtatggaggttgggttgggtaaggtatgtgaggggtaggagatataggttagcgtgatttggttgttatgtttattttgagtaagggttatttggtggtttggtcggaggtaataaggttgtaaattagtcgtttagtatttttttttgaggataattttggttattttttaaggttattttttggaattttttaaggaaaaatataggggattggtcgggcgtggtggtttacgtttgtaattttagtattttgggaggtaggcggattatttgaggttaggagttagagattagtttgattaatatggagaaatcgcgtttttattaaaaattaaatttaagttgggtgtgatggtatacgtttgtagttttagttgttggggaagttgaggtaggagaatcgtttgaatttgggaggtagaggttgtggtgagttaagatcgtattattgtattttagtttgggtaataagagcgaaattttgttttaaataataataatatataattattaaaaaataatttaaattatttatggttttgggaatgggggtatttataaaagttaattaagggaattaatttggtttttataaagatggttatttttgggttagtttaattattagtatttttgggtttttagtatttttttttattttttttgattgggaattacgagattatagttttatttacggaaattgagtatattagtattggttatgttgtatatatagtaaatgagagggttttatattgttataataatttgtattataattttttgtgcggtttgtttagttttaaatgatatgtttttagaggtattattatttttaagtttatggaaattatgtatttatagaaattagaattttttatattatatgttattaatgatttataatatcgatttcgtttgtattatgtagtgtttaatattttggttgtagtattatatttattaataatttgattttatgttgatttttttatttggagtattgagattttttaggtatagtgaaggtatgatttttttaaatggaagattaggagttgttttttttatgttatggtaattcgttattcggaagtatttgttgtattaatagtatttttaaagtttgtttttgtagttttgtagtatttattagaaatattttttataatgaattattgtgttggtaaatttataattggattgtcggatagtaagttttgtgaggtatttaggaaaaaagttcgcgaaatttcgagaaatattttttatttcggaatagcgttatatttttgagttatttgggatgataggggatattttggagtaggtgtattgggaagttagtgaataagaaggttaatttattagtgggtttgttagcgtagtattttaacgatttcgtagtttttaaattattggtggtttttagcgtgtcggattagttggtggtggagttggaggatagatggtagggatttgaagaaaggtgaagtgtagataggagtagagataatatgaagtttagaaaagattaattgttggacgcggtggtttatgtttataattttagtattttgggatgttaaggtgggaggattatttgagattaggagttcgggattagtttgggtaacgtagtaagattatgtttttataaaaaataaaaaattagttaagcgaggtggtgcgcgtttgtaattttagttattcgggaggtgagaagatcgtttaatttcgggaggtcgaggttgtagtgagtcgtgatcgtgttattgtattttagtttgggtaacggagcgagattttattttaattaaaaagaaaaaaatataggagagattgggttgttttgaaaagtggatttgacgggaatgtggggtttggagagattttatgttttttaagattagaaaaatattgtggtttcgtttagttttttcggaaaatacgtaggggatttaaagagcggatcgagtatttgtttgtttttttattttttagtcggtagggttttggtagcgttttgggagaatttagggaagggttttttcgtagcggttatcggaagtgacgtatttattttcgcgagaataaagacgcgcgagtatcggcggttcggaatcggttttggaataattgtggaatttgaggtcgtttgttttttcgttttatggagcggttttcggggttgcggtcgggcgcgggcgggttttgggagatgcgggagcggttgggtatcggcggtttcgggaacgtttgtttgtattagtatcgggtgaggcggggcgtgagagggagcggcggtgggttggagcggcggtgggtttgagcgtttgtggaatatagggttgatagtgtgggatagatggttggtgggattttgggtagtatttgggggttagtgggtttgtgtgtgtgtattagagagaaagatattatgtttgtgtgtttaaagttgtatttgaggtattgggtatagatagagttgttgcggggaatttgggtatgattgttaggttgtgattaggtgtttagtgagtgtgatagtgcgtgtgtgtttttgtgaatgtggagtgttagggtgtgtgaggtagatgtacgttatagtgtgtatgtaggagtacgaatgtgtgagaagagggttgaaggggattgtttttgggaatgtgtgcgttcgtgtgtgtgtgtgtgtgtgtgtgtgtgtgtgtgcgcgcgcgcgcgcgcgtttggaggttatatgatattagtggggattggagtagataaggaaggttttatgatgggtttagagttaagtttttggaagtatggatgggttttggaattggggatgtattttaggtcgggatagtatgagggtgagttggtgtagagtatggttttaaacgaaaggttatattagtagatggagatggggggcgttttagtaggtggaggatagttaatattatatttaagaattttattttgatttaatagagaatgtttaattattgtagtagtagttaaaaaattatatttgggttttgtttgtttgtttttgtttttgagacggagttttattttgtcgtttaggtttgaatgtagggcgcgatttcggtttattggagtttatttttttcgagtttaagcgatttttttgttatagttttttgagtagttgggattataggcgttcgttatcggtttggttaatttttttgtatttttagtaaagacggggttttattatgttggttaggttggtttcgaatttttgattttaggcgatttatttgttttaggtttttaaagtgtagagattataggcgtgagttacggtattaggttgggatatgtattttttgatatatcgataaaagttgtgaattttttttttagaaaaatgtatagatgtatatttatataattatgtattgttatttgagaggttcgtgtttttttaaaggatattttaggtaaatagattttggattaataatttttgtaatataggttttgttttgttgtttgtaaagtaagtatagtataataattatatgtattatggatttgagagttaaataaaatagtaatgtgtgtaaagttaaatacggtatttgatttatgaaagtttttaattgttagtatttgttgttattttgttgttgttgttgttatgattataatgttttttattaattggttttaaggaaatgttaagataaaaagtgttgttttaggaaaatggttttgtaaaggataaatttgagtggaataatatatgggataagatgaataggtaagattttattaaaatgtttgggtttggtttgtgaatagagaagttaatttaagaggaaaagtaataatttgttatttaaaggaatatgggtgtagtgagaaagttcgtaatttggggtgggagaaaggggagataggagtttattttgggaaaataggtatatttagggtaattagaatgataattgaaattgttagaattgaggaagttttgtgaattaggtttttagatagggtataggagaaaattttggagaaagagaatggaaggtgaaggattaaggtattaagttttgtgatagtaggataagtagtaaatttaataatttttattattagagggaatataatatattaaaaaaaaaaaaaagtgggagttaagtgtttttagtggtatgttgtttgtgttatttaagtttgtttattcgtttggttataaggaaaaaggatgtatgttggtagtttttgtgatttttttttttggtttttgggtggggatggatgaattaattattttttgttttattatggtaaagtatatataatataatatttattattttatttttaagtgtatagttaggtggtattaagtatattgacgttgttgtatagttataattttatttttagaatatttcgatttttttgttgttgttgtatatttataaattttttatagaatattttttgtgaaaaggtagaattttatagagttgatgaaatataaattaaggagttgaaggattttataaagtgggatttttgaaatagataatttattgttttattaatatgagtatttagggtttagtgttgtttatggttgtgtttgatttttatttttatggtggtaaaggtttgtatgggatatagatataattggttatttgtttataataaaaggaagattgaagggagtgagaattgtgggtaggttagtatgtagtttattttagttttttttttttttatgtattaggtattattttatttttagttttttttttttttttattttttaatttatattattttatttaagttatgttttgtttttttatttataatatattttttttgttttggtttttgggtttttttttttgtatttatatatagtttttattataattttggtttgtgttagagattatatatgttggaaatttttttgaattttttttgtgatattagaaatatagtgtagtttgtttagttttgattgttatttttgagttgtattattaatgttgttagaatatgatggggtttggttattttttgtaatatgtattagaatgggtttaattttagttagaattggttaaattattagttataggtaagagatgttaggtttattatgtagttatggaagtagaagtatatttattggtaggattttttttttttatgttatttgaaatgtatatattaggattggagttttttgttttaggtttggtaatattaaaatttttttttgttgtttggagtttaggaagttttgaattattttttttattttagttatgttagaagttggggtatatattagttgttttgattaagttttgaaaggggtttgttgaggagataggatttttttttttttaatattatatatgagagagagttttgaaaagatttgttataaaattagttttaggtattttttttttgtatgttgttgtgtgtttgaaggttagttttaaagtattggtgtaatagttttatggtttatttttttaaaaagtattgtattaagagagttgtggataaatatatttaattagtaaagttaaaaagttttgttgttttaagttatttttttggtagtaaataaatttttataagaatttaattttttttttttgttgattttttattttggtagg

SEQ ID NO: 78 - DNA, 8547 bp, Artificial Sequence
  chemically treated genomic DNA (Homo sapiens)
  unsure (6831, 7136)
tttgttaaaatagaaaattaatagaaaaaaaaaattaggtttttgtgaagatttatttgttattaaagaaataatttaagataataaaattttttagttttattaattaaatatatttatttatagtttttttgatgtaatgttttttaaaaagataaattatgagattattatattaatgttttaaaattgatttttaaatatataatagtatataagggaaaagtgtttgaaattgattttataataggtttttttagaatttttttttatatataatgttagaaaaaaaaagattttgtttttttagtaaattttttttagagtttaattaagataattaatatgtgttttagtttttagtataattaaaatgaagaaggtaatttagggttttttggattttaaatagtaagagaaagttttaatattattaagtttaaagtaaaaaattttaattttaatgtatgtattttaaatgatatgaagaaaaaaaattttattaatgagtgtatttttgtttttatagttatataatgaatttaatattttttgtttgtgattagtaatttagttaattttgattgaaattaaatttattttgatgtatattataggaaatagttagattttattatattttggtaatattaataatgtagtttagaaatagtagttagggttaaataggttatattatgtttttgatattataaggagagtttaaaagaatttttaatatatgtaatttttgatataaattagagttgtaataaaggttgtgtatgaatatagagagaagagtttaggggttaggatagaaaaaatatattataggtggggaagtaagatatagtttggatagggtagtgtgaattggagggtgagaggaaaaaagaagttagagataagatgatatttggtgtatagagaagaaggaaattaggatagattgtatgttagtttatttatagtttttattttttttaattttttttttgttatgagtaggtgattagttatatttatgttttatgtaggtttttattattatggaaatgagaattaggtataattatgaataatattgagttttgaatgtttatgttaatggagtaataagttatttattttaaaaattttattttgtaagattttttaattttttaatttatattttattaattttgtgaaattttatttttttataaagaatattttatgggaagtttatagatgtataataataataaaaaagtcggaatattttggagatagggttatggttgtataataacgttaatgtatttaatgttatttaattgtatatttaaaaataaagtgataaatgttgtgttatgtatattttattataataaaataaaaagtgattaatttatttatttttatttagggattaagaaaagaagttataaaagttgttagtatgtattttttttttttatgattaggcggataggtaggtttaggtaatataggtaatatgttattggaagtatttggtttttatttttttttttttttagtgtgttatgttttttttgatggtgagaattattaaatttattatttattttgttattataggatttaatgttttagttttttattttttattttttttttttaagatttttttttatgttttatttagaaatttggtttataaaatttttttagttttaatagttttagttgttattttaattattttaaatatgtttatttttttaaggtagatttttatttttttttttttttattttaaattacgagtttttttattatatttatgtttttttagataataaattattatttttttttttgaattaatttttttatttataagttaagtttaggtattttagtaagattttatttgtttattttgttttatatgttgttttatttaaatttattttttataaaattatttttttagaataatattttttattttgatatttttttaaggttaattaatgaggagtattatgattatagtagtaataataataaagtagtagtaggtgttaatagttgagggtttttatgggttaggtatcgtatttagttttatatatattattattttatttaatttttaaatttatgatgtatgtaattattatattatatttattttataggtaataaaataaagtttatattataggaattattagtttagggtttatttatttaaaatgttttttaggaaggtacgaattttttaaatggtaatgtatggttgtgtgaatgtgtatttgtgtatttttttggggaaagggtttatagtttttatcggtatattaaaaaatatatgttttagtttggtgtcgtggtttacgtttataatttttgtattttgggagtttgagataggtggatcgtttgaggttaggagttcgagattagtttggttaatatggtgaaatttcgtttttattaaaaatataaaaaaattagttaggtcggtggcgggcgtttgtaattttagttatttaggaggttgtggtagaaagatcgtttgaattcgggagaagtaggttttagtgagtcgagatcgcgttttgtatttaagtttgggcgatagagtgagatttcgttttaaaaataaaaataaataaataagatttaaatatgattttttaattgttattataatggttaaatattttttattaaattaaagtaaaatttttgagtgtgatgttaattgttttttatttattagagcgttttttatttttatttattaatatagtttttcgtttgaagttatgttttgtattaatttatttttatattgtttcgatttggaatatatttttaattttaaagtttatttatgtttttaaaggtttaattttggatttattatgaagttttttttgtttattttagtttttattgatattatatggtttttaagcgcgcgcgcgcgcgcgtatatatatatatatatatatatatatatatacggacgtatatatttttaaaggtagttttttttagttttttttttatatattcgtgtttttatatatatattgtgacgtgtatttgttttatatattttgatattttatatttatagagatatatacgtattgttatatttattaaatatttggttatagtttgatagttatatttaagtttttcgtaatagttttatttatgtttagtattttaaatataattttggatatataggtatagtatttttttttttaatatatatatataagtttattggtttttaaatattgtttaaggttttattaattatttattttatattgttagttttgtgttttatagacgtttaaatttatcgtcgttttaatttatcgtcgtttttttttacgtttcgttttattcgatgttggtatagatagacgttttcgaagtcgtcggtgtttagtcgttttcgtattttttagggttcgttcgcgttcggtcgtagtttcgggggtcgttttatggggcgggagggtaagcggttttaggttttatagttgttttaaggtcggtttcgggtcgtcgatgttcgcgcgtttttgttttcgcgagaatgaatgcgttattttcggtaatcgttgcgagaaggtttttttttaagtttttttagggcgttgttagagttttgtcggttaagggatggggaaataaataggtattcggttcgttttttaagttttttacgtatttttcgggagggttgaacggaattataatgtttttttagttttggaaaatataagatttttttaaattttatattttcgttaaatttattttttaaagtagtttagttttttttgtatttttttttttttaattaagatggggtttcgtttcgttgtttaggttggagtgtaatggtacgattacggtttattgtagtttcgatttttcggaattaagcgatttttttatttttcgagtagttgggattgtaggcgcgtattatttcgtttggttaattttttattttttgtagagatatggttttgttacgttgtttaggttggtttcgaatttttggttttaagtagtttttttattttggtattttagagtgttgggattatagatatgagttatcgcgtttagtaattagttttttttaaattttatattgtttttatttttatttatattttatttttttttagatttttgttatttattttttaattttattattagttgattcggtacgttaaagattattaatgatttaaaggttgcgaaatcgttaaaatattacgttagtaggtttattaatgaattagtttttttgtttattgattttttaatatatttgttttaggatattttttgttattttaaatgatttaagaatgtgacgttatttcggagtgaagagtgtttttcgggatttcgcgagttttttttttagatgttttatagagtttgttgttcggtagtttagttatgggtttgttagtatagtagtttattgtgagaagtgtttttaatgggtgttatagggttgtagaggtaagttttgggaatgttgttggtgtagtaagtgttttcgggtggcggattgttatagtataggggaaataatttttggttttttatttaagagggttatatttttattgtatttgggggattttaatattttaagtaaaggaattagtatggaattaaattattgataaatgtgatgttgtaattagaatgttgagtattgtatgatatagacgaagtcgatgttgtaggttattagtaatatgtggtatgggaggttttggtttttgtaagtgtatggtttttatggatttggagatgatgatgtttttgaggatatgttatttagagttgggtagatcgtatagagaattgtggtatagattgttgtaatagtatgaagtttttttatttgttgtatgtatagtatggttagtgttaatgtgtttaattttcgtaggtggggttgtaatttcgtaatttttagttaaaagaggtaggaagggatgttgaggatttagggatattgatgattgggttgatttagaagtggttatttttgtggaaattaggttggtttttttggttaatttttataaatgtttttatttttagggttatgagtaatttgagttgttttttggtagttgtgtgttgttattgtttgagatagagtttcgtttttgttgtttaggttggagtgtaatggtgcgattttggtttattataatttttgttttttaggtttaagcgatttttttgttttagtttttttagtagttgggattataggcgtgtgttattatatttagtttaggtttgatttttagtagagacgcggtttttttatgttggttaggttggtttttaatttttggttttaggtgattcgtttgttttttaaagtgttgggattataggcgtgagttattacgttcggttaattttttgtgtttttttttaaagaattttaggaagtggttttaggaaataattaaggttgtttttagaaaggaatgttgaacgattgatttatagttttgttgttttcgattagattattaggtggtttttatttaagataaatatagtaattagattacgttgatttgtgttttttgttttttatatgttttgtttagtttagtttttatattttattattgatgttaatttttgcgttttgtttaataaaaaagttttacggtttttttttggaagttagttagggaatttttttatttatgttgttttttttatgtttgggtataagttttaatgaggttttgtttgggaaagtttttttaattttatgttaatttttattgtattgagagtttaagaatttatggttagtaatattagtagtgaaattattttttacgttgtatgtgttttgaattttgataaatattgttatattgttttttttagaggttatattaatttataatattggtaagaatatgggttttttttttaatattttattaataaattatgataaataaaaatatgtttttttataatttttattttaatatattttattttgttagtatatttttatgtttgaaaattattttgaattatttttatttaaattttaattttgttttttttgtatttttttttttagtttatgtaaaaatttatttgattaaaatgtagaaaaagtgatattattatatatgatatagttgtaagaattttaagaaaagtatggattttatttaatagtataatttgttagtgtattttttggatagtgtgatgttgaataaataggagtagggtggtggggtggggtggataggggatttagataagttagaagtagggtgatttttagttagaattgaaaatttgagttggtttttatacgttgttggggaatgtgaaatgttttagttttgagatgttaattgagaaaataaagtaaaaagaagttaaaatgtgtagtttcgtttttaaaattttttattatttagtttaattaggagttttttggttttttattaatttggttttaaagaaggaatttaagttttatataagtgaaattttaatttgttatttttgaagtatggaaatgaagttgggttagtttttaatttttgttgttagagaggttttttttgttaatagaataaagtttttttgtttaatttattaatgttttgtaattatgtttttttgggaaaaagatttataatttggtcgaatttttttagggttaaatttttttttatttgggggaaaaataaaatttttttttttgtgggggggggggtnaaaaaaatttttttttgaattttattatatttttgttgagtggatgggttattattggaatgagatatttgttttttatagaataatttttgattttgtttttttttgtgatggagtgttttattttgttatttaggttggagtatagtggtgttattttagtttattgtaatttttattttttagatttaagtaatttttttattttagtttttttagtagttgggattataggtatgtgttattatgtttagtatttgtatttttagtggaggcggggttttgtcgttttagttaggttggtnttaaatttttgattttaggtgatttatttgttttggttttttaaagtgttgggattataggcgtgagttattgtgtttggttagagaataattttagaatgaaagaaatatgtagaagaatattatattaagtatttatttagaaaatatgtgggtaattatgaagtatttttatgttgattgtttgagaggatgtttgttttgtatggtggagtgtggagaagagttaggatgtttaggttaatttatttgtggtttatgattttttataatagtaaatttttatttattatttttgttttgttttgtttttgttttttttgtttttggatggaaaatttttatttatgtgatggtttttggttttttttgtcgtttgattaatggttgatttaaatggttatgttttttagcgttttaaatagatttattattagatattggagtttgtgttttttaaagtgtggggttgtttgtttttttgtcgtttaggttgtagtgtaatggtgtaattttcgtttattgtaattttcgtttttcgggtttaagtaatttttttgttttagtttttcgagtagttgggattataggcgtgtgttattacgttcggttaattattgtatttttagtaaagacgaggttttattatgttggttaggttggtttcgaatttttgattttaagtgatttatttattttagttttttaaagtgttgggtatataggtgtgagttattgtgattgttcgttttttgttttaagagattgcgtttattaggaaatattttgtttattttaggaataaatgtaacgtaaaggaaaaaatagagttgaaaaagttggtgttatttttaaaaaaaggaagaaatgagatttaattggtgtttaaagtttttgatataaaatatgtggttatgtatttataatttgtttgatatttttagtaaaataaagatggtaataataaaagaaattttttataagagaagagaaagatattcggagtttcggagtttttgttggaataaggttttttcgttttggttatatatagttaagtttatttagtgtttgatttagtgtttgatataagttcgcgtttttttttttggtttgggtaaattttttttttaggttattagttgttttttttagttttgtaattattatttttataaatttagtacggattttagttttttttagttgttagatagaagtttaatttttttttcgtatttgttttttttgttagaatattttttaatgtagttttcggcggttttagattgttagtgatatttttgagtttttttgttaggttattatattttagtttagatatttttgtacgtttttttgttttggttagttcgttttttgtgatggttagttttcgagttattttttt

SEQ ID NO: 79 - DNA, 6609 bp, Artificial Sequence
  chemically treated genomic DNA (Homo sapiens)
attacgttcggttattttttttttgtatttttagtagagatagggttttattattagttaggatggtttcgattttttgattttatgatttattcgttttagttttttaaagtgttgggattataggtatgagttatcgtatttagttaagattggttatttaaatttattgagttaaaaatgaaaaggatataatgtggtgtgacgtaaattttggtgtatataaaaattttatggggagtttgttaaaaatgtaaattgttaagttataatttttaaagtgaggattttaaaggtgtggtttagaaattttttagtttgtgtataatagattgaaaacgaatgtttttgatatggaagatagtttaaggttatatattgttttttttatttttttttttagtttatatttaaataagaggttttatattgtgagtttaagataaaattgagtttttagaataaaaagttggttaattttttgtgaaagaataaaggtaatataaaaagattaggataagtatttttttttagaattttttttttatttggttttttttattatatttttttttttttatatgttttatattttttattgatttttttttatattataggattaggttatttttttttttaagaatgaagtatttttaattatggatggtgaagtagagattagagtaaaagttagaaggaggtttaggaaaagttgtttaagattatatgttaagtttaaaagtaaaaggaattttggaagtttttaaggaaaagtttgttaatttagggaaaggtatgagtaatatttaaagtatatttagagaagaaaaagaaagaagaaaaatttttttataaaattataaaatattatgttattttttttttttttggagggtagtatgatttagaatagatttgaaatagttttttgagttttattatgtgatcgtataataagatttaaaattatatatttttaatttttttataattatagaaggtaataaagaatattgttaaaaatattttaaagtatgggtaatatagtgagattttatgtttaaaaaaaattaaaaaattatttgggtatggtggtatgtatttgtagttttagttattcgtgaggttgaggtaggaggatggtttgagttaaggaggttaaggttgtagtgagttatgattatgttattgtattatattttgggtgatagaataaaatttcgttttaaaatgcgtgtatatatatatatatatatatatatatatatatatattttattaaaaatagaatataattttgttttaaaatatatatatatatatatatatatatatatacgaatttaaaattaaaaaaaaggtgtaaaaaatttgataaaaggttgttattttttatttacgttaaatttttttttatatttgttttatattttttagttatttagacgtattaattttttttttaaatgttaattttatgtttatttaattgttttttttattatagttttatttaagagatttattattttattcgaattattttttttgttttaaattgatttttttgtttttagagtgtattttttatttaattttttttattggtaattaagtgatttttttatttatattattgtttagtttaaaatgagtaagaatttagttttttataaaatattattagacgtaatattatagttatttaattttataagtagtataatttttttttaatattttttttttttttttttgagatagagtttcgttttgtcgtttaggttggagtgtagtggcgcgtatttttaagtttacgtgtaagtttcgttttttcgatttacgttatttttttgttttagtttttcgagtagttgggattataggcgtttattattacgtttagttaatttttgtatttttagtagagatagggttttatcgtgttagttaggatggtttcgattttttgatttcgtgattcgtttttttcggttttttaaagggttgggattataggcgtgagttatcgcgttcggtcggtatttattttttaaataaattttatagtattgtaaatattttataggttggagttatattatggaagtggcgttttggtatttttaaatttagtatttataattttaattatttggaaattttttttaaggattatattatgaagttttaagttgataaggagtaagtttgtaagtttttgttatgagggtgagtgatttattttatattaattaatttattttaaagtagttatgtagtttttttttgtgtagaaaatatagtaatttattacgatgattttttgaagtattgtaatttgattttattttgttatatagtatttttttatttttattatttaaataatttatgtgttgtttagtagaaatattattattattatgttttagatatatggtttaatttagtttttaaggttagtataattatatattattatagttttaaatttttaggtttaagtgattttgtcgttttagttttttaagtaattagaatgatatatatatattattatgtttaatttttttattttttgtagaggtaggattttattatgttgtttagtattagttttaaatttttggttttaaggatttttttattttagttttttaaagtgttgggattataggtatgagttattatgtttagtttaatgagaatattatttattataaattttttagtttttaaaatttagttaagttttagttatgattataataataatgtaatatagttttgtttttttttatggtagatatttttttttttattttagagatagagttttgttttgttgtttaggttatagtgtagtggcgtgatttcggtttattgtaattttcgttttttaggttgaagtaattgttttgttttaggttttcgagtaggtgggattataggtattcggttaatttttgtatttttagtatagacggggttttattatgttggttaggttggttttgaatttttgattttatgatttattcgttttagttttttaaagtgttaggattataggcgtgagttatcgtattcggttttatattagattttaatagtttattaaataggggggttgcgtttttttatatgaattgttaagagattattaattttgttttttgttttttataatattgtatatattttttgtatatagttagtatttaataattgttgagtgattgttaagatagaagtaaaaatttaagattaatttttaatatttaggtcgggtatcgtcgtacgtgtttgtggttttagttatttgggaggttgaggtgagaggattgtttgagtttaggaggttaaggttgtagatatttatgtttgtgttattgtattatgtagtatatatttttgtgtgttatatatcgtgatttggggatattatttattttaatatatttttaattttattataattgttttttgtattttaaatttttttatttttagtgattttggattttaatagtggttaatgtttattttattatatttaggtttatatgtaaaggtatattgttttatagaaaatgaatttttggtcgagtatggtggtttacgtttgtgattttagtattatgggagagtggattatttgaggttaggagttggagattagtttggttaatatggtaaaattttatttttattaaaaatataaaaattagttaggtatggtgacgtgtatttgtaaatttagttattaggaggtgttgaatttgggaggtggaggttatagtgagttaaggtcgtgtatttgtattttagtttgggtaataaagcgagatttttttttaaaaaaaagaaaatgaatttttggttaggtatagtggtatacgtttgtaattttagtattttgggaggttgagataggtggatcgtttgaggttaggagtttgaggttaatttgggtaatatgacgaaattttatttttattaaaaatataaaaattagttgggtatggtggcgtatgtttgtaattttagttatttaggaggttaaggaataagaattgtttgaagttaggaagtaaaggttgtagtgagttagattttcgttcggttattcgtttcgtttgggagggagatgggggggttagcgtttcgtttggttagttattcggttcgggagttgaggggcgtttttgttcggtcgtttttattgggaagtgaggagtttttttgttcggttattatttcgtttgggaggtgtatttaatagtttattgagaatgggttatgatgacgatggcggttttttggaatagaaaagggggtaaggtggggaaaagattgagaaattagatggttgtcgtgtttgtgtagaaagaagtagatatgggagattttttattttgttttgtattaagaaaaatttttttgttttgggattttgttgatttatgattttatttttaattttgtgttttttgaaatatgtgttgtgtttatttagggttaaatggattaagggcggtgtaagatgtgttttgttaaatagatgtttgaaggtagtatgcgcgttaagagttattattattttttaattttaagtatttagggatataaatattttgtttaggaaaattagagatttttgtttatttgtttgtttgttgattttttttttattagtgttttatgattttgttaaatttttttttgtgagaaatatttaagaatgattaattaaaaaaaaaataaaattaaaaagaaaataataataataataaaaaaaagtttttttataaggaaagatgattaatttttatgtatcgttttagggatataaatatttaggaggttttttagaataaaagttaaattatttatgtcgtataaataaatttattattcggataaatacgatgacgaggagtttgagtatcgatatgttatgttgtttaaggatatagttaagttggtttttaaaatttatttgatgtttgaatttgaatggaggaattttggcgtttagtagagttagggatgggtttattatatgatttatgaattagaattttatattttgttgtttcggcgtttattatttaagaaattaaagaaatgaagttggtaagttattttttagttttaagttttatatagttgtttttattttttaatatttttttgataatattattatgttgtttttttgttttttattttgatatttaaaagatgtttaatatattgtttgaatgtgttggtaattgttttgttttttgagtagagttatttttattatagtttagttagatgagtgttttgtggatttatagtttaagttgagtgtgattttagaagttacgatgtgttttgtatttagaatatatttggtagatggaggaagtatttgagtttgagattatggttgttatagggattatgtaaatttgttgtttttgtttttttttgtcgggtgttgtatgtatggtgatttgtggatttatgttttagtgtattggaaattttttattttatttaagaaatttgtttatgttaaaagttttgattaaagaggaagtttttataatttaaaaaaaaaaataaaaataaaagaatatttttggggatgaaataatattagatttttatagttttattattatttatttgaatatttggattaaaatttaaaatgtttttagaaagggtgagtttttttattttgttagtaaaatattttaaaagggtagttaaataattatagaatttgttttttttttttgtggtgaagtgttagtggggaatgtagaaaaataagaagttaaatatttgtataaatattttagtaagatataagtgaataaatattaagagatgtgttattttattttaatatatttattatgtaatattttatttttaaaatttgattataatattatttttggaatatgtatttaatattgttaagtgttttattttaaagattattttagttagtttataaaagtaggttaattaataagtaaaaatagattataaagtatttaatttatttatatttaattaaaaataagtatatgataatataatttattggtaaggaaaatgaggtagttttagttttaaagagggaggatatttttttagaaattgtagaaaagaaatatatattataaattataaatagggtaataaaattaaagtatttagttatatttaaaagttataaaatatttatattttaattttggttgttattagaatatataatgttttaaattaaaattaatgttataaaaatagtattttaaaaattaattatagaggttaggcgtagtggtttacgtttgtaattttagtattttgcgaggttaaggagggtagatcgtttgaaggttaggagtttaaaattagtttggttaatatggtgaaatttcgtttttattaaaaatataaaaattagttaggtatggtggcgtgtattcgtaattttagttatttttgttgaggtaggagaattatttgaatttgggaggtgtaggttgtagtaagttaagagagttttattgtattttagtttgggtg

SEQ ID NO: 80 - DNA, 6609 bp, Artificial Sequence
  chemically treated genomic DNA (Homo sapiens)
tatttaagttagagtgtaatggggtttttttggtttattgtagtttatattttttagatttaagtgatttttttgttttagtaggagtagttgggattacgggtgtacgttattatgtttggttaatttttgtatttttagtagagacggggttttattatgttggttaggttggttttgaatttttgatttttaagcgatttgttttttttggtttcgtaaagtgttgggattataggcgtgaattattgcgtttggtttttatgattgatttttgaaatattatttttatagtattaattttaatttagaatattgtatattttaatgatagttaagattggaatataaatattttatggtttttaaatgtaattgggtattttggttttattattttatttgtaatttatagtgtatattttttttttgtaatttttaggaaagtattttttttttttaaaattaaaattattttattttttttattagtagattgtgttgttatatgtttatttttagttgagtatgaatgagttagatattttgtaatttgtttttatttattaattggtttgtttttatgagttaattggagtgatttttgagatagaatatttagtaatattgagtatatgttttagaaataatattataattaaattttgaaaataaggtattatatgataaatatgttaaaataaggtaatatattttttaatatttatttatttatattttattgagatatttgtgtaaatatttaattttttatttttttgtattttttattaatattttattataggagaggggagtaaattttgtagttgtttggttatttttttagagtattttattagtagaatgaagaaatttattttttttgggaatattttaaattttaatttagatatttaagtagatagtagtgaagttatgaaggtttagtgttattttatttttaaggatatttttttatttttatttttttttttagattataaaaattttttttttaattaaggtttttaatatgaatagattttttgaataaaatggaaagtttttagtatattgaaatataaatttataagttattatatatataatattcggtaggaaaaaataaaaatagtaagtttatatgatttttgtaatagttatggttttaaatttagatgttttttttatttgttaagtgtgttttggatatagagtatatcgtggtttttggggttatatttagtttaggttgtgggtttatagagtatttatttggttgggttatggtggaggtggttttatttaagaagtaaagtagttattagtatatttaaatagtgtattgaatattttttaaatattaaagtgagaaataagaaggtaatataataatgttattagaaagatgttaggaagtaaggatagttgtgtaaagtttgaggttgaaaagtagtttgttagttttatttttttggttttttgggtagtgggcgtcggaatagtaagatgtgaggttttggtttatggattatataatggatttatttttgattttgttgaacgttaagatttttttatttagatttagatattagatgggttttagggattagtttggttatgtttttgggtagtatgatatgtcgatatttaaatttttcgttatcgtatttgttcgaatagtaaatttgtttgtgcgatataaatgatttaatttttattttgaaaagttttttgaatatttatatttttagaacgatatataagaattgattatttttttttatgggaggatttttttttgttgttgttgttgttttttttttaattttattttttttttaattgattatttttgggtgttttttatagagggggatttggtagggttataggatattagtggagggaaggttagtagataaataagtgaataaaggtttttggtttttttaggtagagtgtttgtgtttttgggtatttgagattagggagtggtgatgatttttaacgcgtatgttgtttttaagtatttgtttaataaagtatattttgtatcgtttttaatttatttaattttgagtggatatagtatatattttagagagtatagggttgggggtaaggttatagattaataagattttaaggtagaagaattttttttagtatagaataaaatgaaaagttttttatgtttatttttttttatatagatacggtaattatttgattttttaattttttttttattttgtttttttttttattttagaaaatcgttatcgttattatggtttatttttaatgagttgttgggtatattttttagacggggtggtggtcgggtagaggggttttttattttttagtaggggcggtcgggtagaggcgttttttagttttcggatcgggtggttggttaggcggggcgttgatttttttattttttttttagacggggcgggtggtcgggcgggggtttggtttattataatttttgttttttagttttaagtaatttttgttttttagttttttgagtagttaggattatagatatgcgttattatgtttagttaatttttgtatttttagtagagatagggtttcgttatgttgtttaggttggttttaaatttttagttttaagcgatttatttgttttagttttttaaagtgttgggattataggcgtgtattattgtgtttggttaggaatttatttttttttttttgagaaggggtttcgttttgttgtttagattggagtgtaggtgtacgattttggtttattgtaatttttattttttaggtttagtattttttagtagttgggtttataggtgtacgttattatgtttggttaatttttgtgtttttggtagagatggggttttgttatgttggttaggttggtttttaatttttgattttaggtgatttatttttttataatgttgggattataggcgtgagttattatgttcggttaggaatttattttttgtaaaatagtatgtttttatatataaatttaaatataataaaatggatattaattattgttaaaatttaaagttattaaaaataaggaaatttaaggtatagggagtaattgtaatgaagttggaagtatgttaaagtaaataatgtttttaaattacgatgtgtaatatataaaagtatatgttgtatagtgtagtggtataaatataggtgtttataattttgattttttaggtttaagtaatttttttattttagttttttaagtagttgggattataggtacgtacgacgatgttcggtttggatattagggattaattttaaatttttatttttgttttaatagttatttaatagttattgaatgttgattgtgtataagagatatgtataatattgtgggagatagaagatagaattagtagttttttgatagtttatgtggaagaacgtaatttttttatttagtaagttattaaaatttgatgtggggtcgggtgcggtggtttacgtttgtaattttggtattttaggaggttgaggcgggtggattatgaggttaggagtttaagattagtttggttaatatggtgaaatttcgtttgtattaaaaatataaaaattagtcgggtgtttgtaattttatttattcgggagtttgaggtaggataattgttttaatttgggaggcggaggttgtagtgagtcgagattacgttattgtattgtagtttgggtaatagagtaagattttgtttttggggtgggggggaaaatatttgttatggaagaaaataaaattatattgtattgttattatggttatggttaaaatttagttgaattttaaaagttgaaaggtttatgatgaataatgtttttattaggttgggtatggtgatttatgtttgtaattttagtattttggaaagttgaggtgggaggatttttggggttaggagtttgagattagtgttaggtaatatagtgagattttatttttataaaaaataaaaaaattaggtatggtggtgtatgtatgttattttggttatttgggaggttgaggcggtaggattatttaagtttaggagtttgaggttgtagtgatatatgattgtattagttttgaagattgagttagattatgtgtttaaaatataataataatagtgtttttgttaaataatatatgaattatttggatggtaagggtaaaagaatgttgtgtggtaaggtgaagttaagttataatattttagaaggttatcgtgatgaattattatattttttatataaaggagaattgtatagttgttttgagatgggttggttagtgtaagatagattatttatttttatagtagagatttgtagatttattttttgttagtttaagattttatgatgtggtttttaggggaaatttttaaataattgaaattatgaatgttaaatttgagaatgttaaggcgttatttttatggtgtagttttagtttgtaagatatttatagtgttgtaaaatttatttaaaagataaatgtcggtcgggcgcggtggtttacgtttgtaattttagttttttgggaggtcgaggagggcggattacgaggttaggagatcgagattattttggttaatacggtgaaattttgtttttattaaaaatataaaaattagttgggcgtggtggtgggcgtttgtagttttagttattcgggaggttgaggtaggagaatggcgtgaatcggggaggcggagtttgtacgtgagtttggagatgcgcgttattgtattttagtttgggcgatagagcgagattttgttttaaaaaaaaaaaaaaaaaatgttaaaagaaaattgtgttatttgtaaaattaaatgattatagtgttacgtttggtgatgttttgtgaaagattgaatttttgtttattttaagttgggtagtgatatgaataaaaagattatttagttgttagtgaggaggattgggtgggggatatattttgaaggtaaggaggttagtttgaggtaaaggaagtagttcggatgagatgataggttttttgaatgaagttgtagtaaagggaataattaggtgggtatagagttgatatttaggaggagaattgatacgtttgggtaattgaaggatgtagggtagatataggaaggagtttgacgtaagtagggagtgatagttttttattaggttttttgtattttttttttggttttgggttcgtgtgtgtgtgtgtgtgtgtgtgtgtgtatgttttgagatagggttgtgttttgtttttggtggggtgtgtgtgtgtgtgtgtgtgtgtgtgtgtgtgtatgtacgtattttgagacggggttttgttttgttatttagggtgtagtatagtggtatgattatagtttattatagttttgatttttttggtttaaattatttttttattttagttttacgagtagttaggattataggtatatgttattatgtttagatggttttttaattttttttagatatgaagttttattatgttatttatgttttaaagtgtttttaatagtgttttttgttattttttgtaattgtagagaaattaaaggtatataattttaagttttattatacggttatatgatagggtttaagaaattattttaggtttgttttgaattatgttgttttttaaaaaagaagagggtgatatggtgttttgtagttttgtagaaagatttttttttttttttttttttttttaaatgtattttaaatattgtttatgtttttttttaaattagtaggtttttttttgggagtttttagagttttttttatttttgaatttagtatgtggttttaagtagttttttttagatttttttttgatttttgttttggtttttattttattatttatgattagagatgttttatttttaaagaaagagatagtttagttttataatgtggaaaggagttagtgaagaatatgaagtatgtggaagagaagggatgtaatggaaggagttaagtgaagagagagttttagaagaaaatatttgttttagtttttttatgttgtttttatttttttataaagaattggttaattttttgttttgaggatttaattttgttttgggtttatagtgtagagttttttgtttgagtatggattagggaagggggtgggaaaagtagtgtataattttgagttgttttttatgttaaaaatattcgtttttaatttgttatatatagattgagaggtttttgaattatatttttggaatttttattttgaggattatggtttggtaatttgtatttttaataagttttttatagaatttttatatatattaaagtttacgttatattatattgtgttttttttatttttaatttaatgggtttaaatagttagttttggttgggtgcggtggtttatgtttgtaattttagtattttgggaggttgaggcgagtggattatgaggttaggagatcgagattattttggttaatggtgaaattttatttttattaaaaatataaaaaaaaaatagtcgggcgtggt

SEQ ID NO: 81 - DNA, 8873 bp, Artificial Sequence
  chemically treated genomic DNA (Homo sapiens)
tttgtgataatatttgattattttgataatttaagataatttttttattttaaaatttttaatttaattatatttgtaaagttttttttgttgtgtaaggtaatatttatagatattaaagattaggatatgagtattgttgtggtttgaatgtgttttttaaattttacgtgttggaaatttaatttttaaatttatatgtttatggtatttggaggtggggtttttgggaggtaattaagattaaagttattagggtggggtttttatgacgggattgtggttttataagaagaggaagagatatttgagtcggttggtttttgttttttttttatgggatgttttttattatgttatgatgtagtagaaggtttttattagatgttgtttttttatttttgattttttagtttttaaaatggtaagaaataaattttttttttttataaattatttaggttgtggtagttttttatattaatataaaattgattaagatagatatttttgggggttatttttttattatatttatttttttatatttattttttataatttttttttttatgatttttataatttaagttaaatttatttagtattttttgtgtgtattatatttttttatatttttataattattaattttttttttggaaaggtgtttggtttttttggttttttatttgtggaattttaagagatagaatagaatagtgggtaagaggtttaattttggagttagatagtttgggtttaaatatgagtttgttatttattaggaatttttggtaaatggttttgttttgttttaatttagatttaaatgttagattgtaataaatataagaaatagaaaaattagggaaattgtattataaggaaataattatatagatttagaatgtgtaacgttttataggtaaaaatgatttggtttgatgaatagatgttaaaaaaggtggtaggggtgtgtgtggggagggtgtttatgtaggtagaggttggggggttgtttaaagaagattaaaagagataataataaaatgtggtcgggtgcgggggtttacgtttgtaattttagtatttcgggaggttgaggtagtcggattatttgaggtcgtgagtttaagattagtttgattaatatggagaaattttatttttattaaaaatataaaattagttgggtatggtggagggtatttgtaattttagttatttgggaagttaaggtaggagaattgtttgaatataggaggtagaggttgtagtgggtagatatcgcgttattgtattttagtttgggtaataagagtgaaattttattttaaaaaaaaaaaaaaaaagagagataataataaaatgtaagatgtaggtttaagtttgaaagtagggttaaataaattataaaaagttttggtgaggtagttagggaaatgtgagtttaaaatagttattaaagagtattaaggacgtttaagcgtaagtatgatgtggttatgtattttttaaaaaatttttttgagatgtatattataaatatagagatatattgaaaagttttatttaggagtgaattgatatatttgagatttttttagtaatattttagaaaaaaaaagttagagaggaatagatgaaatatgattggtaaacggtaattgttgaagttaaatgattggaataagttgagtattttttatttaaaatatttgggattagaagtgttttagggttttttggaatttggaatatgggtattttgttaattagtttagtatttttaataggaaaatttgaaatttgaagtgttttaatgagtatattttttgagtttatgttagtgttgtttaacgttttggatttttggagtattttagatttttagattaaagatgtataatttgtatatgggagttgattttattattttatgtgtttgaattttttatagtgtagatggtttttgatttataatggtttaatttaaaatttttttgattagttaggatgtaattttattgtaaattaaggagtatttatatatttatttaaaaatatattttttaggaagttttttttttttaggttttgttagaaagtaatttttttgtttattttttttaatagtttatttatatttttgttattatagtaattatatttaattatttatttttattatattgtgtttaaaatttattttttattgtgtgtttatgtgtaaggaattttgttatgtgttaggtatttcgtggtgaataagatagatatggtttttatattagttttatagagttgttttttttttttttgagacggagtttcgttttgtcgtttaggttggagtgtagtggtatagttttggtttattaatagagagtattttatagcgtagatagggagataattattatttaagtaaatatgtaattgcgatagtgggagggaagtttattggagtcggtggtaagggtataatggggaaattgaagaattttttgtagagaagttgattaaggaaggttttttagaagatgaaatgtttaatttgagatttgaaggattttattatgtatgaacgaatgtttgtgtttgtttttagttattaaattatgcgtggaaattttaggtcgggtgttgtggtttatatttgtaattttgttataggaaaggggtttagtttagattttaagggagaatttttggatttcgtgtaagaaagaatttagggtgagtttattgtgtaaaatgaaagtaagtttattaagaaagtaaaggaataaaaggatggttattttatagatagaatagtcgagggttgttggttgtttatttttatagttattttttgtttatatgttaaacgaggggtgtattatttatgttttttttttttagattatgtagggtaattttttgatgttgttatggtatttttaaattgttatggtattggtgggagtgtaatagtgaggattaaagttatttttttcgttattttggttttggtgggttttggttggtttttttgttgtaatttgttttattaataaggtttttatgatttgtattttgtgttgattttttattttattttgtgatttagaatgttttaattgtttgggaatgtagtttagtaggttttaggtttattttatttagtttttgtttaagatgaaggtgttttggtttatttgtttttgacgattttagtattttgcgaggttaaggcgggtagtttatttgaggttaggagttcgagattagtttggttaaaatgatgaaaattcgtttttattaaaaatataaaaattagttgggtttgtaattttagttgttttggaggttgaggtagaatggtttgaattgggaggatattttttttttttaagaagtgattgtattaggaagttaggaggtggggttttcgggaggtaattaagattagatggttatgagggtggggtttttatttatggagattataaatgtttttagtcggtttgttttatttgtttagaaatcggaaaagttcgtggtttgtagtgtggaaaagggtattcggattttttatttttagtttttagtttggaaattttgtttaaggtattttatttatattatttagttatagttattttgaatttattagtttgtattgcgttggagtatttcgtataaaatgaaattaatataaaaatgatacgtgttcgttgtggaaaaaatattaaaaagattatttttaattttgttatttaaaaataattattagttatatttataaattttttttagtaatttttttatatgaatatgtttttaaatttgggttaatattaaaagattagaagttgttaaatattattttaaatttttttatttaggaattagtattgttatttttggtcgtagtagaatattattttatttttttaagttttttatggtttgggtttgttttggttttgaatattaggttaggttatagaaagtattttgggtttttggtttatttgtttttttttttgtggagacggggtttggttttgttgtttaggtttgtttggaatttttgggtttaagcgatattttatttcggtttttcgagtggttgggattattggcgttcgtcgttatcgcgtcggtttcgggtttttttttacgcgtggtttcgtaggttttattttttatatagtcgtttaggggggcgttaggagtttcgcgacgggttaggtcggaagtttagtaagtgtattaggcggcgaaacggtcggttgcgtagggtagtttcggatatagttacgtcgcggtcgttcggcgttttttcgatttagtcgattacgaagtcgtttttttttttatatcgtagaatttttttgttttttattattttttaaagtggatttaggtttttggttcgagtttgaggggatataagggattacgaggagcgttattatcgtgtaaggtcgatagttttcgtttaaagttttgtggtttacgttttcggtttcgatcgattacgttattattaaatttcgtgatattttattttatttttaggtttttcgttttaacggtttcgtgttttggaattttttacgtttttgcgtacgcgttttgcggtttttaacgtttcgatttcgtttttttttggttacgtttttgttcgttaagggttttgttattttcgtgacgtatttattttttttcgggtaatttcgtaatagatttttgattggttgatttaggaagcggattttgcgaggcggcggcgacgataggttggtagtcggtcgattttcgtagaaggtgattggtcggcgttgttgtttaatcggcggcgggttgtcggatttaaattcggatcgttgggattgcggtcgttagttttcggcgagttgttgtttgggttggacgtggttttgtttgttgcgttcgtttttcgcgttttcgttttattttttgtagcgcgttagtaggatggtttataagtagatttattattcggataagtatttcgacgaatattacgagtatcggtgggcgttttttttagatttcgagtcggtttttttagtcggggttttcgcgggcggggcgatttaggtatagtagggtcgggggtgggggtcggggtttggggggcggagttcggggtcggagggcgagggtcggggtttggggtcgcggttatttggcgtttcgcgtagtcggatatggttgggtgtttggtcgcgtcgggtcggttgggtttttgttcggtgtgcgcggagggtgagggaagagtgtttatcgggtcgtatttagtatttgggtaggaatcggcgtaatttgggggttatggggttttcggcgacgcggagtgattatttcgttatttttttttcggtcgtggtcgaagtaattaggtcgtttagtagttggttttagttttagttttttgaattagtttaggaaaatttatttggtgtcgtttttttttttttagtaatcgtgatatattttttttgtcgttgacggggtgatgtagtttttattagtttgtggtttagaatggttaaatggttatttttatttgttaatatagaggaatattttttttttttttgtttttgaagtgagtggtataagaataagttttggaggcgatttttcgaaaaatgagtttgatggggattcgaaaatgtttattgggtatggtgatttgggttattataggttagtcgtagttatataattgagggtattattaaaggagttttattttaaggtcgattaagaatttgagtggattttgggtattattttttgttagtatatattggttaaattttgggttttgagaaatttttgcgtttgagttttgaagtatcgtattagaatatggtggttgtaatcgattagtaaaattagataaattttaaatgtttttgtttttttttttttaattaaagtagattgggggaaagcgagtagggatatttaaaatttgttgtttttattgtatgcgggatattttatttagggcgtggttttagaaaatagttaattttttttttttaattaggtagcgattagaacgttgcgttttgggatattattaagatttaggggagataaagtttatgttatcgttggttaaattgtgattttgttttttgtttgttgtttttgtaggttagattttttcgaatgttatttaaggaagaaagaataaaatagtgggtggtttttttttttttttttttttttagtagtatggaagtttgtttttatatgaggattattgaatatttttatgggtagtagtaattgtatttttttgtatttttagttagaaaaatagtatgtttttttggttgtaggtaaattttaagtagattgtgttaattttatagtaataataaattatattcgtgtaatatgttggtagtgtttaattatgcgatgttaattaagagttttattgaggatatttaataatgaatataatgtaaatcgtaataattttattaaaatttagaaaattattttgaaatatatttggtgttaagtgtttaggataaggatttaagggtcggtataagttttttttagggtataatattgaaaataaatgaagttattttttagatttttttttgatggtagtaggtcgattttttagttttaatatatttaaatgatttgtgtgtggtaatgtatagaagaaagtttatatatttgaagtgatgtattttaatttaataaaaattagagttggtattaattggttaagttagtaatttttatgaaataggatagtaatttttatatataattttaaaggggaaattagtaataatatagtattaaggtatgagtttagggtggtttgtattaatatgtaatggtgtagtatgtaatgtaaattttaaaggttagtatttattttttttagtgtgtagttatttttatttttttttgattttttttaattataaatttaattttttagtttttttacgtgagggttttaatgtttttaagggtataatagtgggtgtttttatttttatattatggaagtttgtttttataagagaaaaattgttaatttttttgggtagttttataaattagtaatatttgtattattttgtattttaattgaaataaacgttagattttggaaataattttttttatatgtagttagtttgaaatttttgtgtggtaaaatataggtagaatttttatatggggttgatgttatttaaatattttttttttataaagaaattttgatggaggagagtttgttttcgtgtttatggagaagggtggtaatttttatttaaataatttgttggtagatttatgtattttgtaagtttgatagaaaaggtataaaagtattatatttttttttgagaataattaataagatagaacgtagaaataagataatagattatttgaagttagatgttaaagtagtattttaagaatgtgggtgataattggtaagaattataaagaattattatatagtttattggaattgatgaaaattttataaattatggtagtaagttatgatttggtggttttaaggtaatttaataatatagtagaatttttttgaggtttattttgttttgtaaataaattggtatttaattatagattaaaatttaagttgatgatagttgggtgtttatagcgggttagggatttagtttattgtgttttagaaagtgattagattgtattttatttatttttagttagttgatttatagatagatattttatattggttaaaaatttgggttggtggttatggatggtttagtataaaattgttgttattattgtaggtggtaaatatggagttgagaattgtgatttttataaagttttttttatggtaattgagtaaaaatttttatttaatttggggaaagagatttgttaggtaaatttttgatagaatgttttgggatattgttaatgatatagatttgtttttgagaatttcgtaaggttataattatatatattgatggtttaattttgaaggttattttatgtttgtttaagaaattgaataatgtaagttttggatataggttagtaaattaattggaaaacggtgaggttgtatataatgtgtatgtatagttagtggttttttgtttttaattttgaataaagtatttgaagtataaagtaatttttggagtatataaggattagtagttattataaagttagtgttgagtaagaggaaatttaaattaattgtaatttagattttttcgttatataaaagtttaataatttggggtagggataatagttttatagttaaggattaggttgggtttttattttttgttgttttatcgtttttaatttatagttgtttttatggttttagatttttgttttggttttttgattatattaatgtgtatttaataagaaggagaaaaagagtttagtatgttttttttttttgagaatattttttataataagttatatatttttttatattttgttggtttatgatttggaggttggtaattatatgtttaatttatattttggggttttttttttgaagaagattaaggtaattggtaagtattttgtgataagagaaaaagattaattttatggaaaatgttttttgtttttggattgtgtatttttagttttttaatttgaatataggttattatattagaattaaaggtagtagattgtagtttttaatattaaagtaatagagttttttaaggtatatgtataaagcgatagttgtagaaaaggtattggattaatatttggttgtattttgtaatagg

SEQ ID NO: 82 - DNA, 8873 bp, Artificial Sequence
  chemically treated genomic DNA (Homo sapiens)
tttgttataagatatagttaagtgttagtttagtgttttttttataattgtcgttttatatatgtattttaaggaattttgttgttttaatattgagaattgtaatttattatttttaattttgatatgatggtttatgtttaaattagggagttaagagtgtataatttaaaagtagaaagtattttttataggattaattttttttttttattatagaatgtttattagttgttttaattttttttaggaagagaattttaaaatataagttgaatatatggttattagtttttaaattataagttaataagatataagaaaatgtgtaatttattatgaaaagtgtttttaaagggaaagaatatgttgaatttttttttttttttttgttgaatgtatattaatatgattagggagttagagtaggaatttaggattatagaagtaattgtaaattgagaacggtaaagtaataagaggtaaggatttagtttagtttttgattgtaaagttgttatttttgttttagattattagatttttatgtaacgaaaaaatttaagttatagttaatttgggtttttttttatttaatattagttttgtagtagttattagtttttgtatgttttagaagttgttttatattttaagtattttgtttaaaattaaaaatagaaaattattaattgtatatatatattgtgtgtaattttatcgttttttagttaatttattgatttatatttaaaatttatattgtttagttttttaggtaagtatggaataatttttaaagttaaattattaatatgtataattgtagttttacgagatttttaaaaataaatttgtattattaatagtattttaaagtattttattaaagatttgtttaataaatttttttttttaaattgagtaagaatttttatttaattattataaaaaggattttatgaaagttataatttttagttttatgtttattatttgtagtagtagtaatagttttatattgaattatttataattattaatttaaatttttaattagtataagatatttgtttgtgagttagttggttggggatgaatgaggtgtaatttggttattttttgagatatagtaaattgaatttttaattcgttataagtatttagttgttattaatttaaattttagtttgtggttaagtattaatttatttgtagggtaaagtgagttttagaaaaattttattgtgttgttagattgttttaaggttattaagttatagtttattattataatttgtagagtttttattaattttagtgaattatatagtgattttttgtaatttttattagttattatttatatttttgaaatgttgttttaatatttaattttaaataatttgttattttatttttacgttttattttgttgattatttttaaagagaaatgtagtgtttttgtattttttttattaaatttatagagtatataaatttattaataagttatttagatagaagttattatttttttttataaatacggaaataggtttttttttattagggtttttttataaaggaaaaatgtttaagtagtattaattttatatgaggattttatttgtattttgttatatagagattttaaattaattatatgtaaggaaaattatttttaaaatttaacgtttattttagttgaaatgtaaaatagtgtaagtattattaatttgtaaggttgtttagaaaaattaatagttttttttttgtgaaaatagatttttatgatgtgggggtgggggtatttattgttatgtttttagaaatattaagatttttacgtaaaaggattaggaaattaagtttgtaattaagaaaaattaaagaaagatagagataattgtatattgggaaaaataaatattagtttttgaaatttatattgtatgttgtattattatatattaatataaattattttagatttatgttttagtgttatattattattagttttttttttaaaattatgtgtggaaattattattttgttttataaaggttattggtttggttaattaatattagttttaatttttattggattaaaatatattattttagatatgtaaatttttttttatatattattatatataaattatttgagtatattaaaattaaaaaatcgatttattgttattagaaagaagtttgagaaatagttttatttatttttaatattatattttaaaagaaatttgtatcgatttttaaatttttattttaaatatttggtattagatgtgttttagaataattttttaggttttagtaagattattacggtttatattgtgtttattattggatatttttaatagggtttttgattaatatcgtataattgaatattgttagtatattatacgagtatagtttattattattataaggttaatataatttatttgaaatttatttatagttagaaaaatatgttatttttttagttaggaatataaaagggtgtaattattattatttatagaaatatttagtagtttttatgtgaaaatagatttttatgttattagggagggggagaaaaagagaaattatttattgttttgtttttttttttttaaatagtattcggagaaatttaatttataaaggtagtagatagaaaataaggttataatttggttaacgatggtatgggttttattttttttaaattttggtagtattttagaacgtagcgttttagtcgttatttagttaagaaaaaggggttgattgttttttgaagttacgttttaaatgaagtgtttcgtatatagtaaggataataaattttaaatgtttttattcgtttttttttaatttattttaattggggggaaggggatagggatatttaaaatttgtttaattttattgatcgattatagttattatgttttagtacggtgttttaggatttaaacgtaaaagttttttaaagtttaaaatttggttagtgtatattagtagaaaatgatgtttaaagtttatttaagtttttaatcggttttaaaatgaaatttttttaataatatttttaattgtatgattgcggttaatttataatggtttaaattattatatttagtaaatattttcgaatttttattaagtttatttttcggggggtcgtttttaaagtttatttttatattatttattttaaaaataagaaaaagaaaagtgtttttttgtgttaatagatgaaaatgattatttgattattttaaattataaattagtaaaagttgtattatttcgttagcgatagggaaagtgtgttacggttgttaaaggaaaaaggacggtattaggtgggtttttttggattggtttaaagaattggaattgagattagttattgaacggtttaattatttcggttacggtcgagaaaaaagtgacgggatggttatttcgcgtcgtcgaggattttatgatttttaagttgcgtcggtttttatttaggtattaaatgcggttcggtgggtattttttttttatttttcgcgtatatcgaataaaggtttaatcggttcggcgcggttaggtatttaattatgttcgattgcgcggggcgttaggtggtcgcgattttaaatttcggttttcgtttttcggtttcgggtttcgttttttaggtttcggtttttattttcgattttattatgtttgggtcgtttcgttcgcgggggtttcggttgagggagtcggttcggggtttaagaaaggcgtttatcggtattcgtagtgttcgtcgaagtatttgttcgagtagtagatttgtttgtgggttattttgttggcgcgttgtagaaaatgaaacgagagcgcgaagagcgggcgtagtagataaaattacgtttagtttaggtaataattcgtcggagattaacgatcgtagttttaacgattcggatttgaattcgatagttcgtcgtcgattggatagtagcgtcgattaattattttttgcggaagtcggtcggttgttagtttatcgtcgtcgtcgtttcgtaaagttcgttttttgggttagttaattagagatttgttgcgaggttgttcgagggaagataggtacgttacgggggtggtagggtttttaacgggtaggggcgtggttagaggagggcgaagtcgggacgttaagggtcgtagagcgcgtgcgtaggaacgtggaaagttttaggatacggaatcgttgggacggaggatttgaaggtggagtgaggtattacggggtttggtgatgacgtagtcggtcgaggtcggaagcgtgggttatagggttttgagcggaagttgtcgattttgtacggtgatggcgtttttcgtgattttttgtatttttttaggttcgagttaggagtttaggtttattttgaaaagtagtaaaaggtagaaaggttttgcggtgtgagggggagggcggtttcgtggtcggttgggtcgggggagcgtcgggcggtcgcggcgtggttgtgttcggggttgttttgcgtagtcggtcgtttcgtcgtttggtgtatttgttgagttttcggtttggttcgtcgcggggtttttggcgtttttttagacgattgtgtggagaatggagtttgcggagttacgcgtagagagaggttcggagtcggcgcggtggcggcgggcgttagtggttttagttattcgggaggtcgaggtggagtgtcgtttgagtttaggagttttagataggtttgagtaatagagttagatttcgtttttataaagaaagaaataaatgggttagagatttagaatgttttttgtagtttaatttaatgtttaaaattagggtagatttaagttatggaaagtttgagggaataaaataatattttgttgcggttaagaataataatgttaatttttggataaggggatttaaaatgatgtttaataatttttggttttttaatattgatttaagtttaaaaatatgtttatataaaaaagttattggaagaaatttataaatgtaattggtggttatttttagatgatagaattaaaagtgatttttttggtattttttttataacgagtacgtgttatttttatgttaattttattttatgcgaaatgttttagcgtagtataggttagtgggtttagggtggttgtgattaagtaatgtagatggggtattttagataaagtttttagattagaggttggaagtaagaggttcgggtgtttttttttatattgtagattacggattttttcggtttttgaataagtgagataggtcggttaaggatatttataatttttatgggtgagggttttatttttatgattatttaattttgattatttttcgaaggttttattttttaattttttaatataattattttttgggggaagagggtgtttttttagtttaagttattttgttttagtttttagagtagttgggattataggtttagttagtttttgtatttttagtagaaacgggtttttattattttggttaggttggtttcgaatttttgattttaagtgaattgttcgttttggtttcgtaaagtgttgggatcgttagaggtaagtgaattagagtatttttattttaaataggagttgggtaagatgagtttaaaatttattgggttgtatttttagatagttaaggtattttaagttataggatgaaatgggaggttagtataaaatataggttataaagattttgttgatgaaataggttgtagtaaaggagttagttaaaatttattaaaattaaaatggcgaagagagtgattttggtttttattgttatatttttattagtgttatgatagtttagaaatgttatggtaatattaggaagttattttatatggtttaaaaaggggaggtatgaataatatatttttcgtttagtatataagtaaaaaataattataaaaatgggtaattagtagttttcggttgttttgtttatggagtagttatttttttatttttttatttttttaataaatttatttttattttgtatagtggatttattttgaatttttttttgtacgagatttaagaatttttttttgggatttggattggattttttttttgtaatagaattataggtatgagttataatattcggtttggaatttttacgtatgatttggtggttgggagtagatataaatattcgtttatatatgatagaattttttaggttttagattaagtattttattttttgaaaggttttttttaattaatttttttatagaaagttttttaatttttttattatgtttttgttatcgattttagtgggttttttttttattgtcgtaattgtatgtttgtttaggtggtggttgtttttttatttgcgttataaaatattttttgttagtgagttaagattgtgttattgtattttagtttgggcgatagagcgagatttcgttttaaaaaaaaaaaaaataattttgtgaagttagtgtagaggttatgtttgttttgtttattacggagtgtttagtatatagtagagttttttgtatataagtatataataagaagtaaattttaggtatagtataataagagtaaataattaggtataattattatgatggtaaaaatgtgaataaattgttaaggaaaatggataaggaaattattttttggtagaatttgggggaaaaaaattttttgggagatatatttttaaataaatgtatagatgttttttaatttataatgggattatattttgattagttaaaaaaattttaagttgaattattgtaagttaaggattatttgtattgtgaaaagtttaaatatatggaataatagaattaatttttatgtataggttgtgtatttttaatttgaaaatttgaaatgttttaaaagtttaaaacgttgaataatattgatatgagtttaaaggatatgtttattggagtattttagattttagatttttttattagagatattgaattggttaataaaatgtttatattttagattttaaaaaattttgaaatatttttggttttaagtgttttgggtaagggatatttaatttgttttagttatttagttttagtaattatcgtttgttaattatgttttatttgtttttttttaattttttttttttagaatattattgaagagattttagatatgttagtttatttttaaataaaattttttagtgtatttttgtgtttatggtgtgtattttaggaaaattttttaaaaaatgtataattatattatatttacgtttagacgtttttaatattttttgatagttgttttagatttatatttttttgattgttttattaaagttttttatagtttgtttaattttgtttttaaatttgggtttatattttgtattttgttattgtttttttttttttttttttttttgagatggagttttatttttgttgtttaggttggagtgtaatggcgcgatatttgtttattgtagtttttgttttttgtgtttaagtaatttttttgttttagttttttaagtagttgggattataggtgttttttattatgtttagttaattttgtatttttagtagagatggggtttttttatattggttaggttggttttgaatttacggttttagatgattcggttgttttagtttttcgaagtgttgggattataggcgtgagttttcgtattcgattatattttgttattgttttttttagttttttttaaataattttttaatttttatttatatagatattttttttatatatatttttgttattttttttaatatttgtttattaaattaggttatttttgtttgtggaacgttatatattttggatttgtgtaattgtttttttgtggtgtagtttttttggtttttttattttttgtatttgttataatttggtatttagatttaggttaaaataaaataaaattatttattaaaaatttttagtaagtggtagatttatatttgagtttaaattgtttgattttagagttaggttttttatttattattttgttttgttttttagagttttataggtagaaagttaggagggttaagtatttttttaaaggaaggattggtagttgtaaaggtgtgaggaagtgtggtatatatagaaaatgttgaataggtttggtttagattgtaaaagttatggaaaggaaagttgtgggaagtgaatgtaggaggatgaatgtggtagaaaaatggtttttaaagatgtttgttttagttaattttatgttggtataaaggattattatagtttgggtaatttataaagaaaagaaatttattttttattattttggaggttgggaagttaaaggtagaggggtaatatttggtgaaggttttttattgtattataatatggtggagggtattttatggagggagggtaagggttagtcggtttaggtgtttttttttttttttataaagttatagtttcgttatgggagttttattttgatgattttaattttaattattttttaaaggttttatttttaaatattataaatatataaatttggggattaagtttttaatacgtgaaatttgggggatatatttaaattatagtaatgtttatattttaatttttggtatttgtgaatgttattttatatagtaaaagagattttataaatgtgattaaattaaggattttaagatagggagattattttggattattagagtggttaaatgttattatagg

SEQ ID NO: 83 - DNA, 2354 bp, Artificial Sequence
  chemically treated genomic DNA (Homo sapiens)
ttttagggtttcgggttgggggggtggagtagtatttcgtcgtcgcgggggtgtcgggatttcggtcgtagtgtcgtcgttattacggattttttgtgggataagcgtacgggtttcgtcgttagaacggtgagcgcgcgggttggttggtcgcgcgaaaagatggcgatcgcggggcgggcggggttaggtttgggttgggggtaagggacgggggcgagatttggagaggaggagagttgagatttacgaagcgacggagtagggagatgagggggaaggaggtcggtttgcgttagatgtattaagaagatttgtaggaagtttgggcggaattagattagaagggatgatagagtaaggatgggagtggttttagagatgtgaaggagtggaatattaaagttggattcgggtttaattaaagttggaggggaggaatatattatcgtgttatttggaatatgtaggaagaatttgtttgtaggagttttggattttttgagtaagaaaggaaaaagtaaaagattttaaatttgagaaaggtaggttagtgatgttttgaggggatagtgttgtgaggtcgtttgatggtagtatgtggtgagatggtatttatgtggttatgttgattaggataattatgttgggaaaattttgtgtttgtagtttggtatgttatcggttttagttatattaagaatgtattaaatattattttttttaatttggggaggttgggaagaagtgtatatagaatggtggttagatatcggaattattaaattttttgtatacgcgatttttatatatttttattaagatttatgtttttgggtttgttttattttattgtgtttttttatttttatttttttggattgtgatagtgattttttttttttttttttgaaggaaaaaaaggatttgtgaattattttattttaattttattaattggaaggtggttagttgttagttaagtagggttgatattaattaaaaattatttattggttaggcgcggtggtttatatttgtaattttagtattttgggaggttaaggcgggcggattatttgaggttgggagttcgagattagtttgattaatatggagaaattttgtttttattaaaaatataaaattagttgggcgtggcggcgtatgtttgtaattttagttattcgggaggttgaggtaggagaatcgtttgaattttgtaggcggaggttatggtgagtcgagattgcgttattgtattttagtttgggtaataagagtaaaatttcgtttttaaaaaaaaaaaaaaaaatataagaaatagttgttatttacgttttaagtataagagtggaggggttagatgggatgttgattgtattttgtggtttattatattaaaattttttaagggagagttggttaaagatgtgagagatgattaagttaatttaaggggttcgatttagatttttggagttgatagtatttggcgtttatttggtatatgtagaaatttgggagattggatttttatttttaggatattgatagtttatttgaggagatgagatgtatttttaatgagtgtataatatttattataattgtaaattaaagttttattttattgatttgtgaggaatttagtattatatagatttatattttagattttgaacggggatatattgtggtagtttttatcggtcgttatatattttgttttgtagtgaattgtgttttagatttgaaggtttttatggagttgtgtttgaagaaaataaggatagaatatttgaattggttgggtgcggtggtttacgtttgtaattttagtattttgggaggtcgaggtaggaggattacgagttaggagtttgagattattttggttaatatggtgaaatttcgtttttattaaaaatataaaaattagttaggagtggtggtgcgtgtttgtaattttagttatataggaggttgaggtaggagagttgtttgaatttgggaagtggaggttgtagtgagtcgagattgtgttattgtattttagtttggttatatagcgagattttgttttaagaataaaataagaatatttgaattgaggggtgggtaatgagggatgggtttgggggttttttagagttttagttagagttagtaggtggttgtattttaataaggaggaattgtaagtatagaggaagattgaggaagttgtgtttggtaaaaagaggtagaaataagaggggaaagtagtttagtatttttggagtagttagtttttggaggagatttttgaaaattcgaaatttttttattttcgtttttttttgttttttaga

SEQ ID NO: 84 - DNA, 2354 bp, Artificial Sequence
  chemically treated genomic DNA (Homo sapiens)
tttggaaggtaagggaaagcggaaataggaaagtttcgagtttttagaaattttttttaaggattggttgttttaaagatgttaagttgttttttttttttatttttgtttttttttattaggtataatttttttagtttttttttgtatttataatttttttttattggagtatagttatttattaattttggttgaaattttagaaagtttttaaatttattttttattatttattttttagtttaagtgtttttattttatttttgagatagagtttcgttgtgtggttaggttggagtgtagtggtataatttcggtttattgtaatttttattttttaggtttaagtaatttttttgttttagttttttgtgtagttgggattataggtacgtattattatttttggttaatttttatatttttagtagagacggggttttattatgttggttaggatggttttaaatttttgattcgtgatttttttgtttcggttttttaaagtgttgggattataggcgtgagttatcgtatttagttagtttaagtgttttatttttattttttttaaatatagttttatgaagatttttaggtttaggatatagtttattatagagtaaagtgtatgacgatcgatggagattgttatagtgtattttcgtttaggatttaagatatagatttgtgtgatgttgagttttttataagttaatagagtaaagttttggtttatagttatgataaatgttgtatatttattaagagtatattttatttttttaagtagattattagtgttttgagggtaggaatttagttttttaggtttttatatatattaggtaaacgttaaatattattagttttagggatttgggtcgggttttttgaattaatttaattattttttatatttttggttaatttttttttgagaggttttaatgtagtaggttataaaatatagttagtattttatttggtttttttatttttgtgtttaagacgtagataataattgttttttgtgtttttttttttttttttgaaaacggagttttgtttttgttgtttaggttggagtgtaatggcgtaatttcggtttattataattttcgtttgtagggtttaagcgatttttttgttttagtttttcgagtagttgggattataggtatgcgtcgttacgtttagttaattttgtatttttagtagagatagggtttttttatgttggttaggttggtttcgaatttttaattttaggtgattcgttcgttttggttttttaaagtgttgggattatagatgtgagttatcgcgtttggttagtaagtggtttttaattaatattagttttatttagttgatagttggttattttttagttaatggaattggaatgggatggtttataaatttttttttttttttaaggaaaaaagagaaaaattattgttataatttaggaagatgagaataggaaggtataataaaatgaaataggtttagggatataagttttggtgggggtgtatgagaatcgcgtatgtaaaaggtttaatgatttcgatgtttgattattattttgtatatatttttttttaatttttttaaattgaggagggtggtatttgatgtatttttggtgtaattggggtcggtagtatattaagttgtaagtataagatttttttagtatagttattttaattagtatagttatataaatgttattttattatatattattattaaacggttttatagtattgtttttttaaaatattattagtttattttttttaagtttgaaattttttgttttttttttttttatttagaaaatttagaatttttataggtaaattttttttgtatgttttaagtgatacggtgatgtattttttttttttagttttgattggattcgagtttaattttgatattttatttttttatatttttggaattatttttatttttattttattattttttttagtttggtttcgtttaagttttttataggtttttttggtatatttaacgtaggtcgattttttttttttttatttttttatttcgtcgtttcgtaggttttaattttttttttttttaaatttcgttttcgttttttgtttttaatttaagtttaatttcgttcgtttcgcggtcgttattttttcgcgcggttagttaattcgcgcgtttatcgttttggcggcgaggttcgtgcgtttgttttataggaagttcgtgatggcggcgatattgcggtcggagtttcggtattttcgcggcgacgaaatgttgttttatttttttaattcgggattttggga

SEQ ID NO: 85 - DNA, 7913 bp, Artificial Sequence
  chemically treated genomic DNA (Homo sapiens)
tgaatttttgggtttaagaaatttttttttggtttttaaaagtgttgggattataggtgtgagttattatgttttgtttgaaatttttaatataaaaaaaattgttagatgtggtggtttatatttgtaattttagtattttgggaggttgacgtgggtggattatatgaggttaggagtttgagattagttaagttaatacggtaaaattttatttttattaaaaatataaaaattagtttggtatggtggtatgtattcgtaattttagttttttcggaggttgaggtaggagaatcgtttgaattcgggaggtagattttgtagtgagttgagatcgtgtcgttgtattttagtttgggcgatagagtgagattgtgtttggaaaaaaaaaaaaagaaagaaagaaaagggaaaaaaaattagaaaaattttaattatttttattttattttttatttttgaaatggagttttatttttgtcgtttaggttgaagtataatgatacgattttagtttattgtaatttttgttttttaggtttaagtgagttttttgttttagttttttaagtagttgggagtataggtatgaggtattatattcggttaatttttgtatttttagtagtgatggggttttattatgttggttaggttggttttaagttttcgattttaggtgtttttatttgtttcgttttttaaagtgttgggattataggtatgagttattatattcggttagaaaaattttaattatatttgaaatttatttatattattataagaaatttatatatattaatgaaaaaaaaaagagatattgaatttttagaatttaattttaaattgtttataatttaagataataataatagttgtaaatgtattatttacgtgtttgtatagttttttatttgaaagttattattaaaagtataaagaagttgttgttgaaatttttaatttgtatagttgttttaatatgaaattataaagaaaaagttatgattatgaaattaggtttaagttttttttaattttaaaaatattttatttaaagttttatttaaattatttatttttaatattttgtattttattgtttttttttaataaaaaataatatattttcgttaagtgatttatagttatgtttttaatttattgtagttattttatttataaaattttatattttatgaatataaaaaattgagaaataatgttttatattatattaattagtttagagtataattgtggttatatcggttaatgggttaatagggttatttatttattgttaataattttttttttgtgagtaaaataatttggatttttaaattataaattataaatttattaatgttttaatttatgagatggagtaagtttttttaggtaaattgtaatcggttatagttttatttgtaaatgtattttgtttgttttaaatagtttttagagagttgtttcgtaatgtgttttaggattatttttagaataattttttatggttgtgtgtattgtggtttaagggattttttattggtaggtttaaaatttatttagttcgtttttagaagagtaggattgtttttgtaagtttgtataaaaaataaaaagttagattagaaaaatgtaaggagtttaggtaaggtggtttacgtttgtaattttagtattttgggaggttgaggcgggtagatcgtttgagtttagaaatttgagattagtttgggtaatatggtaaaatttcgtttttaacgttatttaaaatataaaaattagtcgggtgtggtggtatgcgtttgtagttttagttatttgggaggttgaggtgggaggattatttgagttagggaggtggaggttgtagtgagttgagatcgttttattgtagtttagttagggcgatagatttagaatttgttttaaatatattatatatatatatatatatatatatatatatatatatatatatatagggagtttatagattttttttttttttttagttgtttttttttttttggtttttttgttaaaaattttatatacgtttttaagtaaaattttttaatttattttaatagatgaatttgttttggattaagttagaagtaagagagaattttgttagattagttattttattagttttttaaaatgtagttatatttgggagatttttgtgtaggaagtaaggttaataatgtagtttttagaagattaggtgtggttttaatgagtttatataaggcgggtggggaggggagtggttttatggttttatttttaaaattcgtgtaaagattattttttgttgtttaaatacggtagtagagaaagagacgtttttgttttttacgttataattagaggtaataatttgtgttaatttggtttttagcgaaaaggttaaaagtgtattgataatttcggttttagttgagattgggataattcgtttgagttagtgttaaattttatttattcggcgcgtaagcgagcggggttttttttttttaatttcggtttaggttgtttttgtcgggttagtgttgtcgggttggtggaagttgttttttttttttttaagattagaaaggcggagggtttaggaaggggtttttttttaggtgtaagggattgtttggatatttggagggaatggtaaagttttgttttatgaggtgaatgaatataaattaaatcgttttcgtatttaaaataatttgacggatgatagtgtttatttagttaatcggttttcgacgttggatttgttatttgggtttgttgtttgcgagttaaggttttgtaaaaagtttttggtttgttattttaattaatttattttttttagtaatttttttaatatattttcgggttgtattgtaatttattttttatagtagaaatgtggagggttttagagaaggtataaggtaaattttttttttaaattttatttttggttggtcgcggtggtttacgtttgtaattttagttttttgggaggttgaggcggacgaattatttgatatcgggagtttgagattagtttgattaatatggagaaattttatttttattaaaaatataaaattagtcgggcgtggtggcgtatgtttgtaattttagttattcgggaggttgaggtaggagaatcgtttgaattagggaggcggaggttgtggtgagtttagatcgttttattgtattttagtttgggtaataagaacgaaatttagttttaaaaatttttttgttttattttattttttaaatttgagataaggtttcgttttgtcgtttaggttggagtgttatggcgtaattatagtttacggtagattcgaattgttgggtttaagggatttttttattttagttttcgaggagttaggatgatacgcgtgagttattatgtttggttaatttttagattttttgtagagacggggtagttatgttgtttaggttggtttttaatttttgattttaagtgattttttcgtttcggtttttaaagcgttgggattataggcgtgcgtaatcgcgcggaggtaatttagaaattgtagagggagtacggatttgggtattgggaagaatagggcgtggatttggagtgtgatcgcgtttgaatttgggttgtgtttgggatattttattttttgggtcgtaggtggggggggagagagagagagagagagagagagagagaggatgtcgattttatatggtttttagtttttcgcgttttagtcgaatgtttggtttttagtgggtgtttgatacgtgggaaatgtagggggagggggtggcggggtattgggaatgtttcgtagagtggatttcgggagagtggcgtttttttttagaattttttttcggttatatttggagtaaaagtttgatattttagaaggaaaattttagatgagtagttaggattgagggttagcggtaggcgggagcggggagatagtataagtacgttttttaatgaggcggtgtcgtaaaataattaattttaataaagattgtagagaagaaaattaggttttgttggcggagtgtataggtttttagtcgagcgtttaataattaggtttcgggtttattttgtcgtagttttttggaaatttttaagttggaatgtgtgcgtgcgtattacgggttattgttttttttgtgtgtgaatttgaagcgaaatttgggcgaggcggggtcgtgttattagtaatcggatttatagtcgcggttttaagaagtttcgaagttttttcggtttttcgtagtattgttgggagggtatacggcgtttttgtttttattttagagcgtggggcgcgcggaaaaaggtttggtgattgtttttttcgtcgtttttcgggagcgtgttttttcgtcggattttgggattttagagaagcgtcgagggcgcgagtatattaagatatacgattttttttggggatcgggaagggtataattattttttgtaatttcgttattaagacgttttgggttattaggttcgggggaaaattcgttttcgttttaggttttcgattcgggtcgtagtttacgtttcgcgtttttttttgcgcgtcgttttgtttttttttagtttcgtttttagtttcgttcgggcgtttagagggtaaatgaggggcggcggggtggcgggtgggggggagacgcggaattttttagcgcgggggttttggtttattttgtaatcgggtagtttttttttgtttacggagagaaaggggaaatggaaaagtcggggaggcggtggttggcgttcgttgcgtcgtttttgggtaggtttagacgtcgtgagttaggggtagagtagggcggtttgagcgtgcgggcgacgcgggttttattcgttcgtttcgttttggattgcgcgttacgttttggggttcggcgttttggtttttgtttttgtcgttgtcgtcgtcggattttagtggttcggcgtgttcggtttttataggtttgtagttagtatcgtatcgaattttcggggggtcgcggttggagcgttcggtcggcgtgggagcgttaaggtcgtaggtaatttagggttgggggttttcggcgtgtttttcgggtcgcgtttcgtttgggtgtttcggggatttttatgtagaaatggagggtgtttttagtagaggggaaaattttggcgtgggaagaggtgggggcgtgtttatagttgcgttcgcgggtcgtcggttgtattaggtatagttggaaagtattttgcgtaagggttttacggggtgtagattcgcgattttttttttttttttttttttttcgtattcgtagcgttagggtagtgttggtttgggtagtgcgcggggaagcggggattcgttgttattgcgtttttcgttgtcgacgtcgtttggacggtcgtattttttttgttcgagattcggtgagtgtagttcggaggttggaggattcgatttttttaaatgttgggtgttttgataatttataagttttttaggtttttttgatttagagaattaggaggaaaggagtgggagtgtgggttggcggagtttagagatttgtgaatggttggaattaaatttaagtttgtaattcggattttattttatgattaaagaggttatagtagaatacgaaggttgggtttttggtttaagaaagaatattaggagaaaaaaaaagttatttttacggaagttgttttcgagcgatagtgtatgattaggattttgaaatttttttagttttgggcggagaaggacgtttagggattgtttttatagttaataggggaaggttatcggttgtttgtaagagagaaacgttgcgatgtttgtttattttatttttgggaagataagattaaaggttgtttttgataaaaaatagggatagaaaggtttttgtagttgttttatatatttgtggtttgagtcgtttgtgttaaggagagtgtaatttatttttagttgacgtttttagttttttgcgacggattgaggtttgtgtgtaggacgtttggtatacggtttatgaggattttgtcgtgtaaagtaaatgggaacgttgaggtatgtagaggttttgaagtagagtgtcggtttttttttttatacgtttgaaacgtataattcggggttttttgagagtaaaaatatagttagaaatgtgttttgagggagaatgtattattttggtatatatatgtatatatgtatatataatttttaaattttttttgagagggggttttatttttgtcgtttaggttggagcgtaatggcgcgatttcggtttattgtaatttttatttttcgggtttaagcgatttttttgttttagtttttcgagtagttgggattataggcgttcgtcgttacgttcggttaatttttgtagagatagggttttattatgttggttaggttggttttgaatttttgattttaggtgatgtattttttttggttttttaaagtgttgagattataggtatgagttattgtgttcggtttaaaaaaatattttaaatgagaaataatataagtaatagttattttttgttaggtagaagtatatgttgttatgttggttatttttatttatatttgttaggaaatatttatattttgtttttgtatatggaggtagttaagagtattatgttaatgtttaggaagagaattttttcgtgattttattgttgatttttgaaataatttagtgtaattaattttgattgtatttgtatatttttttaattttaaaagttggtataattttttgtttggttaggaagtaggaattttatgaggatttttattgtaaattgtgttaagggaaaaattattttatattaaacgtttttattgttaaattagaatatttttataatttgaattttttttagatgggtatagattatgaataatttagaaattattagtatattgtgtgtttaattaaggttggaaagtgttgaggttttttgtaggcgtagttagtaggcgaattggttagtagggtttttggggaacgtagatttgcgtgataggggttttgtgttgttaaggaattattgtaggtattgagaaaagttttagcgttagatatttttttatttttcgggttttgttttttttttttttttttttttaggtaatttatagtttaggggtgtggttgtgtgtgtttaagtttttgggttttatatataaatgtttgagatttttttgtagggtttaaaaattaatattttgttttatagtttttttaggatttgttttttagaatttttagtttttataggaaaattttttaattaaaaaaataaaagaataaagaataaaaagaatattattattattataaaaaaaaaaaaaattttttaaaatttgtttttttagattagtagagtgaatttgaattgtgtggatttttttttttttttttttttgagttatgttagtattgagaattttttttttttttgttaaattatttgtttgataaataagtttaggagatttggatttttttaatttttgaggttttaaattaggttgttttttttttaatttttgtgtttttagtaaattcgataagtagaaattgtaattaaacggtttagtaaaatcgaagttaaatgtttttttattaatttaagaagttgtttttttaatttagtagattttaagaatttgaattataatttttttcgaagatgtataagattttaggaggggaagttgtttttttattttagattttacggtggtgataatagttatgaaagtattttataggtttttgttttttttttttttttttttatgttttgttttaga

SEQ ID NO: 86 - DNA, 7913 bp, Artificial Sequence
  chemically treated genomic DNA (Homo sapiens)
tttaaaataagatataaagagagagaaaaaaaaggtagaaatttatgaaatgtttttatggttgttattattatcgtgaaatttagagtgagggggtagtttttttttttgagattttgtatattttcgagggagattgtgatttaggtttttggagtttgttgagttaggagagtaattttttagattaatggaggaatatttgatttcggttttattgagtcgtttagttgtagtttttgtttgtcgaatttattggaaatatagaggttaaaaaaaaaatagtttaatttagggttttaggggttgaaaggatttaagttttttggatttatttattaaatagatgatttgatagaaaaaaaaaaagtttttagtattaatatgatttaagaaagaaagaggaaaaaagtttatatagtttaaatttattttgttgatttgggaagataaattttagaggattttttttttttttatagtagtagtggtattttttttattttttatttttttatttttttaattggggggtttttttgtgaggattggagattttaaaagataaattttaaaagagttgtaagataagatgttagtttttaaattttgtagaaaagttttaggtatttatatgtaaaatttaagagtttgaatatatataattatatttttaaattgtgagttgtttggaaaggggagagggagggaagtaggattcgggaggtggaggagtgtttgacgttgagattttttttagtgtttgtagtaattttttagtaatatagggtttttgttacgtaaatttacgttttttagaaattttgttgattagttcgtttgttaattgcgtttgtaaaaagttttagtattttttagttttaattaagtatataatatgttaatggtttttgagttatttatgatttgtgtttatttagagaaagtttagattgtgaaggtattttagtttggtaataaagacgtttagtataagatgattttttttttgatatagtttataataaaagtttttataaaatttttattttttaattaaatagaaaattatgttagtttttggaattggagagatgtgtaaatatagttaaaattagttatattgaattattttagaaattagtaataaaattacgaggaaattttttttttaaatattaatataatatttttggttgtttttatatatagaaataaaatgtgagtgttttttggtaagtgtgaatgaaaatggttagtataatagtatatgtttttgtttaataaagaatgattattatttgtgttattttttatttaaaatatttttttaggtcgggtatagtggtttatgtttgtaattttagtattttgggaggttaaggagggtgtattatttgaggttaggagtttaagattagtttggttaatatggtgaaattttgtttttataaaaattagtcgggcgtggcggcgggcgtttgtaattttagttattcgggaggttgaggtaagagaatcgtttgaattcgggaggtggaggttgtagtgagtcgagatcgcgttattgcgttttagtttgggcgataagagtgaaatttttttttaaaaaaaatttaaaaattatatatatatatatatatatgtgtgttaaaatagtatatttttttttagggtatatttttgattatgtttttgtttttaaaaagtttcggattatgcgttttaggcgtatggaaggaaggatcgatattttgttttaaaatttttatatgttttaacgtttttatttgttttatacgataaagtttttatgggtcgtatgttagacgttttgtatataaattttaattcgtcgtagagagttgggggcgttagttggaagtggattatattttttttggtataaacgatttaggttataggtatgtaaagtaattgtaagagtttttttgtttttgttttttattaagagtagtttttaattttgtttttttaaaagtgaaatagataagtatcgtaacgttttttttttataggtagtcggtggtttttttttgttaattatggagataatttttaggcgttttttttcgtttagagttagaaaaattttagagttttgattatgtattatcgttcgaaaataattttcgtgaaaataatttttttttttttttagtatttttttttagattaaaagtttagttttcgtgttttgttatgatttttttagttatgggatagagttcgggttataaatttgaatttagttttagttatttataagtttttgggtttcgttaatttatatttttatttttttttttttggttttttaagttaagggagtttaaaaggtttataaattattaaagtatttagtatttgggaggatcgggttttttagttttcgagttgtatttatcgggtttcgggtagggagagtgcggtcgtttaggcggcgtcggtagcgggaggcgtagtgatagcgggttttcgttttttcgcgtattgtttagattagtattgttttggcgttgcggatacgggaaggaggaggaagggggaggagtcgcgagtttgtatttcgtgagatttttgcgtaaggtgttttttagttgtgtttggtgtagtcggcgattcgcgagcgtagttgtgggtacgtttttatttttttttacgttagagtttttttttttgttgggggtattttttatttttgtatgggaattttcggggtatttaggcgggacgcgattcgaaagatacgtcggagatttttaattttggattatttgcggttttggcgtttttacgtcggtcgagcgttttagtcgcggtttttcgaaggttcggtgcgatgttggttgtaggtttgtgggagtcgagtacgtcgggttattgggattcggcggcggtagcggtagaagtaggaattagggcgtcggattttagagcgtggcgcgtagtttagagcggagcggacgagtgagattcgcgtcgttcgtacgtttagatcgttttgttttgtttttgatttacggcgtttgagtttgtttaggggcggcgtagcggacgttagttatcgttttttcgatttttttatttttttttttttttcgtaaatagaaagagattgttcggttgtagggtaagttagagttttcgcgttgggaaatttcgcgttttttttttattcgttatttcgtcgttttttatttgttttttgggcgttcgggcggagttggaggcgggattagggaggagtagagcggcgcgtagggaggagcgcgggacgtgagttgcggttcgaatcgagagtttgggacggggacgagttttttttcgggtttggtgatttaaggcgttttagtggcggagttgtaagaggtggttgtgtttttttcggtttttagggaaggtcgtatattttagtgtattcgcgttttcggcgtttttttggagttttagggttcggcgggagggtacgttttcggggggcggcggggagggtagttattagattttttttcgcgcgttttacgttttggggtggggatagaggcgtcgtgtgtttttttagtagtgttgcgggaagtcggggaagtttcggggttttttggaatcgcgattgtgggttcgattgttagtagtacggtttcgtttcgtttagatttcgttttaaatttatatataaagagggtagtgattcgtggtgcgtacgtatatattttaatttagagatttttaagaggttgcggtagggtgggttcggaatttggttgttgggcgttcggttgggagtttgtgtatttcgttagtagaatttggtttttttttttgtagtttttattaaaattggttattttgcggtatcgttttattaggaagcgtatttgtattattttttcgttttcgtttatcgttaatttttagttttagttgtttatttggggttttttttttagagtgttaagtttttattttaggtgtaatcggaagagagttttagagaaaagcgttattttttcgaaatttattttgcgggatatttttaatgtttcgttattttttttttttatattttttacgtattaagtatttattaggaattaggtattcggttagagcgcggagagttaggagttatgtaaggtcgatattttttttttttttttttttttttttttttttttttttttatttacggtttaggaggtggggtgttttaggtataatttagatttaaacgcggttatattttaagtttacgttttattttttttagtgtttaggttcgtgttttttttgtagtttttagattgttttcgcgcggttgcgtacgtttgtaattttagcgttttggaggtcgaggcgggaggattatttgaggttaggagttggagattagtttgggtaatatagttatttcgtttttataaaaaatttaaaaattagttaggtatggtggtttacgcgtgttattttagtttttcggaagttgaggtagggggattttttgagtttagtagttcgagtttgtcgtgagttatgattgcgttatggtattttagtttgggcgatagagcgaggttttgttttaaatttaaaaaataaaataaaataaaaaaatttttgagattgagtttcgtttttgttgtttaggttggggtgtaatggagcgatttgggtttattataattttcgtttttttggtttaagcgatttttttgttttagtttttcgagtagttgggattataggtatgcgttattacgttcggttaattttgtatttttagtagagatggggtttttttatgttggttaggttggttttaaattttcgatattaggtgattcgttcgttttagttttttaaagggttgggattataggcgtgagttatcgcggttaattaaaaataaaatttaaaaaaaaaatttgttttgtattttttttagagttttttatatttttgttatggaaaatgaattataatataattcgaggatgtattgagagaattgttggaggagataggttagttgaggtgataagttaggggttttttgtaggattttaattcgtagataataagtttaggtagtaaatttaacgtcgagggtcgattgattgaatgggtattgttattcgttaagttattttaaatacgagagcgatttaatttatatttatttattttatgaagtagggttttgttattttttttaaatatttaggtagttttttgtatttagaggagaatttttttttgaatttttcgtttttttgattttggagggagggaaggtagtttttattaattcggtagtattgattcggtagaagtagtttgggtcggggttggggaggagaagtttcgttcgtttgcgcgtcggatgggtggaatttggtattggtttaagcgggttattttagttttagttgaagtcgaagttattagtatatttttggttttttcgttggaaattaggttagtataggttgttatttttgattgtaacgtgagaaatagagacgtttttttttttattgtcgtgtttagataataaaggatgatttttatacgagttttaaaaatagaattatggaattatttttttttttattcgttttgtgtgagtttattaaaattatatttaattttttgggaattgtattattagttttattttttatatagaagttttttaaatatagttgtattttagggagttggtgaaatggttggtttagtagggtttttttttgtttttggtttaatttagagtaggtttatttgttggggtaaattagaaggttttatttgaaaacgtatgtagagtttttaataaggaggttaaaagggagagagtaattgaaaagaaagaaaaagtttgtggattttttgtatgtatgtatgtatgtatgtatgtatgtatgtatgtatgtatgatgtatttgagataggttttggatttgtcgttttggttggattgtagtggggcgattttagtttattgtaatttttatttttttggtttaagtgatttttttattttagttttttagatagttggaattataggcgtatgttattatattcggttaatttttgtattttgggtagcgttagagacggggttttgttatgttgtttaggttggttttaaatttttgagtttaagcgatttgttcgttttagttttttaaagtattgggattataggcgtgagttattttgtttagattttttgtatttttttggtttggttttttgttttttatgtaggtttataaaaataattttgtttttttaggggcgagttaagtgagttttaaatttattaatgagaagttttttgagttatagtgtatataattatagggggttattttggaagtgattttaaagtatattacgaaatagttttttagaagttgtttgaagtaagtaaaatgtatttgtaaataaggttgtaatcgattgtagtttatttgaagaagtttgttttattttataggttgggatattaatgggtttgtaatttgtagtttggaaatttaaattattttatttatagaaagaaaattattaataatgggtaggtaattttgttggtttattaatcgatgtaattataattgtgttttagattaattaatatgatatggggtattgttttttagttttttatatttataaaatatggaattttgtgaataaaataattgtaataaattgggagtatagttataggttatttggcgaaaatatgttgttttttgttaaaaaaaaataataaaatataaagtattgaaagtagataatttgaataaagttttaaatgagatatttttaaagttaagaggaatttgagtttgattttatgattataattttttttttatggttttatgttgaaatagttatatagattaagagttttaataataatttttttatatttttgataataatttttaggtgagaagttgtatagatacgtaggtaatatatttataattattattattgttttaaattgtgaataatttgaaattggattttaaaaatttagtatttttttttttttttattgatatgtgtaagttttttatgataatgtgagtggattttagatataattgaagtttttttggtcgggtgtggtggtttatgtttgtaattttaatattttgggaggcgaggtaggtgggaatatttgaggtcgggagtttgagattagtttgattaatatggtgaaattttattattattaaaaatataaaaattagtcgggtgtggtgttttatgtttgtatttttagttatttgggaggttgaggtaggagatttatttgaatttgggagatagaggttgtagtgagttgagatcgtgttattgtattttagtttgggcgataagagtgaaattttattttaaaaataaaaaataaaataaaaataattaaagtttttttggtttttttttttttttttttttttttttttttttttttttagatatagttttattttgtcgtttaggttggagtgtagcggtacgattttagtttattgtaagatttgtttttcgggtttaagcgatttttttgttttagttttcggaggagttgagattacgggtgtatgttattatgttaggttaatttttgtatttttagtagagatggggttttgtcgtgttggtttggttggttttaaatttttgattttatgtgatttatttacgttagttttttaaagtgttgagattataggtgtgagttattatatttggtaattttttttatattaagagttttaagtaggatatggtggtttatatttgtaattttagtatttttggaggttaggggaggattttttgagtttaggagttta

SEQ ID NO: 87 - DNA, 5910 bp, Artificial Sequence
  chemically treated genomic DNA (Homo sapiens)
gtatttatttagattttttgtgtttgtttttattattttatttaaagtatattttggatattagtgatcgttgtttgagtaaatattgtggtttaaaaaaatggtttttgtttttattattttaaaatatttttgtagtgatgtggtttatgttgtttaggttggttttgaatttttggttttaagcgatttttttattttagttttttaaagtgtagggattataggtatgagttattatatttagttaagaaaaaaaaaagttttaaaatttattttgaattttttacgaatatagaagtaatttttgggatatgattgttttaatttgtgttttattttttttttttttttttttttttggtagtagttgtggttttagttttgttattgttattaagatttttatgattttgggtaagttattttgttttattggggtataaatgatatgtgtgaaagtattttaaattgtaggttgggtatagtggtttttgtttgttattttagcgttttgggaggatgaggcgttaggattatttgagtttaggagtttaagattagtttgggtaataaggtaagatattatttttataaaaagttaaaaaaaaaaaaaaaattagttaggtatggtggtgtttgtttatagttttagttattggggaagtttgaggtagggggattgtttgagtttaggaggtttagattatagtgagttatggtggtgttattgtattttagtttgggtgatagagtgagattttgatttataagtaaattgtaaagtattaaaaaatataattattattattgaattaggtgatttttgtattttttttaaggtttaaaatttttatttttattttatatttttgatatttttagtgaatttatttgatttagaagttagaaattgttttttgaagatttttttttttttttttttttttttttttttttgagatagagttttattttgtagtttagggtggagtgtaatggtacgattttagtttattgtaattttcgtttttcgggttttagcgatttttttgttttagttttttgagtagttgggattataggcgtttgttattacgttcggttaatttttgtattttttagtatagacggggttttattatattggttagttggtttcgaatttttgattttgtgattcgtttgttttggttttttaaagtgttgggattataggcgtgagttatcgtgtttggtttaaaagattttttttattatattaaagttgttgttgatttaataagtatagaatgatttgtgattttaatagtaatattaaaaataggttattttttaattttttaggttaaaattattgtaaatgatatatgattttaagaagaaggttgagttatagttaatatttgaggattttattttttatgtaaaaaaaaaaaaaaataattttgttatttttaaatttaataaatttaaattttaagaaattaaaattatatttgaaaaggttagatttatttatattttatttttgtgtattttgttgggtattgttagtgttggaatggtgattatagtaggtaggaaataaaggaggatttatattttatatataaaattatagaattttagggttagaagggtttttagaagttatttagattagtagaatttaatgggtttatataagttttaaaaaaaaggcgaggaggattagatatataagtatttattatttatttatttatttatttatttattgagataaggttttattttgttgtttaggttggaatgttgtggtttgattatagtttatagtagtttggaatttttggagttaaatgatttttttgttttggttttttaaagtgttgggattatatgtatgagttatcgtacgtagtttttaattttttttttgagataaagttttatttttttgtttaggtcggagtgtagtggtataatttcggtttattgtaatttttatttttttagtttaagcgatttttatgttttagttttttaagtagttgggattataggtatgcgttattacgttcggttaatttttgtgtttttagtagagatagggttttattatgttggttaggatggtttcgaatttttgattttaggtgattgtttttttttggttttttaaagtgttaggattataggtgtgagttattgtattcgggtttaatttttaatcgagtaagaatattttaaaaattaaaattatttattatcggtatttttttataaaagagtattttaatgatatatatgtgaaaagattaaattttagaatgaaatataatgtgaaattagataaataaatgaaagatgtattgtttattttttttatatttttatggtaaattttgttagttatttgtatttgtttatatatagatttttgggaattattaatttagattattttatgtttatttttattttgttttcggttttattgagtatttttattataatattaaaatattcgtttaaatgtatattttatttttttatggagaattttttaagttgaggaatttattaaattttggatgtgtgtgagaaaattagtagaaaaggagtgatttttggaaaatttaagatgtttaaatttggtttttttttttttaagattagaattgattaattaattaattttttagatggagtggagtttcgttttgtttttaggttggagtgtagtggtacgatttcggtttattgtaatttttgttttttaggtttaagcgatttttttgttttagtttttttagtagttggagttataaggtatatgttattatgtttagttaagttttgtatttttagtagagatagggttttattacgttggttagaatggtttcgaattttcgattttaggtgatttagtcgtttcggttttttaaagtgttgggattataggtgtgagtttattatgttcggttgtattttatattagaatttaatagtagattttaatttagttaaaatatgttttagagttattaaaggagaatgatgtttaatagtgttgatttgggagttgggtattttgagtgttggttgggttttaaaaattttatgttaaattttaggggaagtttttttttttttttttttagttgtttttcgagatgaattttattattaattatttgattattttttaaagttgtagttaaaattttttatattttttttttatttttatttaattaattattttttttttgagatagggtttttttgttgtttaggttggagtatagtggcgtgatttagttttatcgtaattttcgtttttcgggtttaagcgatttttagattttcgaatagttggggttataagtgtgcgttattatattcggttaatttttgtatttttagtagatacggggttttattatgttggttaggttggtttcgaataattgattttaagtgatttgttcgtttcggtttttcgaagtgttgggattataggcgtgagttattgcgttcgttttttatttttattttaattaaattttatttaggataggtttagtttaaatttttacgattgaggtttgatttaagatgatagtattaattatggagttttttttcgtgaatattattattattaagtttaatttttttaggttaaattttgtaaaataaaacgtggttaaaatttgattttttgatcgattttttgtaaaaaagaaaaaaattatcgtgtagttttaaatgttgttaattaaattttgtaatagttatttttattttgtttaggttaatattgaggtttttaataagattaatatacgatttttttttttttttttttttttttttttggtggggttgaggggatataatagtttttttatttttgttaaattaattttttgttgattttatttatttttaatttttattatgagtaatatattaggtttttttttgaagattatatgtggtagtgaggtaataatgtaaagatataggatggtagggggatttcggttttttttttttttttttttttgtggaaagagggtttataatatttcgtagtagataggataattttaattatgaagggtaattagttaggttttgttataatcgagagttttgagagatttttcgacgttggttgtttttttttttttttttattagaggcgatagtttttttttaaatagaaattgggttggaataggtcggttcgggggaacggttagaagaaagattaaaggttaaaaatcgttttaaagagtataggttaatatttaatttttaaggaggttttaagtttttatttgttacgaaatatgaaggtgattttttttaatattaaggtcggggggttatttagttttttagagattcggcgggttcgaggcgagtaataggtaatatttgttgagtcgtcgtcgatcggaagtggaagagagttcgggacgggggtgaggataggtcgcggtacgtttgcgtagttagtaggagttgtagcgtttatgcgtagttgggcggtgatagggtgacgttcggagcgtgggtcgcgatttttacggattcggtttcgttttttcgttgtcgatttttcggagcgagcgttcgagattttttttttagagtgttttgcgtcgtgaagaagcggttttcggggattgggggtattttgtgttggttggagttggagtaataagatggcgtcgttcgcggagtgataggggtttttttgggtcggagtcggcggtagtggtggtagcggtatcgtcgttttagtttatcgcgttttttttttagttcgcgacgtcgtcgcgtaagcgaggtagcggcggtcgtcgagaaataagtggtttagtttggtaatcgtcgagaagttttttataaattgcggtttggtaaaaagaaatttgattgagcggcggtgattaggtttttttttgttgattttgggtttcgaatttcggtaaaggttttcgtgtttcgttttttgtcgttttttttcgtagttttgtttagtgtaggagtttcgaggttttcgttttttttttagaggtgtcggggtttggttttagtttttattttcgttttttaggatggcgagtagtagcggttttaaggttgaatttattgtcggagggaaatataaattggtacggaagatcgggtttggttttttcggggatatttatttggcgattaatattattaacggcgaggtaattatttggggtggggtttacgataacgttgcgtttttatttattttttttattattatcgtgtatttttaaagtgttcgggtttttttttatcgtacgtattcgttagggagtttagggagttagtttttttggtttacgaatttcgttcgttgtttttttaaaagggttaagaattcgatagaaaggttgggggaattagttttttattttgttaaatacgttttataaatgttttttagtcgagttttttttttttttaatcgttttttaaggtggaaacggtaaaatttttttttagtgatttttatgtttttttttttttaatttttaattttattgggttttttgttttaattagaatagttttcgatcgtttagttttttaaaaattttttattacgtttagaggttgttttttttttttggatgaattatttttttgtattttagaggacgtacggatttcgttattattttttgaagaggtttttgaggttggttgtttcgttttataattatcgagagttttttttttttagttttttatttttttttgtagtcgcgatttggagttttgttaatgtttttttttttttttaagtgatattgaattcgtagggatgttgatgttattatttttttttttttttgtagg

SEQ ID NO: 88 - DNA, 5910 bp, Artificial Sequence
  chemically treated genomic DNA (Homo sapiens)
tttgtaggggaaagaggggatgatggtattaatatttttacggatttaatgttatttaggaaaggagggagatattagtaaaattttaagtcgcgattataagaagaagtgaaaagttggaaagagaaagttttcggtaattataaaacgaggtaattagttttaaaggtttttttagggggtagtgacgaaattcgtacgttttttaaagtgtaggaaaatgatttatttagaaaaaagaggtaatttttgaacgtagtgagaggtttttaaggaattaggcgatcggaaattgttttaattggaataagaggtttagtagaattaagaattaaaaaaaaaaaaatatgggaattattgaaagaggattttgtcgtttttattttaaaagacggttaaaaaaaaaaaaagttcgattaagggatatttatgggacgtgtttaataaggtgggaaattagtttttttaatttttttatcgggtttttgatttttttagggagatagcggacgaggttcgtaagttaggaaaattagttttttggattttttggcgagtgcgtgcgatgaggagaggttcgagtattttgggggtgtacggtggtggtggggggaatgagtaaaagcgtagcgttatcgtgaattttattttagatgattatttcgtcgttggtgatgttgatcgttaaatagatgttttcgaaggagttagattcgatttttcgtattagtttatattttttttcgataatgaatttagttttggagtcgttgttattcgttattttgagagacgaagatggaggttggggttaagtttcgatatttttgggaagaggacggaggtttcggggtttttatattaggtaaggttacggaggagggcggtaggaaacggaatacggaggtttttatcggggttcggggtttagaattagtagaggggaatttgattatcgtcgtttagttaggtttttttttgttaggtcgtagtttgtgaagggtttttcggcggttattaggttgggttatttgtttttcggcggtcgtcgttgtttcgtttgcgcggcgacgtcgcgggttggaaaaggggcgcggtgagttagggcggcgatatcgttgttattattgtcgtcggtttcggtttagagggatttttgttatttcgcggacgacgttattttgttattttagttttagttaatataaaatgtttttagttttcgggagtcgtttttttacggcgtagagtattttgggaaagggatttcgggcgttcgtttcgaaggatcggtagcgagagggcggaatcggattcgtgagagtcgcggtttacgtttcgagcgttattttgttatcgtttagttgcgtatgagcgttgtaatttttgttgattgcgtaggcgtgtcgcggtttgtttttattttcgtttcgggtttttttttattttcggtcggcggcggtttagtaggtgttatttgttattcgtttcggattcgtcgggtttttggaaggttgagtggtttttcggttttgatattgggaggagttatttttatgtttcgtggtagatgaaagtttaaggtttttttaggagttgggtattgatttgtgttttttgaggcggtttttaatttttgattttttttttggtcgttttttcggatcggtttattttaatttagtttttgtttggaaagaggttgtcgtttttggtggagaggaagagaaaagtagttagcgtcgaggaattttttagggttttcggttgtagtagagtttagttaattattttttataattagaattgttttatttattacggagtgttatagattttttttttataggaggggaagaaagaaagaagtcggaatttttttgttattttatgtttttgtattattgttttattattatatatgatttttagaagaaaatttggtatgttgtttataatgaagattaaggatagatggaattaatagaaaattaatttaataagagtgaaaaaattgttatgtttttttaattttattaaaaaaaaaaaaaaaaaaaaaaaaaagaatcgtatgttggttttgttgaaaattttagtattaatttgaatagagtagaggtaattattataaaatttaattgataatatttaaaattatacggtaattttttttttttttataaaaaatcgattagagaattaaattttgattacgttttgttttataaaatttgatttgggaaaattgggtttagtaataataatgtttacgaaagaaaattttatggttgatgttattattttaagttagattttagtcgtaaaaatttaagttaagtttattttaaataaaatttaattaaaatagaaatggggggcgggcgtagtggtttacgtttgtaattttagtatttcgggaggtcggggcgggtagattatttgaggttagttgttcgagattagtttggttaatatgatgaaatttcgtatttattaaaaatataaaaattagtcgggtgtgatggcgtatatttgtaattttagttattcgggagtttgagaatcgtttgaattcgggaggcggaggttgcggtgagattagattacgttattgtattttagtttgggtaatagagagattttgttttaaaaaaaaaataattaattaaatagaaatgggagaaaaatgtgaagaattttaattgtaattttgaaaggtggttaagtaattagtaatagggtttatttcggaagataattgaagagagaggggaggagattttttttgaagtttagtatgaagtttttaaagtttaattaatatttagggtgtttaatttttaaattagtattgttagatattatttttttttggtgattttaaagtatgttttgattaagttaaaatttgttgttaaattttgatataaaatgtagtcgggtatggtgggtttatatttgtaattttagtattttgggaggtcgaggcggttggattatttgaggtcgggagttcgagattattttggttaacgtggtgaaattttgtttttattaaaaatataaaatttagttgggtatggtagtatgtgttttgtagttttagttattagggaggttgaggtaggagaatcgtttgaatttgggaggtagaggttatagtgagtcgagatcgtgttattgtattttagtttggagatagagcgagattttattttatttaaaaaattaattaattaattaattttggttttaaaaaaaaaaaagttaagtttaagtattttgagttttttagagattattttttttttgttaatttttttatatatatttaaagtttaatggattttttagtttgaggagttttttataaggggatgaggtatatatttagacggatattttggtattgtgataaaaatgtttaatgaagtcgggggtagggtaagggtgggtatgaagtggtttaaattagtgatttttaaagatttgtgtatggataggtgtaagtggttaataaagtttgttatgaggatgtgagaaaagtaagtaatatattttttatttatttatttgattttatattatattttattttgagatttagtttttttatatatgtgttattaaaatgtttttttataaaaaggtgtcgatggtagatggttttggtttttaaaatatttttgttcggttaaaagttgagttcgggtgtagtggtttatatttgtaattttagtattttgggaggttaaggaagggtaattatttgaggttaggagttcgagattattttggttaatatggtgaaattttgtttttattaaaaatataaaaattagtcgggcgtggtggcgtatgtttgtaattttagttatttgggaggttgaggtatgagaatcgtttgaattggggaggtagagattgtagtgagtcgagattgtgttattgtatttcggtttgggtaagagagtgagattttgttttaaaaaaaaagttgaaagttgcgtacggtggtttatgtatgtaattttaatattttgggaggttaaggtaggaggattatttgattttaggagttttaggttgttgtgagttatgattaaattatagtattttagtttgagtaatagagtgagattttgttttaataaatgaatgaatgaatgaatgaatgataggtatttgtatgtttaatttttttcgttttttttttagaatttgtgtaagtttattaaattttattggtttaaatgatttttggaaatttttttaattttgagattttataattttgtatataaggtatgagtttttttttgttttttgtttgttatagttattattttaatattgatagtgtttagtaaaatgtataaaaatgagatgtgagtgggtttagtttttttaaatgtgattttagttttttaagatttaaatttattggatttaagaatggtaaaattgtttttttttttttttatatagaaaatgaagtttttaggtgttggttatgatttagttttttttttaaagttatgtattatttgtagtaattttagtttaaaagattgaagaataatttgtttttggtgttgttgttaaagttataaattattttgtatttattgaattagtagtagttttggtgtaatgaaaggagttttttaggttaggtacggtggtttacgtttgtaattttagtattttgggaggttaaggtaggcggattataaggttaggagttcgagattagttggttaatatggtgaaatttcgtttatattaaaaagtataaaaattagtcgggcgtggtggtaggcgtttgtagttttagttatttaggaggttgaggtaggagaatcgttggaattcgagaggcggaagttgtagtgagttgagatcgtgttattgtattttattttgggttatagagtgagattttgttttaaaaaaaaaaaaaaaaagaaagaaagaaaggagtttttaaagagtaatttttggtttttagattagatgaatttattaaaaatattaaaagtgtagaataaaaataaaaattttagattttgagggaaatatagagattatttagtttaataataataattgtattttttaatgttttgtaatttatttatgagttaaagttttattttgttatttaggttggagtataatggtattattatagtttattatagtttagattttttgggtttaagtaatttttttgttttaagtttttttagtagttaggattataggtaggtattattatgtttggttaattttttttttttttttaattttttgtagaaatagtgttttgttttgttgtttaggttggttttgaatttttggatttaagtgattttgacgttttatttttttaaaacgttaggatgataggtaagaattattgtatttagtttgtaatttagagtatttttatatatattatttgtgttttagtaagataaagtggtttgtttaaaattatagagattttagtggtagtgataggattagagttataattattattaaaagaaagagaaaaaggaaagagtagaatataaattaggataattatgttttagggattatttttgtgttcgtagggaatttaagatgaattttaaaattttttttttttttggttgggtgtgatggtttatgtttataatttttgtattttgggaggttgagataggaggatcgtttgaggttaggagtttaagattagtttgagtaatatagattatattattataaaaatgttttaaaataataaaaataaaaattatttttttaagttatagtgtttatttaagtaacggttattggtatttagaatgtgttttgagtgaaatgatagagataagtataagaagtttagatggatgt

SEQ ID NO: 89 - DNA, 15923 bp, Artificial Sequence
  chemically treated genomic DNA (Homo sapiens)
atgaaattttttagttttaaaattttggggagtggttaggtatggtggtttacgtttataattttagtagtttgggaggtcgaggtaggcggattatttgaggttaggagttttagtttagtttggttaatttcgtttttattaaaaatattgtgtggttttgggtaaaaattagttaggtgtggtggtgtatatttgtaattttagttatttaggagggaggttgaggttggagaattatttgaatttaggaggtagaggttgtagtgagtcgatattgagttattgtattttagtttgagttatatagcgagattttattttaaaattaataaaaataaaaagtaaaaaaaaaaaaaaaaattttggggattaattaataaaataataatagaaagtatcgcgtaggttaagtaaagtttattatttggttggtgattttttgttttggtaaaggtgttattgaaggtaggtttttttgggaggaggttttttatttttttgtttttggaaatgggttttagatagatttagttttttggtgatcgttgggagaatagagttgttttgttgggttttgtggttttgggtaaagttttttttttttttgggttagttttttggtcggcgaaaggatttagtttgtggggtttttgttcgtttggatacgtgtgtgatttagttttttagtttcgaggagggaagatacggttattatagaagtgattttttttaggaattgtgttttcgggattggacgtagggttttaggtattttgcgtgtttatagttataattgtgtgaatataggtgtgttataattggaagttttgtatggtttagtgtaaatattattattttaatgattttgttttgtaattttttatcgcggttttgtatgtcggtagaagtttttattaattttgtgatttggggaggatagggtttttttttttatttgttgtttaaggaaatttaagtttagagttgggaggtggtttggttaaacgtgtattattcggagtttagatttaagtgtcggtgttttggtatttgtggtattttttttttaataggggagaatgaggttgggatttgaggggttttttttgtgtttattatagtttgagttttagggaaaagaagaagaggtttttgtttttcgtttttttacgggaggagaatgtatgagtttaggttatttttttgggttttgtgtcgatatttttagttgtttttttaaattttttgttttgaattaatttggtttgtgttttttgcggtattcggaatttggaggcggattgagtttttagtagtttaatattttttgtagtgtcgtgaatagtcgtttgttttcgtaggggtttagtgttttgtttggagaggagagagattttggtaggcggggagaggagattttgggtttagattttttttttttatttttttattttcgttttttgtgcgttttttttttttttttgtttttttcgtatttcgttttttttatttgtgttttggattgtattagggtgttagtatttgtgtgtttttttatttttacgcgtaagttcgcgcgtttgtattgaggttggggaattgcgtttcgtagttgcggtttttagcgcggagggcgcgggttttttaaatttttcggggcggcggcggcgggtcggggatgatattagcgggcgggttcggggtttaatgggagtcggcgggcgcgcgcggtgcgagagcgcgcgagtcggcggcgggggcgggcgggcgggtaggaggtcgggaggagggaggcggcggcggcggcggcggcggcggcgagagtttagagttagagttcggtcggggtcgagcggagcgcggcggcggcggcggcggcggcggttgggtcgggagaggttggcgcgtcgggcggtttcgcgaatttttcggtattcgtttcggcgggtcgttttcgttcgcggtagtttttcgagtagtggttcggtatcggcgttttttcggcggggtaaatatcggggggtcgcgggttcgcggaagggtgtaaatttggggggaatcgggtttttttagtttttttgtttttgttggagagggagggaagggagggtagatatacgcgcgttcgcgttggggtgtagggggggtagttcgggcgtcgttcgttcggttcggcgaggataaaggcgcggttggggacgaggaggagggggtttgttattttgtaggttcgcgggggaggtttttcggtcggtttgttttcgttttttttcgttgggtttttcgaggtttcggtcggttaggcggttatttcggttgtgatttggggacgttgagggagggggtttggggtgttgggcgtcggatattgttgattcgggttcgcgtagcgttttatcggataattatcggcgttttttgttttttcggtttcggcgttcggatttgggggttcgtaaggttgcgttcgttcgttggatgacgggcgtttgggggttttaaggtgaagaggtgtgtggttattaggttattgatttgtttttttttgtggagagaaagaaaggggtgggggttatttgtcggatcggatttttttatttttgtgtgagagattgatgttttgtaagtttttaaggaacgtaaaatagtgtttgggtgtcgttagaggatttttaagtttttgttaatattttaattcgaagtggggtgagttttttttttaattttttttttagtttttttgtatattttttttttggtatagttttttttttggagaaggatttggagagaggagaaggggatataagtgttttaagttgtttttaagtaatgtttgtgtttgggttttttttgttttcgtttttatgatgtttttttaatttttattttaatcgttcgagggataagggtttcggtttaggggtaggcgatggtgttcggggagtaagaagtattgttcgtgtgttatgttggttggtagtttgtttaatttttttaatttgttgaaatttttgaatttttatatttatttttttttttattttgtttattttttttttttttttatgggagaagtagtaaaagaattgaaaagtttttttatttttgaatgaagtttttttgtttttttttgggaggttttttgggtattggtgtcgggatagtttaggtttttttagggattttggatttttggggtgttggggagcgattgggggtttgggtggttggtatatagtagttagggggttttgaagggtttgttttttttcgttttcgttttttgtagatagtcggtgagtggggagagattggggggttatgtgtagtatatttatgtaagatatttagatagagggtacgggtatttatataattcggcgtgggtatttatgtaatataggatgcgggtatatttatgttttttttttaatttgcgggttttttggttgttatgtgtggtttttgaattggtgttggtagaaagtggattgaggtgttgggggggggttgcgtgtatatttttttttattttttaatagggtttattgtgtgtgtttgtttttttttttttcgttggagtgtatatattcgggaagttggacgtgtgtgtacgtgggatgtgtggcgtgtgggttttttgtaaacgtggattgtgtttttttggtagcgtggtattttagttgagataggttaagtatatgggtagcggtttttgattgagagtttagagtttggttagttttggtggaggtttttgtttcgtggttattggtggagggttggtgagttttttgggagttaggtgtcggggttttttgttttttttgggatttgtttattgtttttggaatttattttttttttaggttggtttggttgttgggggtagtatttggtacgggtaaggggttgattttttgtgttagtatagttgttttgtagtttttttgttttgttttgtttgtgagtgtgggagattattaggtgggatagtcggagttttgttttcggcgaggttgtattatttgtagggtggtgtgggataggtggtatggtttttgtgagtttgagtattttgtttgtgaaaggagtttttttttgttagtttttgatgttggtttttttgtaaatatttttttttttgtttattgtagtttttggtttttgtttttacggtagtattgtttttaggtttttagtttttttttttgttgattaggaatagggtgttcggatttttgttttaggttagagtagaggggttttttttttgttttaggttagagtagagggtttttttttggttttgaggaaggagagaagttgtttatattagaatttttttttttatttattcggggtaggcggttaaaattttggtttagttttttttgttgttttatgagggtttttttaggagatttttttagttttaaaggacgttagttttaaatagtttatttaagcggttatgggttttcgtgtgaggttttggtgttatgacgtagagatggggaggtggttggaaggtggatggtcgagggtatttttttttgttttttttttagtaggggatgcgatttttttttgtaaggcgtgttgggtattggcgaggtttggtttttgggtaggggtagtatttgggaagattaggttaggttgtgggagtttggggggtaggaggtgtaagagggttgatgttcgttgtgattttttgagaagttttttttgaggggtttttgaatgagtattttttaaagatatgtttgtttggttgttttttttttggttatattgaaatttgtttttagtttgttttagttgttttttaggtgtgtggagtgtaggttgtgggttatttgatatttgtagaatgtggttttcgagaatgtaggttttcgagtttttggtggttttgtttggttttggtggattggatttttttttcggttttttacgtcgttgatttttatgtttttgttttttttgtagtaagagtgagttatggagttacgtgtggggaataagtatcgtttgggacggaagatcgggagcgggtttttcggagatatttatttgggtaagtgtttttagttttagttggagtttttggggttagtttatgggattaagaggaggaaagattttaggatttggggatttgaagttagaatgtggttttaggggtatgatttgttttagggttattttagatggggaaggaagtagtaggttgtcgggaggtaggttagggggtttttttcgtaggttaggttgggtattggagggtatttttagttttagtttttgtaggagttatgcggtttttttgtgttttagtgtttcgggttagttgggttattagttgggtgtgggaaaatttaggcggggtttatatttttttttttgttttttgggagaaggatattggtagatagaagggatttgggttgttgttggatttttagttaggtttttttttttatgttttggttttttggaatttagtttaggtaggttttgggatgacgtaggtttttttgtaatttcgggggtggggtggggggatgcggtttttttattagggagtttttttttttttttttttttttcggatgtgttttttgttgaaagtatgagtatgttgtgatgttgtattttaaataaattattgattttttagttttttttttggtttgggagaaatgaggtttgcgttttttagtgttatttttgaggggtacggttatgagttttggttttttttttgtgtttattggtttaaagggaaggtatttagtgttggtgtttgtggattagcgggtggaggtttgaagttgttggagtgaggtggttagtttttttacgagttatttttatttttgtttttgtatttttagaagtaggttagatatatttttgtgttttggttattttttttggaaaatgaaaattagttttgtttagtgtagagaatattaagtttgtgtgtcgtgtttattagtttagaatttcggggtttttgttattttatggttagggttttttggagtatgaaatgtgttaaggaagttttaatggagacggggacggagattgggagttttttgattatttttttgtagggtattttttgtagtttttagagatagtattagattatttgtttggtatattaggaaattgaggtatagatggttaagttggttttttaagatcgttttagaaaattggtagaagtagtttgtatgtttatagttttttatatgagtgagagcgtggaagatagaatatgtcgagggagacgttagacgtttagttttgcgttttagacgtggttttgtgtggttgtgggaaggttatgtagtttttttgtgttttagtgtttttatttgtagtttgtgataatgttgtttgattgattaagaattgttttaaggtagagatgaaatgatagatgggaaagtattttgtaaattttaaagtgttagttagatgtgtagtttattgttgagtgtttagtagatgagttttttttatggatattttggagtttagagggagggagagtgtgtggtgtagttggtttaaaggtttttttttgcgattttaagttattttcggggaggtaggtatttggtaatatttgttagtgtttagcgtagtgggtgtttattgaaggttagttaagtaaattaatgagaaaatggggattgtgatatgtatagatatgtatagtagttttatagtagaatagaaaaatgtcgggatggttaggtgcggtggtttatatttgtaacgttagtattttgggaagttaagatagatagattgttggagtttaggagttcgaaattaatttgggtaatatggtgagattttatttttataagaaaaatataaaaagtagttgggtatggcggtacgcgtttgtaattttagttatttaggaggttgaggtgggagaattatttgagttatggaggttgaggttatagtgagttgagattatattttagcgtgggtgttagagtgagattatgttttaaaaaaaaggaggttaggagatatggtttatatttgtaattttagtattttgggaggtcgaggcgggtagattatttgaggttaggagttcgagattagtttggttaatatggtgaaacgttgtttttattaaagatataaaaattagttgggtgtggtggtatatgtttgtattttaggtattttggaggttgaggcggaagaatggtttgaatttgggaggtggaggttgtagtgagttgagatcgtgttattgtattttagtttgggcgataaagtaagattttattaaaaaaaaaaaaaaaagaaggaaagaaaagggttgagatgtgggggttagtttaggtttagatttttagcgtgttttttatttgttgtgtgatttggagtaagttattatattattttgagttttagtttttttatttgaaatgagtgtatttagttttttattgtttgtgaaattggagtgggtgtaaaggattttcgtattattgaagttgttgggttgagtattgaagtttggagttattggttggaggttaaagggtatggagatagtttttggtatagatttgtttttagatagcgtttattttaggtttcgtcgttttttttgtagataggagataggtttatggttggagcggggatagtttaagattatttagaaaatttagaattttgtgtggtgggatttttttggggataggattttttgtttatttgtatagttattttatttattttaaaaattaagtatagatttatttttttttgtattggttttagagtaaattcgatttaggtttgggtgttggtttttttttttgtgagttgtatgcgtttgagtaggtgatgattttgtttatttttggtttttttatttgtaaaatggggtcgtgtaaagtaatgaggtcgtggcgtgtaaaatatttacgtgtgttgggtttagtagtagtgttgtgcgttgcgtttttattattggttttagtttttagttcggagttgatttcgaagggtttgggttttttgggtttgagtttggggaggcgagttagatttttgatttttttatttttattggtgtaagggttttaggggattttgttttgatttattattttgttagtatttttttgggtttttgttttgttggtttggggatagtggtgattgtagggcgttttcggttagttttgttggttttatttatttaatattttggttatatttttatttttagtgttttgttagggtttgattttagatggtttttgtcggtggggttggatgcgttttttaagttttgttttttaggattattcgagggttagtatattatggatgtggtttttgttttttttttttttgtattataaggggttagttaagagagtggggtttgttttgttaaggtattgttgttgtttatgtagggtttagaggtggttaaatttgggtttatttgttagatttgtattttggggaattttttagattttttagagtttttggtttttagttttgaaaggggtggcgaatagtgttgttcgttgataggtggttttaggggtgagagttagtgtgggaaatattttaggtttttgatgggtgggaattgaggttgtcgtcgttgttgttgtcgggacggtgggttttattttttgttttttagtttatttatgttttcgattgtgtttatgtgtttgtgtaggtgttaagtaggttttcgtgtgaggttggttacgttcgtggttatttggaatttgttaagtttttagtttttttagggttagttaagtttaagtttttttttgtgtttaagtttgttttgggaattggtattttttttattgtgtttgatttatggggtattttttgtttttgaaatcgggtagttttagtttttaggttttcgtatgtggggtatttttgtatttatgtttagtcggtttttagatatagtttttgttaggaagttttatttggagtttgagtggagaaaaaatatagggattttggggattaagttttaaattttggttgtgttttatttagttttgttagattttaggttagttatttaacgtttttgaattttagtttagcggttgtaagaattaagggagtttagagaaaagtttggcggttttttgatagaatttagaggttattaaggaatttattggtggtaggatttgttgtagggggaggtagttttggtaggtttttagtatttgcgggggttagaggttttgtttagtagtttgggtttttgtttttgggaagtttgtagtatatgattatttgatttttggtgtttgtttttttatatgttaaatagaaatgtaaatagtaggttaggtatagtggtttacgtttgtaattttagtatttgggagattaaggcgggtagattatttgaggttaggagtttgagattagttcggttaatatggtgaaattttatttttattaataatataaaaattagttaggcgtggtggtgtttgtttgtaattttagttattcgggaggttgaggtatgagaatcgtttgaattcgggaggtagaagttgtagtgagtcgagattatgttattgtattttagtttaggcgataaagtgaagttgttttaaaaaaaaaagaaaaaagaaatataaatagtagtattcgaagagtggagtaagggttcgaggggaagagggttttgtttattattatttttttagtattttttttttttgtatatatttgtcgaattattaagtgttgtaggttttgtttttaaagtgttaattagtttttgtattttgtttaggtagggttatcgttagtttttgtttggtttttgtagtggtttttttaggttttttattatttttttagttttttttagttttttcgtatttattaggtagttttaatagggtgatttttgttttttaggagatatatgttaagatttggagattttttggttgttataatttagggggaaaggggtgttttggtatttagtgggtagaagttatgggtgttgttagattgtgtagtgtttagggtagttttataattaggaattttttagttttagtgttagtagtgttacggttgagagattttgtgattatatatttgaatatggtttttggtgttttaggttgaaggttaggattttagtcggttatttaagattttttagattttttttttgtttattttttttattgtttttttttgttattttatggttttcgttgtatttgttgttgttgggtttttgtttgtgtcgtgattttttttgtttgtttagtatagttttgtttgggagttaggagtttttgtagtttgttttttcggaggtttttttttttttatagtatggtttattttttttttttttttttttattgggtggatatcggtttatttttagtttaggggttgtattttttattaagtcgaatattatggagtattgattgtgtgttaggtatttttgtaagtatgtttgtttgttagaatattttaatgagttagatagtgttatcggtttatatatgaggtatttggggtttagaggggtgaagtgttttgttcgacgatttttggttaggggatgttcgagttaggatttgggttttagtaggttggttttgaaatttatattttaatcgttgtatttttttgtttttttgtttatggggaaatggagtatggttaggggattttaaggatttttattgttttttggaaatttgtgtggtttattttagtgacgagtattgatgtgttaaaagttttttatagtttgtaaagtatttttatttttgttgttggttagattgagttatttattttgttttttttttttttttattaaaaatttaaatatttaaaaattaaaatataaaaatgtgttaagtgaaagaagttagttataaaaaattacgttgtatgattttgtttgattttatttttgtgaaatgtttagaaaagataaatttatagagatagaatgtagattagttggggggtaggggatggagcgaggagataggattttattttattaaaggttataggtgtttttagggtgatgaaaatatagtttttttgggttaggtatagtggtttatgtttgtaatttttgtatattgggaggttgaggtaggtgaattatttgagtttaggagttggagattagtttagagatggtaaattttgtttataaaaaatataaaaattagttaggtgtggtggtttgcgtttgtagtttagttattcgagaggttgaagtgggaggtttatttgcgttttagaggttgaggttgtagtgagttgtgttagtgttattatagtttagtttgggtggtagattgagattttgttttaaaaagaaaaagaaaatatagttttttattttcggtatttgtggggaataggttttaggattttttttagatattagaattttttgatttttaagtttttgatataaaaagttgtagtatttgtatataagttacgcgtattttttgtatatttttttttgttttgagacggagtttcgttgtgtcgttaggttggagtgtagttgtgtgatttcggtttattgtaattttcgttttttaggtttaagagatttttttattttagttttttgagagttgggattataggcgtttttacgggagtattttggttaatttttgtatttttagtagagatggggttttattatggtggttaggttggtttggaattttttgtttggtgattcgtttgttttagttttttaaaatgttggtatttggttttttttatatattttaaattatttttagattatttataatatttaatataatgtaaatgttatgtaaatagttattgtattgtatttttaatttttatattatttatttatttatttttgagatatggttttgttttgttatttaggttggagtgtggtggtgtgattatagtttatcgtaattttgatttattaggtttaagtagtttttttgttttagttttttaggtagttgggattataggtacgtgttattacgtttggttaatatttgtattttttgtagagatagggttttattatgttgtttaggttggtttcgaatcgttggatttaagtaattttttttagttttttaaagtggtagtattatagttgtgtattattgtatttaatttattttttattgttgtgttgttattttttattttttttttttacgtatttttgatttatggttgaatcggtagatgcggaatttatagtagatgttgatacgaaggtattagttgataagaagatgttgtgttttaatttttaatttttttttttttttttttgagatggagttttgttttgtcgttaggttggagtgtagtggtataatttcggtttattgtaatttttgttttttgggtttaagtaatttttttgttttagtttgtcgagtagttgggattataggcgtgcgttattacgtttagttaatttttgtatttttaatggagatggggttttattatgttggttaggatggttttgattttttgattttgtgattcgtttgtttcggttttttaaagtgttgggattataggcgtgagttatcgcgttcggtttgtgttttaaaattgattgtggtaatggttgcgtaagtttgtgaatatattaaaaacggtgagtcgtatattttgagtgatttaattggagagttatttgaattatattttaataaaggtgttgaaagaaattgtaatttataatatagtatttagtgaagcgttttttatttttttttttttgatttatttagttttgtatagttatgtttttgtttagtgtttttttatgtagttagagttaaatatagatatttagttttttatttttttaaagaaaattgaaatgagagtgtggaatatatattgttttgtgttttgtttttttattttttgtattttggagatttttttatttgtgtgtagagagagttttttggttttttttttattgtattttgttttatggatgggttattttttatttaattagtttttttaggagggatatttgggttgtttttaagtttttgttgttttaaatagtttgtagtcgatagttttgttttcgttttgttttgtatcgtgttaggatgttaggtaaatttttagaagcggggttgttggttagggttgagtagcgttaaatttttttttagtggcgatttagtagttgacgtttttattatttgggaggagtgtttagcgtttttatagttttgtcgatagataggtgtgttatttcgtaagatttttgataattttaggtgaaatatggttttttacgattatattaatttgtattttttttataaggaggttgggtatttttttttatgagtaaggtttttttattaatgatttttttttttgtgaagtgtgtgttttaaattttttggtttattttttgttgagtttttttttgattgatttgtaggagtttattatatattagttttttgtttgtgataagaattgtaagtgagtatgttttttaggattttattttcggtgtttttgttatgtagaagggatttttttttttttggagaggaaggagttttttttttttttttttaaatggttttaggattttgaattagggataaaaataaaagttttgtttaattttaaggttataaggtaattttttttttttttaatattttattgttattttttattaaacgttgagtggatgtaaagaatacgtatagaatatttgtatggtttaaggtgtttttttttgggaattatcgtttgatatttaattttttttttttttttcgtgtttaaatttgtattgtttagttttgttgtttgttttgatatggaaataagtagaattgtgtttgtattttttttttttttttttttttttttttttttgagttggagttttatttcgttatttaggttagcgtgtaatggtataatttcggtttattgtaattttcgttttttgggtttaagtgatttttttgttttagttttttaagtagttgggattatagatgtttgttattgcgttcggttaatttttgtatttttggtatagatagggttttattattttggttgggttggtttcggatttttgattttgtgatttattcgttttagttttttaaagtattgggattacgggcgtgagttattgtgtttggtttcgggtagaatgtttttaaggtgtattcgtgtcgtagcgtgtatcggtattttatttttttttattgttgaataatatttcgtcgtatggaggtattgtattttatttatttttgtatttgtgatagatgtttgttgtttttattttttggttgttgtgaggagtgtatttttgggattagggttattgtgtgaagtaggtatttttttttttttattgtcgtttgggattttttggtgattgcgttattgtttttgtttttttgttgttgagtatttgggttgtttgtttttgtgtttatttttgttttgtttttttggtgtatacgtgtttttgaaggatgtatatttaggagtggggttgtttgggcgagcgtttgtttatgtttagttttatttaagaggtgtataggggttgtgttaatttatatttatatttttattttttatatataaattttttttttatttgagattttttttggttgtggtgtgagttatggtgtttttttttaggtggttagtcggttgtttagggatattattaatgaatagttttatttttttttttgatgtgaggttttgttttttttttgttttgaattttttttgaggttgtgtttttgggggttgttttggtttgtttgtgttttgttgcgatattgttttattttttttgttgggttcgttgttggttttaggaaggagatattttgtcgtttagtttagttttagttttttattttatttatttatatagttagggaaattgaggtaaggtatattttgggtttggttttttttgtgattttttgagttgggtagtgggtttaggtagagagcggggttttggtgtgtgtgagggtatttttttagagttttttgagaagttaggagtggattgggggagacggggaggtgtaggtaggatttttgatttatgttggaggttagtagagtcggggttgattttaaggtcgttatttataggttaggtgattttgagttgggtttttagttgggtttttgtttttttatttttataagggggttgagaatcgaatgagatattggattagaatgtgtagggttgtttttgaaggtattagtattgattgaggggttgttgcggttgttttatttttattttgtaggttagggtggttttggtttgttttggtgtgttcggtagtttagttttattgggttttttttgtacgtgttattattttaattcgatagattttattgtttgaatttgttttaggatttagtttttttttttaggtggtttgtgagttttttgtatatttgatttttgttttatttatatcgggtttttttgtcgttttaatttgtggttttgggtagtttttgtgtgttatttttgttttttatagcgttgattttttttttttttaggaattttttgtcggggtttttttgttttttttttagttttttttaagagttttttaagggtagatggtttcgggttcggtatacgttagattttagaaatgtttagtggggcgtttgggattgtttggtttttgagggtgattttggttttttgtttttttgtttcgggtagg

SEQ ID NO: 90 - DNA, 15923 bp, Artificial Sequence
  chemically treated genomic DNA (Homo sapiens)
tttgttcggggtagggaggtaagggattagggttatttttaaaggttaggtagttttaggcgttttattaagtatttttgagatttggcgtgtgtcgggttcggggttatttgtttttgaggagtttttgggggaggttgggaagggggtaaaggagtttcggtaaagggtttttgaggggaaagaaggttagcgttgtgagggatagaggtgatatataagggttatttagggttataggttggggcgataagaaggttcgatgtgagtggggtaagggttaggtatgtaaaaggtttatagattatttaagggagggggttgagttttagagtaaatttaggtagtgaggtttgtcgggttgagatggtggtacgtgtagaagaggtttaatggggttgggttgtcgaatatattagaataagttaggattattttggtttataggatgaggatgggatagtcgtagtaattttttagttaatgttgatgtttttagaggtagttttgtatattttaatttagtgttttattcgatttttaatttttttgtagagatgagaaaatagagatttagttagagatttagtttaaggttatttgatttgtaaatggcggttttgagattaatttcggttttgttggtttttagtataggttagaggttttgtttgtattttttcgttttttttagtttatttttggttttttaaggggttttaagaaaatatttttatatatattaaggtttcgttttttgtttgggtttattgtttaatttaagaagttataagaaagattaagtttaaagtgtattttgttttagtttttttggttgtatgggtggatgagatgaagggttggggttaggttgggcgatagggtgttttttttttggggttagtagcgagtttagtaggaggagtaggatagtgtcgtaataggatataaataggttagaataatttttagggatatagttttaggaggagtttaagataggagaaaggtaggattttatattagaggaaaagatgagattgtttattaataatgtttttgaataatcggttggttatttgagaaaagatattatggtttatattataattaggagaaattttaagtagaggaaaagtttgtatataagaaataaaggtgtgggtgtgagttggtatagtttttgtgtattttttgggtgaagttgaatataaataaacgttcgtttaagtaattttatttttgagtgtatattttttagaaatacgtgtgtattagggggataggataaggatggatataggagtaaatagtttaagtgtttagtagtagaagaataggaatagtggcgtagttattagggaattttaggcggtagtgaagaggaaaggatgtttgttttatataatgattttggttttaggggtgtattttttatagtagttagagggtggaaataataaatatttgttatagatgtaaggatgaatggaatgtagtgtttttatgcggcggaatattatttagtaataaagaggaataaagtatcgatatacgttacgatacgagtgtattttgaaaatattttattcgaggttaggtatagtggtttacgttcgtaattttaatattttgggaggttgaggcgggtggattataaggttaggagttcgagattagtttagttaaggtggtgaaattttgtttgtattaaaaatataaaaattagtcgggcgtagtggtaggtatttgtaattttagttatttgggaggttgaggtaggagaattatttgaatttaggaggcggaggttgtagtgagtcgagattgtgttattgtacgttagtttgggtgacggagtgaaattttagtttaaaaaaaaaaaaaaaaaaaaaaaaaagaagagtgtaagtatagttttatttgtttttatattaaaataggtaataagattggataatatagatttaaatacgaaagaaaggaaaaagattaaatgttagacggtggtttttagggagggatattttaggttatgtaggtattttatacgtattttttgtatttatttaacgtttaataagaaataataatgaaatgttagaagaagggagaattgttttatagttttggggttaggtaaagtttttatttttatttttgatttaaaattttaaagttatttaaaaaaaaaaaaaaaaagtttttttttttttaaaaaaaaaagaattttttttgtatggtaaaaatatcggaaataaagttttaagagatatatttatttgtaatttttattataggtaaagagttaatatgtaatgagtttttataaattagttagaaaaagatttagtagaaaataggttaaaggatttgaaatatatattttatagagaaagaaattattaatagaaaagttttatttatagggaaagatgtttaatttttttgtaagagaaatgtaaattaatatgatcgtgaaagattatgttttatttaggattgttaaaagttttacgagataatatatttgtttgtcggtaagattgtgggggcgttgagtattttttttaggtggtggaggcgttaattgttgagtcgttattggagggggatttgacgttatttagttttgattagtaatttcgtttttgggagtttatttgatattttagtacggtgtaaaataaggcggggataaggttgtcggttgtaggttgtttggaatagtagaagtttggaaataatttaaatgttttttttgagggggttgattaaataaagaatagtttatttataaaatagaatataatggaaaaagaattaggaagttttttttgtatataagtggaaagatttttaagatataggaagtgaaaaagtaaagtatagaatagtgtatattttatatttttattttagttttttttaaaaaggtggggaattaagtatttgtgtttggttttagttatataaagaaatattgaatagaaatatgattgtatagggttaagtgggttagggaggaaggggtgggggacgttttattggatattgtgttataagttgtaattttttttaatatttttattgagatgtaatttagataattttttaattgagttatttaaagtgtgcgatttatcgtttttagtatatttataagtttgcgtagttattattataattaattttagaatataggtcgggcgcggtggtttacgtttgtaattttagtattttgagaggtcgaggtaggcggattataaggttaagagattaagattattttggttaatatggtgaaattttatttttattaaaagtataaaaattagttgggcgtagtggcgtacgtttgtaattttagttattcggtaggttgaggtaggagaattgtttgaatttaggaggtagaggttgtagtgagtcgagattgtgttattgtattttagtttggcgatagagtaagattttattttaaaaaaaaaaaaaaaaaaattaaaaattagaatatagtatttttttattagttgatattttcgtattagtatttgttgtgggtttcgtatttgtcgatttaattatggattaaaaatacgtggggggagaaaataaaaaataataatataataataagaaataggttgggtgtagtgatgtataattgtagtattattattttgggaggttgaggaggattatttgagtttagcggttcgagattagtttaagtaatatagtgagattttatttttataaaaaatataaatattagttaggcgtggtagtacgtgtttgtggttttagttatttgggaggttgaggtaggaggattgtttgaatttagtaagttaaggttgcggtgagttatgattatattattatattttagtttgggtgatagagtaagattatgttttaaaaataaataggtaaataatataaaaattaaaaatatagtataataattatttatatagtatttatattgtattaggtattataagtgatttagagatgatttaaagtatatggagaaggttaggtgttagtattttgggaggttgaggtaggcggattattaggtaaggagttttagattagtttgattattatgatgaaattttatttttattaaaaatataaaaattagttaaggtgttttcgtgggagcgtttgtaattttagtttttaggaggttgaggtaggagaattttttgaatttgggaggcggaggttgtagtgagtcgagattatataattgtattttagtttggcgatatagcgagatttcgttttaaaataaaaaaaagtatatagaggatgcgcgtagtttatatataaatattatagttttttatattaggaatttgagaattagaggattttggtatttgagggggattttggaatttattttttataggtatcgaaggtggagggttgtattttttttttttttttgagatagggttttaatttgttatttaggttggattgtagtggtattaatatagtttattgtagttttaatttttggggcgtaagtgagttttttattttagtttttcgagtagttggattataggcgtaagttattatatttggttaatttttgtattttttgtagatagggtttgttatttttaggttggtttttaatttttgggtttaagtgatttatttgttttagttttttaatgtgtaggaattataggtatgagttattgtgtttggtttaggagggttgtatttttattattttgaaaatatttgtagtttttagtggggtaaggttttattttttcgttttattttttgttttttaattaatttatattttgtttttatggatttgttttttttggatattttatagaaatagaattaaatagaattatataacgtgattttttgtgattggttttttttatttaatatatttttgtgttttgatttttgagtatttggatttttaataaaagaaaaagaaaaatagaatgaataatttaatttagttagtaataggaatgaaagtattttgtaaattgtaaagagtttttgatatattaatgttcgttattgggatgagttatataggtttttaggggatagtgaggatttttagagttttttggttatgttttatttttttatgagtagagaggtaggagagtgtagcggttgaagtgtgagttttagagttaatttattagagtttaaattttgattcggatattttttggttaggggtcgtcggataaggtattttatttttttgagttttaggtattttatgtgtaaatcgatgatattatttggtttattgggatgttttgatagataaatatgtttataagagtgtttggtatatagttaatgttttatgatgttcggtttggtgggaagtgtagtttttaggttagagatgagtcggtgtttatttagtgggaggaggggaagagggaataagttatgttatgaggaaaggagagttttcgggagggtaggttgtaagggtttttggtttttaaataggattgtattggatagataagagaggttacggtataagtagaggtttaatagtagtaggtgtagcgggaattatggggtggtagaaaaagatagtggaagaggtgggtagggaagagatttgaagggttttgaatggtcggttaagattttggtttttagtttgaggtattaagggttatgtttaggtgtgtgattataggattttttaatcgtggtattattgatattggagttggagaatttttggttgtggggttgttttgggtattgtatagtttaatagtatttatgatttttatttattagatgttagggtatttttttttttttgaattgtaataattaaaaggtttttagattttgatatatgttttttgggggataaaaattattttgttgaggttatttggtggatacgaaagggttggaggaggttagaggggtagtggaaggtttgggaaggttattatagagattaggtaagagttgacggtggttttgtttgggtagggtgtagaaattgattgatattttggaggtagggtttgtagtatttggtgattcggtagatgtgtgtagggaggagaggtgttggggaggtagtggtagatagggttttttttttttcgagtttttattttatttttcgagtattattgtttgtatttttttttttttttttttttgagatagttttattttgtcgtttgggttggagtgtagtggtatgatttcggtttattgtaatttttgtttttcgggtttaagcgatttttatgttttagtttttcgagtaattgggattataagtagatattattacgtttggttaatttttgtattattagtagagatggggttttattatgttggtcgggttggttttaaatttttgattttaaatgatttgttcgttttggttttttaagtgttgggattataggcgtgagttattgtgtttggtttattgtttgtatttttgtttgatatgtggaaaaatagatattaaaggttaaatgattatatgttataaattttttagggatagggatttaagttgttaggtaaagtttttgattttcgtaagtgttggaaatttgttagagttgtttttttttgtagtaggttttgttattaatgagttttttggtggtttttaaattttattaggaagtcgttaggtttttttttgagtttttttaatttttataatcgttaagttgaggtttagaaacgttaggtaattggtttaaggtttgatagaattggatggggtatagttagaatttgaaatttagtttttaaagtttttgtgttttttttttatttaaattttaggtgaggttttttggtagaggttgtgtttgggagtcggttgagtatagatgtaggggtgttttatatgcgaaggtttagaagttagaattgttcgattttaggaatagaagatgttttatgagttagatatagtggagggaatgttagtttttaaaataaatttggatatagaaaagggtttggatttggttggttttagaggggttgggaatttggtaagttttaggtggttacgggcgtggttagttttatacgggggtttatttgatatttatatagatatatggatataatcggggatatgggtggattggaggataggggatgaagtttatcgtttcggtagtagtagcggcggtaattttagtttttatttattagaggtttggagtattttttatattaatttttatttttggaattatttgttagcgaataatattgttcgttattttttttagagttgaggattagagattttaagaggtttagagagttttttaggatgtaagtttagtaaatgggtttagatttggttatttttggattttgtatgggtaatagtagtgttttaataaagtaggttttatttttttggttgattttttatgatgtagagggagaaggggtagaagttatatttatagtgtgttggttttcgggtgattttggaaagtagggtttggaggacgtatttagttttatcggtagaggttatttggagttaggttttggtagagtattggggataagaatgtggttagagtgttgaataaatggagttagtaaggttggtcggggacgttttataattattattgtttttaaattaataagataggggtttaggagggtgttggtaggatggtgagttagggtagggttttttgaggtttttgtattagtgaagatgggagagttaggagtttgattcgtttttttagatttagatttagaggatttagatttttcgaaattaatttcgaattagaaattaagattaatggtgggggcgtagcgtatagtattattgttgggtttagtatacgtgggtattttatacgttacgattttattattttgtacgattttattttgtagatggggaagttaaggatggataaggttattatttgtttaagcgtatatagtttataaaaggaagaattagtatttaaatttaggtcgaatttattttagagttagtataaagaggagtaaatttgtatttagtttttaaaatgaatgagatgattatgtagataaataggaagttttgtttttagggaggttttattatataagattttggattttttgagtgattttgggttgttttcgttttagttatgggtttgttttttgtttgtaaaaagagcgacgggatttgggatgggcgttgtttaggaataagtttgtgttaagagttgtttttatgttttttgatttttagttagtggttttagattttagtgtttagtttaatagttttaataatacgagggttttttatatttattttaattttataaatagtaaggagttgggtatatttattttagatgagaagattgaggtttagaatgatatggtgatttattttaggttatatagtaaatgaggaatacgttggggatttgaatttggattggtttttatattttagttttttttttttttttttttttttttttttttgatggagttttgttttgtcgtttaggttggagtgtaatgatacgattttagtttattgtaatttttattttttagatttaagttattttttcgttttagtttttagagtatttgggatataggtatgtgttattatatttagttaatttttgtatttttagtagagatagcgttttattatgttggttaggttggtttcgaatttttgattttaagtgatttgttcgtttcggttttttaaagtgttgggattataggtgtgagttatattttttggtttttttttttttgagatatggttttattttgatatttacgttggagtgtgattttagtttattgtagttttaatttttatggtttaggtgatttttttattttagttttttgagtagttgagattataggcgcgtgtcgttatgtttagttattttttatattttttttgtagagatggggttttattatgttgtttaagttggtttcgaatttttggattttagtaatttgtttgttttggttttttaaagtgttggcgttataggtgtgagttatcgtatttggttatttcggtatttttttattttgttgtgaggttattgtgtatgtttgtgtatgttataatttttatttttttattggtttgtttgattagtttttagtgaatatttattgcgttgggtattagtagatattattaaatgtttgttttttcgggagtagtttggggtcgtagagaaaaatttttaaattagttgtattatatattttttttttttttgagttttagggtgtttataggggaggtttatttattaagtatttagtaatgaattgtatatttggttggtattttagagtttataaaatatttttttatttgttattttatttttgttttggaatagtttttggttagttaggtagtattattataaattatagatggggatattgaggtatagaggagttgtatgatttttttatagttatataaagttacgtttagaacgtagagttagacgtttaacgtttttttcggtatgttttgttttttacgtttttatttatgtggagggttgtgggtatataggttgtttttgttagttttttagagcggttttgggaggttaatttgattatttgtgttttagttttttgatgtgttaaataaataatttggtattatttttaggggttgtagaaagtattttgtaaggaagtggttagggaatttttagttttcgttttcgtttttattgaggtttttttagtatattttatattttaaggaattttaattatggggtaatagaaatttcgaagttttgagttgatggatacgatatatagatttggtgttttttgtattggatagagttgatttttattttttaaggagggtaattaaggtatagaggtgtgtttagtttgtttttgagggtgtagggataggaatgaggataattcgtagaagggttggttattttattttagtaattttaagtttttattcgttaatttataagtattaatattaaatattttttttttggattaataagtataaaggaagggttaagatttatgatcgtgttttttagaagtggtattgaaaggcgtaagttttattttttttaggttaaggggaggattgagaggttagtgatttgtttaaaatgtaatattatagtatatttatatttttaataggaagtatattcggagagaaaaagagagagagagaattttttaatgaggagatcgtatttttttattttattttcgaggttataggggagtttgcgttattttaaagtttgtttgggttgggttttaggaggttaggatatagagaggggggtttggttaggggtttagtagtaatttaagttttttttatttattaatattttttttttaggaagtaggggagaggatgtgaatttcgtttgggtttttttatatttagttggtgatttagttgattcgggatattgaggtataaaagaatcgtatgatttttgtagaaattggagttaaaaatattttttagtgtttagtttggtttgcgagaggagttttttggtttgtttttcggtaatttgttgtttttttttttatttgggatggttttggggtaaattatgtttttggagttatattttgattttagatttttaaattttggggttttttttttttttggttttatgggttggttttaggggttttagttggagttaggaatatttatttaggtagatattttcgaaggattcgttttcgatttttcgttttaggcggtatttgttttttatacgtagttttatggtttatttttgttgtagaggaagtaggaatatgagggttagcgacgtggggagtcgggaaaggggtttagtttattaaggttaggtagagttattaggaattcgaaaatttgtattttcgaagattatattttgtaggtgttaggtggtttatagtttgtattttatatatttggggaatagttaaggtaggttgaggataggttttagtgtggttagagaggaagtagttaagtaagtatgtttttgggggatgtttatttaggggttttttaaaagaagttttttaagggattataacgggtattagtttttttatattttttattttttaggtttttatagtttggtttggtttttttaagtattgtttttgtttagaggttagatttcgttagtgtttagtacgttttgtaggagaaagtcgtattttttattggggggaaggtagaaaagaatgttttcgattatttattttttagttatttttttatttttacgttatgatattaagattttatacggaggtttatagtcgtttggataaattgtttggagttggcgttttttaagattaggagggttttttaagagggtttttatagaataataaaggggattgagttagggttttagtcgtttgtttcggatgggtgggaggaggagttttgatgtgagtagtttttttttttttttagggttaggggggagttttttgttttggtttggggtagaggagggatttttttgttttggtttggggtaaaagttcggatattttgtttttggttagtagaggaggaaattgaaggtttggaggtagtgttgtcgtggggatagggattagggattgtagtaaatagggggaggggtgtttataagaggattagtattaaggattagtaagagggaattttttttatagatagggtatttaggtttatagaggttatgttatttgttttatattattttgtagatggtatagtttcgtcgaggatagggtttcggttgttttatttggtggttttttatatttataaatagggtaaaataggaagattgtagagtagttgtgttggtatagaagattagttttttgttcgtgttaagtgttgtttttaataattaggttagtttgggagggagatggattttagggatagtgggtagattttaggagagatagggaatttcggtatttggtttttaaggagtttattagttttttattaataattacgaggtagggatttttattagagttggttaaattttgggtttttaattaagggtcgttgtttatatgtttggtttgttttagttgaggtgttacgttgttaggggaatatagtttacgtttgtaggaaatttatacgttatatattttacgtatatatacgtttagtttttcgagtgtgtatattttaacggaagaaagaaaagtaggtatatatagtgagttttgttggggggtaagggggggtgtgtacgtaatttttttttaatattttagtttattttttgttaatattaatttagagattatatatggtagttaggaaattcgtaggttaggaaaggaatataaatatattcgtattttatattatataaatatttacgtcgggttatataaatattcgtgttttttgtttgggtgttttatataaatatattgtatatgattttttagtttttttttatttatcggttgtttgtagagaacgagagcgggaaggggtaagttttttaggattttttgattgttatgtgttagttatttagatttttagtcgttttttaatattttaggggtttaaggtttttgggggagtttagattgtttcggtattaatatttaaaaagttttttagaggagagtagaaaagttttatttaggaatggagaggttttttagtttttttgttgttttttttatgggggagggggggagataaataaagtggggggaaaagtggatataaaggtttaagagttttagtaggttaaaaaaattagataaattattaattagtatggtatacgggtagtgttttttatttttcgaatattatcgtttatttttgagtcggggtttttgtttttcggacgattaaaataaaaattgaagggatattatagaaacgaaggtaaaggagatttaaatataggtattgtttggaagtaatttgagatatttgtgttttttttttttttttttaaatttttttttaggaaggaggttatgttaggaagaaaatatgtaagaaaattaagggaaaagttggggagggggtttattttatttcgagttagggtattaataagagtttgggaattttttaacgatatttagatattgttttgcgttttttagagatttgtaagatattaattttttatataaaaatgggagaattcgattcgataaataatttttatttttttttttttttttataaagaaaaataaattagtggtttggtgattatatatttttttattttaggatttttaaacgttcgttatttaacgagcgggcgtagttttgcgaatttttaggttcgggcgtcggggtcgggagagtagggggcgtcggtgattgttcgatgaaacgttacgcgggttcgaattaatagtattcggcgtttagtattttaagtttttttttttagcgtttttaaattatagtcggggtggtcgtttggtcggtcggggtttcggagggtttagcggggggaagcggaggtaggtcggtcggggggtttttttcgcgagtttgtaaaataataggttttttttttttcgtttttagtcgcgtttttgttttcgtcgggtcgagcgggcggcgttcgggttgttttttttatattttagcgcgaacgcgcgtgtgtttgtttttttttttttttttttttagtaaaaataaagaggttgagggagttcgattttttttaggtttgtattttttcgcgggttcgcggtttttcgatatttatttcgtcgggaaggcgtcgatgtcgggttattgttcggggggttgtcgcgggcgggggcggttcgtcggggcggatgtcggaggattcgcggagtcgttcggcgcgttagtttttttcggtttagtcgtcgtcgtcgtcgtcgtcgtcgcgtttcgttcggtttcggtcgggttttggttttgggttttcgtcgtcgtcgtcgtcgtcgtcgtcgttttttttttttcggttttttgttcgttcgttcgttttcgtcgtcggttcgcgcgttttcgtatcgcgcgcgttcgtcggtttttattgagtttcgggttcgttcgttgatgttattttcggttcgtcgtcgtcgtttcggaggatttaaagggttcgcgtttttcgcgttgggggtcgtagttgcgagacgtagttttttagttttagtgtaggcgcgcgggtttacgcgtgggggtgggggagtatatagatattgatattttaatgtagtttagggtataggtggaaaagacggggtgcgggggggatagagggaagaggagggcgtataaaaagcggaggtgaggggatgggaggggagggtttagatttaaagtttttttttttcgtttgttaggattttttttttttttaggtagagtattgggtttttgcgaaaataggcggttatttacgatattgtaaaagatgttagattgttggaggtttagttcgtttttaggtttcgagtgtcgtagagaatataggttaggttgatttagggtaagagatttgaggagatagttagggatgtcgatataaggtttagaaaggtagtttgggtttatatatttttttttcgtggaaaaacgaagggtaaagattttttttttttttttttgaagtttaaattgtgatgggtatagagaggattttttagattttaattttatttttttttgttgaaggaggggtgttataagtattaaagtatcgatatttgagtttgggtttcgagtggtgtacgtttagttaagttattttttagttttgagtttgggtttttttaaatagtaaatgggaggaaggattttgttttttttaggttatagaattaataaaagtttttatcggtatgtagagtcgcgatgaaaggttgtagaataaagttattaaagtgatgatatttatattgagttatgtaaagtttttaattatgatatatttatatttatatagttgtgattgtggatacgtaaaatgtttgaggttttgcgtttaatttcggaagtatagtttttgggaggagttatttttataatagtcgtatttttttttttcgaggttgagggattgagttatatacgtgtttaaacgggtaggagttttatagattaagttttttcgtcggttaggaaattggtttagagaggggaagggttttgtttaggattataaagtttaataggatagttttgtttttttagcgattattaggaaattgggtttatttagagtttatttttaagagtaggagagtgagaagtttttttttaggagggtttgtttttagtgatatttttgttagagtagggggttattagttaggtggtgggttttatttggtttgcgcggtgttttttgttgttgttttgttaattaatttttaaagtttttttttttttttttgttttttgtttttgttggttttgagatagagtttcgttgtgtggtttaggttggagtgtagtggtttaatatcggtttattgtaatttttgttttttgggtttaagtgattttttagttttagttttttttttgaatagttggaattatagatgtgtattattatatttggttaatttttgtttaggattatatagtatttttagtagagacggggttggttaggttgggttggaatttttgattttaagtgattcgtttgtttcggttttttaaattgttgggattataggcgtgagttattatgtttggttattttttaaagttttaaaattggaagattttat

SEQ ID NO: 91 - DNA, 5942 bp, Artificial Sequence
  chemically treated genomic DNA (Homo sapiens)
taaggattaggattttaatataaatttagttttttattttttcgggttttttatgtttttttaaattcggtcgttttttatagttttttgtttttgggtttttttttatattttttattatttttttatttcgtatttaagattttatgaaaggtttttttagaaaagaaaaaatgaggagttttgcgatttgaatagtttttttttgttcgtttgtaaatttgaatttttggattttataatagtgagttttttttgtgtttattattcggtatgagtaagataagggggtgggtggtgggagagtggggaagtgtgggaaagaaaagtgtagataaatgggtggaataaagaagtttgatttaaagtttagatttgggggttagagttttggttttagtttaattaagtgtataagtttgataatcgtgggtttttttattatattggttttttttagtaaaattttatttatttttatttttagaggttttgattttttttattattttgtattataatatttgataatatgggtcgggagtggtggtttatgtttgtaattttagtattttgggaagtcgaggtcggcggattatttgaggtcgggagtttaagattagtttggttaatatggagaaatttcgtttttattaaaaatataaaattagttgggcgtggtggggtatgtttgtaattttagttattggggaggttgaggtaggagaattttttgaattcggggggtagaggttgtggtgagtcgagattatgttattgtattttagtttgggtaatgagagcgaaattgtattttaaaaaaaaaagaaaaaaattgataatatggtattttttttttttagttgtgaattttttgagggttgggaatgtttttatttgtatttttggtatatagtatatggatttatgtttgtgaaattagtgaattggttgtagttagggaattttttttgggggaagtgagatttgtacgaagttgggtaatttttggtttaggggggttgaaagaataggtgggggatttttaggagggtttgggatttgaaagtgaatttagattggtagggaggtgattttattatgttatttggagaggttgttttttttgatttaggtgggatttgtatgtggtttttaggtttttgtttggtttttttaaaatagtttttagaaaagtgaataaattataaatggttgatttatttttgatttttagttcgttttttacgaagatagagtttattgattaaaaattttaggatttgtatttgggtagattttaggaaggggaagttaaagggtttaggttagaggtttaagtttagattttagtagtagattagggttagattttattaaagttagaattcgaggtttatgtaagtttttagatttcgtttttaagttttgtttttttttttttttttttttttttttttttagtttagtgtggttattcgagggggttttttttttttagttatagttcgggtattttaagttgggaaatgtgttattcggggttggggtgttgatttgtagtttagttttttttggttttttttgaggatagtggggatgggattggtacggtttttatttcggggttttagttttatttttggtttttagtttttttttagtagtagtttgaagttcgggttggagatgggtattttaagtggaaggttgggaggttgaggattttgcgatagtgatagtaggtgagtagtggatgtgcggtggttggaattttggaagtgggtgttatagttttcgtagtattggagggagggagtaggagatttgtagagaaagaagaaaaagtattaagggtaggggaaggaaaaggggaagagttgaggttttagagggggttggtagggtagaataggatttttttagtttttttgttaaggaataaattgttagttaggtatagtggtttacgtttgtaattttaatattttgggaggtagaggcgggtagatggttttgagtttaggagtttgagattagtttgggtaaaatggtaacgtttgtttttttttttttttttttttgagatggagttttgttttgttgtttaggttggagtgtagtgttatgattttggtttattgtaatttttattttagcgatttttttgtattagttttttaagtagtcgggattataggtatatgttattatgtttcggtaaagtttgttttttataaaaaatatgtttgagtttaggaagcggaggttgtagtgagttgaaattatattattgtatattagtttgggcgatagagtgagatgagtgagattttgttttaaaaaaaaaaaaaaaaaaaaaaaaagggataaattgtttttttttttatttaatagtgagggatttaggttggtttaaaggtggtggtgagttatttgaattaattgtttatttagttatagattaaattttttattttatttttttttttttttttattattgtatttgatttgttttaaaaataaatttttttaaattattgtgggatttagagtagaatagttgaaagaaaaaaatggtaattagatttagtaaatttttgggtaaggggagggatattagttataatgattatagttaatatttatgtattgtatattatgcggtatgtattattttagtattttatatatattaatttattgaattttaataacgatttttattatttttatttttaagatgagaaaattggaatatgtagatattaggttgtttgtttaagtaagtggaattaggttttaaatttagggagtttatgtttataattatttgattatattattttgttaatttatatatgaggataaggaaagaattttttagtattgtgttggggcgtttggtgtggtgtggttgggagaggtagaatataatgagatatgggtttgagttaaagtttttttttatcggtttttcgggttttttgtttttttatggttttttttgattatgcgggttattttagggaagttagtttttttagcgagttgagtcgtatttttgttatttagtttatagatttttatttaggtagttttacggtttaggagatagtttatagttgttttttggttcgttcgagtagtatatattagtggggtttattagaaggtatttcgggcgttgatattttttttagttttttttgttttatgcggttttagtagttttttaagttttggtaggttttttttttgggttgtttttagtattcggtgagttattttatttttagttttaagggattttttttgtttatgtttttttgatgttttttttgttattgtttttgttgttggtgtttttattattttttttttttttttttttttttttttggtaggtttagtttgagatttttgggagttaggagcgttgtttttatttttaattagggttttatagaaagttcgggttgtagttttatttagggtggattttggtttttcgggttgtggttgttgttgtttatttttttagaggtcgttggggttagtggttggggtgaaggtgatgagtaagggtcgggatatggtttttgggagaattgagaaaatgatattaggtaagggaaggatgagataagtaagttaagttcgtggtgattttgtagtaattatagttttagagatttgttgggatgagaaaaagtagttaaaaatatttttttgttattaaagtaattttataatttaggattttgtagggtttaagggagagagattttgcgtaaaaatatggaattttataatatcgattttgttttttagtaaagattaataaaattttatgagattgttgtttagaggttttgcgttcggtttttatttttatttttattaataataaatattagtttttttttgaaattatttttttatttcgtaagatatattagtaggaaaaaaaaattagtttggttttttaagtttttcgcgattttatttcggagttttttttttttaaataaaaatagatgggttattttttagaagatttcggggagagttttttatacgtgttgttgtgtagttttcgtatcgtaaaatggcgttattttaattagaagagttgatataattaaatagttatacggtacgaagacgtatgcgtggcgataataataataaaaattataatttatattatttgagggttcgggcgtgcgtaaagtttcgggtttagtttttcgcgttggaatttttttaatagtaaacgagtaaagtttcgcgcgtttaggtggcgcgagtattaggatttgtcggttggggttttatttttatataacgtttttataatgtttttcgttttttttaacgtggttttcgttttaagtttattttttggagttaggaatttattttgtgggttaggaaaggtttttaggaggcggagggaaatttgtggaatgtcgagaagtcgtgtaatgaaataacgttacgtttgttttttattattattttgattagggttcgaaggttatatttagagtttaaggggaaatggagaagtgtaaagggacgagtagaatggttggtattattttaggttagcgtattgggacgttttagtttttatatcgtttattttattttatttaagtttttacgtacggagttaagtcgtatttttttttttatgaggtaggagttcggaggaaatagtatgttcgttaagggtttttggcgggattgattcgtattaggggtttaataggtaataaggatttagcggattggtcgaggataggttagttttttgggtagtagcgtcgcgtcgggattagaggggaacgtgaggagagttgcggaaagagatttagtttggttttttttttttttcgttttaagttagtttttttatttagtgagtataaaattgtattgtttagattttcgggtttcgaacgttatatttggttttcgttttcggtggtttttcgttgtgtttcgttcgtaagcgttttttttcgggttttcgtgatagttaggtcgtgcgcgggttattttgggattggtagttcgtttttttttatttagttagtttttttttttatcggggatttcgtgtttcggtatttatcgcggtatttgatttttggcgtttgcgtgttgtttttttttttattttttttaatttttattttttttattttatttcgtttgtcgcggtcgggttcgcggtttgcgttgtagcggtcgtcgtcgttttttggaagtagtaatttttttattttattttagttttggttttcgtttagtcggtgagtttgaagtcgtcgttgtttcgagttttttgtcgttgggagcggtatatggggttttcggattttgatgtgggggcgggggaggaagcgattaggttcggtacgaaggagggagaggtggtttgaggagcggaggggggatgtgtggatttcggtgaaagggatttgataatcgtttttaattcgtgagaaaaggaggagttcggtttttgtttgagaatgataaatttggaaatttttgggaaaggcgtgggggttatgtagagatttgtattggtagggagtttgagtcgaggtttttgtcggagttgatatagaggagagagggttttggttttcgggagttttagggatgtgggtcgggttggtgggttaaagtatttgttggttttttttaagtggtgggattttaaagaatgtttaattttaaagaaaaggggttgagatgtaaattagaggagttggagaggagtgttttagagtttgggttgttttaagaaagggtggtttcgaattttttcgtggttggagggtcgaatgtgggaggagggaggatattagaggtagggaaggagaatttgagttttattgatattgttttttttttagt

SEQ ID NO: 92 - DNA, 5942 bp, Artificial Sequence
  chemically treated genomic DNA (Homo sapiens)
gttagaaaaagaatagtgttagtaaagtttaagttttttttttttgtttttggtattttttttttttttatattcggttttttaattacgggagaattcggaattatttttttttaaagtaatttaaattttgaagtatttttttttagtttttttaatttatattttagttttttttttttgaagttaaatattttttggggttttattatttgaaagaagttaatagatattttgatttattagttcgatttatatttttggagttttcgaaggttagggtttttttttttttgtgttaatttcggtagggatttcgatttaggttttttattaatataagtttttgtatgatttttacgttttttttaagggtttttaagtttattatttttaagtaagaatcgggttttttttttttttacgggttgggggcgattgttaggttttttttatcggaatttatatatttttttttcgttttttaggttatttttttttttttcgtgtcggatttggtcgttttttttttcgtttttatattaaagttcggagattttatgtgtcgtttttagcgataagggattcggagtagcgacgattttagatttatcggttggacggggattaggattggggtggggtagggaagttgttatttttagggaacggcggcgatcgttatagcgtaggtcgcggattcgatcgcggtaggcgaagtggggtggggggagtggaaattagggagggtggggaagagggtaatacgtaagcgttaagggttaggtgtcgcggtggatgtcgggatacggagttttcggtagagaaagaaattggttaaatgagagaaagcgaattattaattttaggatgattcgcgtacgatttggttgttacgaaggttcggaggagggcgtttgcgggcggggtataacgagaagttatcggaagcggaagttaggtatggcgttcggggttcgggagtttgggtaatatagttttgtgtttattgggtgaagaggttgatttagggcggggaaaggaggaagttaggttggattttttttcgtagttttttttacgtttttttttagtttcggcgcggcgttgttgtttaggggattggtttattttcggttaattcgttgggtttttattgtttgttgggtttttagtgcgaattagtttcgttagagatttttgacgggtatattgtttttttcgggtttttgttttatgaggggagaggtgcggtttggtttcgtgcgtagggatttgggtggggtggggtgggcggtgtgagaattggaacgttttagtgcgttaatttgaggtggtgttagttattttgttcgtttttttgtatttttttatttttttttaggttttaagtgtgattttcgaattttggttagagtaatggtgaggggtaggcgtgacgttattttattatacggtttttcggtattttataggttttttttcgttttttgagggttttttttaatttatagagtggatttttggttttagaaaatgggtttggagcgggggttacgttgaggaaggcgaagggtattgtgggggcgttatgtaaaagtaggattttaatcgatagattttagtgttcgcgttatttgggcgcgcggagttttgttcgtttattattgaaaaagttttagcgcgggaaattgaattcggagttttgcgtacgttcgagtttttaagtaatgtgggttgtggtttttgttgttgttgtcgttacgtatgcgttttcgtgtcgtgtggttatttgattgtgttaatttttttgattagaatggcgttattttgcggtacggaagttatatagtaatacgtataggagatttttttcgagattttttagggagtgatttatttatttttgtttgggaagaggaaatttcgaaatgggatcgcggaagatttaaagggttaggttgattttttttttttattggtatgttttacggggtgggaaagtggttttagaaagaggttggtgtttattgttggtgaggatgggggtgggggtcggacgtaggatttttggataatagttttatggagttttattaatttttattaaggagtaaagtcggtattgtagggttttatgtttttacgtaaagttttttttttttaggttttgtagagttttaagttgtggggttattttagtggtaggaaagtgtttttgattatttttttttattttagtaggtttttgaggttgtggttgttatagggttattacgagtttggtttatttgttttattttttttttgtttggtattatttttttagtttttttaaaagttatgtttcggtttttgtttattatttttattttagttattgattttagcgatttttggaaggatgggtagtagtagttatagttcgagaagttagagtttattttggatggggttgtagttcgagttttttatgaggttttgattggggatgagagtagcgtttttgatttttagagattttagattgaatttgttagagaaagaaagagaaagaaaagaagaataatgaaggtattagtagtagaagtagtggtagaaggagtattaggaagatatggataagggagattttttgaggttgaggataagatgatttatcggatattgagggtagtttaggagggggatttgttagaatttaggagattgttggaatcgtatgaggtaggaggagttggggggaatattaacgttcgggatgttttttggtggattttattgatgtgtgttgttcgagcgggttagggggtagttgtgagttattttttgggtcgtggggttgtttgggtgggggtttgtgagttgagtggtagggatgcggtttagttcgttgaagaagttggtttttttgaggtagttcgtatggttagggagagttatggagagataaggagttcggaaaatcggtaaggggaaattttagtttagatttatgttttattgtgttttgttttttttagttatattatattagacgttttagtatagtgttgaagagttttttttttatttttatgtgtaggttgatagggtagtatagttaagtggttataaatatgagttttttggatttaaagtttgattttatttatttgggtaaataatttaatgtttatatgttttagtttttttattttagaaatgggggtagtaagaatcgttgttaggatttaatgggttaatatatgtaaaatgttagaatagtgtatgtcgtatagtatgtaatatatgaatgttagttatagttattatgattaatgtttttttttttgtttaagagtttgttaggtttggttattattttttttttttaattattttgttttggattttataatggtttaaagaaatttgtttttaagataagttaagtgtagtagtgagaaggaggggaaaagtggagtaaggagtttgatttgtaattgagtgaataattaatttagataatttattattatttttggattagtttggattttttattgttaagtaggaaggaaggtaatttgtttttttttttttttttttttttttttttgagataaagttttatttattttattttgtcgtttaggttggtgtgtaatggtgtgattttagtttattgtaattttcgttttttgggtttaagtatattttttgtagaaagtaggttttgtcgggatatggtggtatgtgtttgtaatttcggttatttgggaggttgatgtaggagaatcgttaaggtggaagttgtagtgagttaggattatggtattgtattttaatttgggtagtagagtaagattttattttaaaaaaaaaaaaaaaaaaaagtaggcgttgttattttgtttaggttggttttaaatttttgagtttaaagttatttgttcgtttttgttttttaaagtgttgggattataggcgtgagttattatgtttagttggtaatttgttttttagtagaaaagttgaaaagattttattttattttgttagttttttttgaggttttaattttttttttttttttttttttgtttttaatgtttttttttttttttttgtaggttttttattttttttttttagtattgcgagaattgtgatatttatttttaagattttaattatcgtatatttattgtttatttgttgttattgtcgtagggtttttagttttttaattttttatttggggtgtttatttttagttcgggttttaaattgttgttgagggggggttgggagttaggaatggggttgggatttcggggtgagggtcgtgttaattttatttttattgtttttaagagagattaggaaggattaggttatagattagtattttagtttcgagtgatatattttttagtttgggatattcgagttgtggttgggagggagagattttttcgggtggttatattgagttggagggaggagagaaggagggaggagaaagatagggtttgggagcgggatttaaggatttatatgaatttcgagttttgattttggtaaagtttgattttagtttgttgttgaagtttgaatttgggtttttgatttgggttttttgattttttttttttgggatttgtttagatgtagattttgaagtttttggttaataggttttgttttcgtgagagacgggttgagagttagaaataaattaattatttgtggtttatttatttttttggaagttattttgaggaagttaaatagaagtttgggagttatatgtaagttttatttgagttagaaggggtagtttttttaggtggtatgataaggttatttttttgttaatttgggtttatttttaggttttagatttttttgggagttttttatttatttttttaatttttttggattaagaattgtttagtttcgtgtaagttttattttttttaggaggagttttttgattatagttaatttattgattttataaatataagtttatatattatgtgttaagaatataggtaaagatatttttaatttttaaagagtttatagttggagagggaaagtgttatgttattaattttttttttttttttttgagatgtagtttcgtttttattgtttaggttggagtgtaatggtatgatttcggtttattataatttttgtttttcgagtttaagggatttttttgttttagtttttttagtagttgggattataggtatgttttattacgtttagttaattttgtatttttagtagagacggggtttttttatgttggttaagttggttttgaattttcgattttaggtgattcgtcggtttcggttttttaaagtgttggggttgtaggtatgaattattattttcggtttatgttattaaatattataatgtagggtgataagggaagttaaggtttttagagatgagaatgggtagggttttgttggaagaggttagtgtgataggagggtttacgattattaagtttgtatatttagttgaattgggattagaattttagtttttaaatttaaattttaagttaaatttttttgttttatttatttgtttatattttttttttttatatttttttatttttttattatttatttttttgttttgtttatgtcgggtggtaggtataagaagagtttattgttgtgaaatttaggaatttaaatttgtagacgggtaggggagggttgtttaagtcgtaagattttttatttttttttttttgggaaagttttttatgaagttttggatgcgaaatggaggagtggtgggggatgtggaaaagaatttaggggtagggggttgtagggggcgatcgagtttagggaagtatgagaaattcgggaaaatggggagttgggtttatattaaggttttggtttttg

SEQ ID NO: 93 - DNA, 4661 bp, Artificial Sequence
  chemically treated genomic DNA (Homo sapiens)
ggattcgttaaggattttgattattgcgtgaaagtgttgattgttaggataggaagttagttaagatgtaagtttttagtttagagtagtggtttttggggggtttagggcggatttaagggtaaggttagggtggtagtagtttggggattttggttggtttttttttttgatattggttgaagtttaggtggtttttaattttttttattttttttttttattttttttagggtatttttttttaattaggtaatttttcgagtggtatagtggtgtgaagttatggatatcgggtttttttaattttatgtttttagttttttagttataattttttttgttgattttatagattaacgtattaataagattaattatgatggatggattgttttagtttttttatttgtataaaatttgggggttttttagattggttcggatacgggcgatgtaatagtttttgtggttttagttttgttttttatttattgttaagtataatgatttttttttttgaaatattagtgttatttttatttttgtttttagtatgtgattggttatttttggggagatatttttcgtttttgttataagagttttaggtttgtagtgtgttttttagttgagtgggtagggtcgggggtggtttagttttcgttcggtttttattttagttgtttttgttattgtttgtgtttttgaagagtgttaaattatggaagttttttaggtttttttttgtttcgtaggattttttatttatattaaagttttttgtttttttagcgggtttgtttttttcggaggagatgatgtagaggatttgtgtgtgtattttgtggttttaggtagttcgttttttttagaggaggagtgtaggtttgtttttagtttagcgttttttatttttttttatagtaggaaaagtcggagtttagggagggaacggatttgcgagttatataattggtgatttatattagcggttggagtaggatttttttggggagaagagtattttgttcgtagttagggttttttattaaagttttcggtgttttttaaattattagaattgtttaggattacgttttttaggttttgtttagttgggatttttcggtttttgttttttagttttttaggtttggtttttttaaggtttaggtattttaggtcggttggaggtttcgatttttattttggagaatcgtttattttggaaagaagagtttagattttttttggttttcggagtcgtagggagtgtgttttttcgcgttattttttatttttcgaaatgtttttgtttttaattttagtttgggtaggaatgtggtttttcggttaggggttaaggagttattttggggtttcgtttgtttagggagggtttggttttattattttttttttttagtttttgggtagtaggttatttttgtttaggttttgagggtgtttttttttggttttgtttttattattttttttttattttttgggaaaaaaaaaaaaaaaaaaaaaaaagttggtttaaagtagagagtttgagggttaaatttaattgttcgagtcggaatttatttttgagttatttaagaagttgttttggtttttcgttttttttttaggttttaattttttttttttatttagttttaatttttagtttttattttttagtttttagttttggagtttgtcgggagtaagggggtggttgttattgggttatttagttttaattggttttgtttagtaatgggtaggttttttttgaaatttattatatttgtggttttttttgtgttttatttttttattggggtgatagtgtgatagttgagattttttatgtattttttttattttagtattgaagggttttgaagggttttggaaggagggagtttggggggttggtttgtgaggggttaaggttgggaggcgggaggggggttggattaaggggtggggagaaggggaggaggtttcggtcggtcgtagagagaagtggttagagaggtttaggggatagttagggataggtagatatgtagttagggttttagggtttggataggggttgttaggttttgtgataggaggatttcgagttttcggttcggggaggggttatggtgttgtttgtttaatatgttagtcgaggtgcggttgaggcggttttagtagttggtgttggattcgggttttttggggttggagtttttgttcgatttttttttgggcgtttattaggagttgggcgttttcgaattggtttaggataagtacgtggtcgattttttgtagtggggtgagtgtttattttcggggtttttgtagatggggtgggggtggggtagtagatagttttgggtatagaggtttggttgttgggggggggtagtatggtaggatgggtatggggagatttttttattttggggtttagagtgtggatttgggttttggggtaatatttttttgttttatgttattattttggaggggtagagtaaggttagtagaggttagggtggttgtgatttagagttatggtttaggagttatagtaggttaggttgttaatagttttttatggtttttttgtatttcgttttagggttagggttagggttatgttgggagtttttttttttaggattttttttttaaaagtgggttttatggtttttttttttggttttttgtggtttggggtaagttaggagggttagtatggggtagttgttaggggcgtagtcgataggtaggtgttcggcgttagtttttttagttgttttaataggtgtttaggcgttgggagggcggtgatttacgcgggttttgtgggagaattagttttgtagataggcgttattagtgtttttttttttgcgatttaggagggataattttgggtttttttgggtgtgtttttttttttagtaggttttgtatttatttttatttttagttttaaagtttcggtttttatgagtcgtgtgggttagatattattttcgttatttcgggtttttgcgttttttagtttttttggtttagggtttttaattttttagttgttttataaaatttttttttgtaagggttttttagggtttggggttagggttggaaggaggatgttttcgtttttgttagttgttttgtttgtttaattttttttttaagtttaggattcgggtttattggttattggttttttttatttttagtattttgtttttttggtttttatatgtttggtttttagtgattggtgtttggtttttgggttgtgtgtaataaattgtgtgtgatatttgttttttgttttttcgtttttttttgtttttttttgtgtttatttttttttgatttaggtttggttttttttttttttttttttattttatagatgggaaggtggcggttaagaagggttaggttatttagtttttggaaaaatttttttttaattttttatagtttttaatgatttttttggtttttttttagtagaggatgaagttgggttggtagggtaaattgagatcgggtggggtaggggtttggcgttttcgggaggagtattttttttgtggttcgagttgtatttcgcggttttttttttgttaggtttggggcgggggagggggttagggtttttgttgttttaaaagggtttaatgttttggtttttttttttttttttcgtttttagttttggttggttcgtttttgttggtttattttttcggaatttttcggaattttttttttttttttagaatttattgttttttttttttttttttttttttatatttaattttttttttattttgttttttattttttttattttcgggagagttaggttttttttgtgttttatagtgttttgaggttataagtttttattttagttggtttttatttaggttgtttagtttaatatttttagttataggattttgatttttgagaggtttgattgttatttgtaaataaggggtaggattaaagtattttttttggaggattgagagatgggttggatcggagtatttgagtttgggatatgtgattatgttatttttgtttttttgttttgtttttttttttagttttaaatttagggttttttaaagtgtggtttaagaattatttgtatttgaatttagaggtattggatataattttacgtttgggtcgttatttaggatattttatatgagaacgtgggggtggggttttggttgtatttgaattgttatttggagttagggtggaaggtggaagaattgggttttatttttttttttttttgttttttagggtttgtttttttgtagatttcgttattttattttaattattttgtatatttttggagttttttgggttaatgttttgtttcgtaaagggttttttaggtattttatttttatgggagggtatttttggtttttagaattttatacggtgtttatgtggggaagtttttgggaagtagatagttttagggtgaagttgagaggtagagagaaggggagatagatagagggtggggtttttttttttgtttttagtgttttttttggtgattttcggttttttttttttattatttttttagt

SEQ ID NO: 94 - DNA, 4661 bp, Artificial Sequence
  chemically treated genomic DNA (Homo sapiens)
gttgggggggtggtgggggaaaagaatcgagggttattagaaagggtattggagataagggggaaagttttattttttgtttgtttttttttttttttgttttttagttttattttaggattgtttgttttttaggggtttttttatataaatatcgtgtaaggttttgggggttaaaaatgtttttttatagaggtgagatgtttgagaagttttttgcgggatagggtattggtttagagggttttaagggtgtgtaggatggttagggtggggtaacggagtttgtagaaggatagattttaaagaataaggggagaaggaaataagatttagtttttttattttttattttgattttaggtgatagtttaggtgtagttagggttttatttttacgtttttatgtagaatgttttgggtaacggtttagacgtggggttgtatttagtatttttagatttagatgtaggtggtttttgaattatattttggaaaattttggatttggggttgggggaaggaataggatagggagataaaggtagtatggttatatattttagatttaagtgtttcggtttagtttattttttagttttttaggaggagtgttttagttttattttttatttatagatgataattaggttttttagaagttaaggttttatgattaggaatgttaaattgggtagtttgggtggggattagttggggtggaggtttgtggttttagggtattgtggggtataggggaggtttggttttttcgggggtggaagaagtggaggataggatggagagagggttgggtatgggaggggagggaaggagaggagatagtgggttttggaggaaagagaggggtttcggggggtttcgggagagtgggttagtagggacgaattagttagggttgaggacgggggagggaggagagagttaagatattgagtttttttaaggtagtaggaattttggttttttttttcgttttaggtttggtaggggaggggtcgcgagatgtagttcgggttataaaaggagtgtttttttcgggagcgttagatttttattttattcggttttagtttattttgttaatttaattttattttttattaaagggaggttaggagagttattaggggttgtgggaggttgggagaaggtttttttagaggttgaatggtttggttttttttggtcgttatttttttatttgtgaaatgggaggaggagggaaaggaattaggtttgggttagaaagagatggatataagaggaagtaggggaaggcggagaaataggaaataagtgttatatatagtttgttatatatagtttaaaaattaaatattagttattgagggttagatatatgagggttagaggagtagggtgttgggaatgaaagaaattagtgattagtgagttcgagttttgggtttggggaggaggttgggtagataaggtagttggtagaagcggaagtattttttttttagttttggttttaggttttggaaagtttttgtaagaaggggttttgtgggatagttggaaggttggaggttttgggttaggagaattaaaggacgtagggattcggggtggcgggaatggtgtttgatttatacggtttataggaatcgagattttggggttgggggtgggggtgggtgtagaatttattaaagaaggagatatatttagaagaatttaaagttgttttttttggatcgtagaggagggggtattggtggcgtttgtttgtaaagttggtttttttatagggttcgcgtgagttatcgtttttttagcgtttgggtatttgttggggtagttggagaggttggcgtcgaatatttgtttgtcggttgcgtttttggtagttgttttatgttggtttttttggtttgttttaggttataggaaattaggggagagggttatagagtttatttttggggggagggttttaggagagggagtttttagtatgattttgattttgattttgaggcggggtgtagagaggttatgggaggttgttggtagtttagtttgttgtgatttttaagttatggttttgagttatagttattttagtttttgttgattttattttgtttttttagagtggtggtataggatagagaaatgttgttttagggtttaggtttatattttgagttttaggatgggaggatttttttatgtttattttgttatgttgtttttttttaatagttaggtttttgtgtttagagttgtttgttgttttatttttattttatttgtaggagtttcgagggtaggtatttattttattgtaagaagtcggttacgtatttgttttgggttagttcggaggcgtttagtttttggtggacgtttaggagaaggtcgagtaggggttttagttttaggaagttcgggtttaatattagttgttggagtcgttttagtcgtatttcggttgatatgttggataggtagtattatggttttttttcgggtcgggggttcggggtttttttgttatagggtttggtagtttttgtttaggttttggagttttggttgtatgtttgtttgtttttggttgttttttgggtttttttggttatttttttttgcggtcggtcgaggttttttttttttttttttattttttggtttagtttttttttcgttttttagttttaattttttataagttagttttttaagttttttttttttagggttttttagaattttttagtgttagagtagggggaatgtatggagaattttagttgttatattgttattttaataaaaaggtagagtatagaggaagttataggtgtgatgaattttaagaagaatttgtttattgttgaatagggttaattgaggttgagtgatttagtagtaattatttttttgttttcgataagttttagaattgggggttagggggtgagggttgggggttggggttgggtgggagaaaggggttgaggtttgggaaggggacgggaggttagggtagttttttgggtgatttagagatggatttcgattcggatagttaaatttagtttttaggttttttgttttaaattagttttttttttttttttttttttttttttaggaggtggggaaggggtggtgaggataggattaggagggggtatttttagagtttgaataggggtgatttgttgtttaaaggttgggggaggaaagtggtggagttaagttttttttgggtaaacgagattttaaaatagttttttggtttttggtcggggagttatatttttgtttaggttgggattagaaatagaaatatttcggggggtggagggtggcgcgggaagatatattttttgcggtttcgagagttaagaggaatttgagtttttttttttagggtggacggttttttagagtggaagtcggggtttttaatcggtttggggtgtttgggttttgagagggttaggtttgagaaattaggaggtaaggatcgaggagttttagttgggtagggtttgggaaacgtggttttgggtagttttgataatttaaaaaatatcgaggattttgatgaggggttttggttgcgggtaggatgtttttttttttaagagggttttgttttagtcgttggtgtgggttattagttgtgtgattcgtaggttcgttttttttttgggtttcggttttttttgttatgaaaaggggtgggaggcgttgggttgggagtaggtttgtattttttttttggggaaagcggattgtttagaattatagagtatatatataggttttttatattatttttttcgaaggggatagattcgttgagaaaatagggaattttagtataaataagaggttttgcgggatagggaggaatttgaggggtttttataatttaatattttttaaaagtatagataatagtaagggtagttggggtgggggtcgggcgagggttggattattttcggttttgtttatttaattgaggggtatattgtagatttggggtttttgtggtaggggcggggagtgtttttttaggagtgattagttatatgttggggatagggatgagggtaatattgatgttttagaggaagaggttattgtatttggtagtgggtgggggataaggttgaggttataagggttattatatcgttcgtgttcgggttagtttggggggtttttaaattttgtgtaggtggggggattggagtagtttatttattatggttagttttgttaatacgttgatttgtgaggttagtagggagggttatggttaggaggttgggggtatggggttgggggggttcgatatttatggttttatattattgtgttattcggggagttgtttggttgggaggagatgttttggggaagatgagagggagagatgggaggggttagagattatttgggttttagttagtgttaggggagggagttagttagagtttttaagttgttgttattttggttttgtttttgggttcgttttagattttttagaggttattgttttaggttgggaatttgtattttagttagttttttgttttggtagttagtatttttacgtaataattaaagtttttggcggattt

SEQ ID NO: 95 - DNA, 9015 bp, Artificial Sequence
  chemically treated genomic DNA (Homo sapiens)
ggtttttagggttttggtattagttgtggttatagtgtttgatagtaagagagatatatttatttattttgggagagaagatatttcgtggtatttttgatatagcgttttgaatttttgaaggaaaaaaattggtttatgttaatgttagggtattggtgttattattgaagttttaaattttagggatgatttagaaaagatttaaagattaaagtcggtaagtggaggttttttaaaatattatagatggtttttttttttttggtttttttaagggttatttttaaatgaagtaaattaatcgtatattgattgaattttatattttttatttttgtatatttagttttttttaatgaattaaggggtgagggaagacgttattagattatttttttgaaattgatatataattgttatgttatgaaattgatatataatggttttgttattaagttgttttagttgtttgtttgatggtttgtgtttgttagttttgtttgttttggatggttttttttttaacgattgttatattttatgtgatttgattttagttgtttagggatttttttgagattttttttaggttgaatatcgataaattttgtgtgtgtttgggagtataatatgagtgtttacgtgtttgttagtttattttagatgttttgcggttatagtggggtttgcgattaataagtttttttagaatgttttggttttttatggtgatttttattagttcgcggttttttgtttttttgtttaagttgaaaaatataaaatttcgaaatgggtgaagaaggaaatgtttattttgacgagtgggggagatgaagttatgagattataaatgttagattgtttaagtgtagggagtaaattgttttgttgagtttataggtttttgggatagtttgttggtttgtattgtatttcgggaaatatgtatcgtattcgtaggtttatattagtggtttttaattttgttgtttatgagaagattttattttattgatttgaggtgaatcgtgtatattggtatttttttaaaattttttaaggattataatgtaaaattaggattgagaatttttggttgggggaaggtttttttgtgaataaattataaacggttggcgataagttttgggttattttattttttttagtttttaatttatattagaatatattaggatatagaatggtattttgattattttttcgtttttagtaaatttttttttttgtatgagttttttttgtatttttaattatattgtattgttattatttttataaatattttttttataagattttgagttttttgaggtaaggaaatatatattttattttatttttattatttttggtatttagtatatagtagttgtttaggaaagatttttggaattgattttaagaatgttatattatagttttagttatggtgttatggaatagatgtttgtgttttttaaaatttttatgtttaaattttaattatgaaggtgatggtattagggggtgggtttttgagagttgattaggttattttaatggaattagtgtttttatgaaagaagtttttttttttttttgtttcgtgaggttatagtgaaaagatggttgtttatgaagtaggttttttttagatgtcgaatttattggtattttgatttttggatttttttgtttttagaattatgagaaatttttgttgtttataagttattagtttatagtaatttgttatagcgttttataatggattaagatatatggttattattttataaaagtgcgtagtgtatttttgtgatatattgaataggattttgaaaagttttttcgatgaaataaaagttttttaatgttagagaaaggtttttatttttaaagtttttattttgtgtaatatggtttgtttggtttttttttaagataattttttttaagtatttttttgatttgggaaaattttatattaaaatttaagaggaaagttaattttgattttttaaaattgaaatgaagataaagaatattattttttggaaaaatatttattttagtaatttattttggtagggtcgcgatgggtatttgcgattttttgatatagttgtttgtttttatattcgattttgttgatttttttttgtttattttggtaagaaattatattttattatggtgatattattagtgtattgttttaatatataatgatttagtgttttttttttttgagatcgtgggaaaggggtgtattgagggttatagtggagattggaagtagaatttaaaagattgggcggtcgggtacggtggtttacgtttgtaattttagtattttgggaggtcgaggtaggcgggaggtaatgagattaagattattttggttaatatggtgaatttttgtttttattaaaaatatgaaaaattagttgggtatggtgttatatgtttgtaattttagttattttggaggttgaggcgggagaattgtttgaatttgggaggcggaggttgtagtgagtcgagattgtgtattttagtttaggtaatagagcgagatttcgtattaggggggaaaaaaacgattgggggtgacgcgtggggaggaggagtattaataaatttttgagtagatgggtatttagaaggttttgggaaattgaatttttttaggaaatagattggaagttaataaaatatatttgtatatttgtaagtagtaagaataaatatttgtagtttgtttaattttaaaatgtgatttgtgtgcgttattggaggtttggtattaatagtaggtttcgttagagaagggggataaaagggaataatgttatattataggaattttagtagcggttttagaaaattagtattagataatgtttttgattaatgaataatttcgaattaggattttaatgcgatttaagaagtttggtttgatttattaaatgaatatttttggagagttttgagtagaaataaaagaatagtgaaaataaaatttatagagataaatgtttttttaatttaatgaaagagttttttttttaatttttttttaatattattagtttgtttattggtttttgaagttttattttttttttaacgtatttcggttttaaggagtttaaaggagtatttttatttagtgaattttttggtggaagatatattttgttattggtgttaatgtttttttttttaaatttagtagataaggttatattattttaaagttgtgatttggtttggttttttgttgatttttttatggggtattattttaaaatttttaatagtagtgtttagtttaaattgtttatatatttatttgtattttatttttgtgagatacgtagtggttaaagtttagtttttttttgaaggttgtgttttgtttgtgattagagacgataatagggtaggttagataatttagggaattgtttattttttttttttagttttattttagaaatgaggtatttagatttttttgtgaggtgtttagttgtttttatgataagttgttatagttatttagttatgatattagggataggtttcgggaagggagtaggagtagtagagtatggttggttgtttttgggtttgtgtttttaatgttaatttcggtttaagttaagatgaaggttaaggaattcgaaagtttttttcgttgtttagaatgtagatgttgttagttaatattagaaggaaagaagtggtgtatcgggaggggtgggtaggtacggggtggggtgagggatatagaaattttagttttggttatatattttgggttattagttaagtagtttttattgtaatagtttttttgaaggtgtaagattataagttttggaggaggagaaagttgattttaatgataatcggatttaattttttttgtaaatgaggaaattgaagattatagtagtagtaacgttatttaagaattaagttggtggtagggttgggtttaggatgtggggtttttgaatttaaggttaaatttgtttttttgtaggaaggaaattgttagttttttatggtagtaggggagggtagtttttttttagtatagagattattttttgtatttagtgggagtttaggaaatgttgagtggtttatggtgggttggtatttgttttaggaagggttgtaggagtttgatttatttttattttagtatagggtatagtatttattgggtgtttaacgtatttgttgatgaaggattaatatttattgagtgttcgttatgtagtgttgggtgttttttttgaatgttatatttaatttttttagtaattttagaattaggtattattattatttcgttttttttttttttttttgtaaataggtttaggttaagtaattttttagaattttaaatttgattgtttttaagtacgacgatgatttttaatgaatgttgaaagtagatgcgttttagagtagggttttttagattttgatcgtagggattttttggggttcgtaaaatgtttattttgatttagtagggttgggttggggcggggattttgttaagcgttcgggtggtgtttttattgtagggagtcgtttacgagtcgaattcggcggtttttgtaattatgaaagattgaagcgatttttaggtgtattttcgttacgaaatgtttattgggttttgtatttaatttagggaaggaagttatcgcgtttgttagtttataaagatatataaacggtttggatcgggatggggcgaggatttttgagattttagggcggtggcgtttttttttcgggacgcgtttaggagtggcgcgcggggttttcgcgttacggcgttcgcgtttcgtagttttcggagttcggcgggttcgttttaggggcgggacggggcggttttcggcgcgagttttcgtttagttgattcgtcgtttttcgtttcgtttgtttttgtcgggcgtgtagggtttcgtcgtcgttatgtcgggttcgttcgagttttcggtgtaggattttaacgatttgttttcggacggtagcggttgttatagtttttcgagttagttttgtaacgaggttatttcgcggatttacgtgggtaacgcgtgagtttttttcgcgagttcggtttcgtcgtttttttcgggacgtttcgtttattcgaggttggggtcggggtgtcgcgagttttgggttgggggagttcgggcgcgatggttttttcgggagttatagcgggggtttgggaggggtttggagtcgacgtttattttcgcgcgtggggttaaggaattggaattttgtttggtcgggcgcggttttttttcgtggcggggtgtacggagttcgggtggcgtttgttcgggttttagtcgttattcgtttggggtttggttttgggcggggtcggggttattatgtttatttaataggtgattttcggtcgttcggtcggttttttgttcgcgcgttatgtgatagttgtttggttttgtagtgaggttatcgcggaatgtttgttttcgtcgttatggtaacgggtcgacgttataattcgggtatggaattttttcggttcggtagtttcggattagggaatttaaatattttaaatgagcgagttcggggagttgggtcgggatttttaggtttttattttttagatgtgatttgatttataggagattttagaacggtttagtgataatttttttaaggatttgagttattatttagaaaaggtttttgattttttatttttaggttttgttatttaggttggagtgtaatggcgagatttcggtttattgtaatttttgttttttgggtttaagtaatttttttgttttagtttttcgagtagttgggattataggcgttcgttattacgtttggttattttttgtatttttagtagagacggggttttattatattggttaggttggttttttggttaggttggttttaaatttttgattttatgattcgtttatttcggtttttaaaagtgttgggattataggcgtgagttatcgtattcggatagtaagagattttttttaatttaaattttaaattttttttttagtaagaatgtttaattagtaggaaagaattagtgttaatattttgagatgtgaaataggagttttaagaaagaatatattagtatgtttgtatagttttggaaagttttaagttggatttttacgatattttgaggatttagttattaaaattttaagttttatggtttagtttaaggatggtatgttgaaaatttaaaattaattttttttttattttatagaggaggaaatggtggtttagagtgtgtgagggattataaggatagggttaatgttttgtttatgtatgtattttttgattttcgttatgatttgttgtttagtttgttaaggattgttacggaaatgggggttattatggaattagaaggggtttattaggttttagttttatggggatagtttttatttattttattatttatttattagtttgagtatttgttttatgttaggtattgtataatgtttatttatagtagagatagtaataatgataattgtaaattttttgaatgttgaattattaatagtattagaggtttggtacgatggtttacgtttgtaattttagtattttgggaggtcgaggcgggtgggttatttgaggttagtagttcgagattagtttgattaatatggtgaaattttgtttttattaaaaatataaaaattagttgggtatggtgtttggcgtttgtgattttagttatttcggaggttgaggtaggagaatcgtttgaatacgggaggtggaggttatagtgagttaagatcgtatcgttgtattttaattgggtaataagagcgaaattttattttaaaaaaaaaaagtattagagaagggagatgaatgggagtgattttttaaagtgtttttttttattagttattgttttatagttttgcgcggtgttttaagtaggaataaatagagttttatagtgttagttaaaggttttaggaattggaaagttttagagatatttttttttttgtattaagtagtaagtaggttttgttagttttaggaatttcgtttgtttgggtaggttggttatttagttgttattattttttaagtggaaattaaggttgtatacgtttggtgtagttagagtggtaattgttgatggttattgtagaaaatatattttttgttttttaagtatttttgattttgatttggttaggggtgtgggggttttttaatagggaggattagtgagtattaagtattaagaggatttgggttttatttttttaataaaattagggtcgtagttacgtttttataaggtagagttagagtttgtgtgagttatatgtgttaggttttgggggttttgtagtagatgtgggtatgaggggtagagtgaggtggaagatagagtagggttggatgtcgggagaaaggaggtttttttttagatttgttattagtagtatacggggtttgtgtttatttttttgtttattttgttgggtttgagtttaagttttgttaagtagggatattgttatttttgttttttatagggttgttcgtagtgggtaagtaagattatataggaggtggtattttataaagtataaattgttatttggattgggatgttttgtgagatgaaataaaggggtttttttattatttagattaattattatttttattttattttattttatttttcgagacggagttttattttgttatttaggttagagtgtaatagtataattttagtatattgtaatttttatttttcgggtttaagtgatttttttgttttagtttttgtaattttagagtagttgggattataggtatgtattattatattcggtttatttttgtatttttagtagagacggggttttattatgttggttaggttggtttcgaatttttgataggtgatttatttgtttcggttttttagagtgttgggattataggtgtgagttattgtattcgattttagataaattattttgtaattttttatagttttgttggggttatttattttttaagtattaaattatttaaaagagttttggaaacgtagttagtggaatgtggtaggtaggatttttttgggggtagggagggggttgtttggtacgtgataaatttatttttttgtatttatttatcgtttatttatttagtatttattatgtagtaggtattatagtagatggtggggaaatagatttaaagtagatatggttttttttttaaggagtttatagtttggatgtttaaatatagaagtataattaagtattagaattatagtgtttattatcgtgtttagttttgttaatggaatagtttatttaatatttataataattttaaggagaaggtattgttatttttattttatagagagggaaattgaggtatagaaaggttaaatggtttgtttaaggttgtttggttagtatttgggtaggatgtagatttagttagtttggttttagagtttatttgtaattagttggttatgtatatttttattatagtttagggagtatggggttaaatggaatggaggggagataaatattgcggagggtgtgaaagatgagagggcgtatttttttagagaaggtgggaaagagtattttagatagaggggatagtatggttatgaaattattagtttatttggggaagttgttggtaattcgatatggttagagtgagggaagaggttataagatgaggtaggagaagttggtaggggttagagtatggagggtttttttgttttgttaagaggtttaaatttttttttatttttttttttttggggttgttatttggttggttaattatttttattattgttttttgtttagg

SEQ ID NO: 96 - DNA, 9015 bp, Artificial Sequence
  chemically treated genomic DNA (Homo sapiens)
tttggataggagatagtggtggggatgattaattaattaaatggtagttttagggggaggaagatggagaaggatttaagttttttagtaaagtaaggaaattttttatgttttggtttttgttagttttttttgttttattttatgatttttttttttattttggttatatcgaattgttagtagtttttttaaatagattggtggttttatagttatgttgttttttttgtttggaatgtttttttttattttttttggagaaatgcgtttttttattttttatatttttcgtagtgtttgttttttttttattttatttggttttatgttttttaagttgtggtgggggtgtatatagttaattggttatagatgggttttggaattagattaattgggtttgtattttgtttaggtattagttaggtaattttaagtaagttatttaatttttttgtgttttagtttttttttttgtaaaatggggataatagtgttttttttttgaggttgttatgagtattaaatgggttattttattgatagagttggatacggtagtgagtattatgattttaatgtttgattgtgtttttgtgtttagatatttagattgtgagttttttgagagaggaattatgtttgttttaagtttgtttttttattatttgttatagtatttgttatatagtaggtgttgaataaataagcggtgaatgagtgtaaaagaataaatttgttacgtattaggtagttttttttttgtttttagagggattttatttgttatattttattggttacgtttttaaagtttttttgggtgatttagtatttggggagtaagtggttttaatagaattatgggaggttataaaataatttatttaaggtcgggtgtagtggtttatatttgtaattttagtattttgggaagtcgaggtaggtggattatttgttaggagttcgggattagtttggttaatatggtgaaatttcgtttttattaaaaatataaaagtgagtcgggtgtggtggtatatgtttgtaattttagttattttgggattatagaggttgagataggagaattatttgaattcgggaggtggaggttgtagtgtgttgagattgtgttattgtattttagtttgggtgatagagtgagatttcgtttcgaaaaataaaataaaataaaataaaaataataattggtttgaatggtgaaaaggtttttttattttattttataaaatattttagtttaaatagtagtttatattttataaaatgttattttttgtgtgattttgtttgtttattgcgagtagttttgtgaggaataaggatggtaatatttttgtttaatagagtttgaatttaggtttaataggatgagtagagggatgggtataggtttcgtgtgttgttggtggtagatttgggagaagattttttttttttcgatatttagttttgttttattttttattttattttgttttttatgtttatatttgttgtaaaatttttaaggtttggtatatgtggtttatataggttttggttttgttttgtgaggacgtggttgcggttttgattttgttaagggaatggagtttaaatttttttggtgtttggtgtttattgattttttttgttgaggaatttttatatttttggttaagttaaggttagaggtgtttagagggtaagggatgtattttttatagtggttattagtaattgttattttggttatattagacgtgtataattttggtttttatttgggaagtgatgatagttgaatggttaatttgtttaagtaagcgggatttttgaggttaataaggtttgtttgttgtttggtgtaagaggaagggtgtttttagagttttttaatttttgaagtttttggttgatattgtgggattttgtttatttttgtttaggatatcgcgtaagattgtgaagtagtggttgatagaaaaaaatattttgaagagttatttttatttattttttttttttaatattttttttttttgagatggagtttcgtttttgttgtttagttggagtgtaacggtacgattttggtttattgtaatttttatttttcgtgtttaaacgatttttttgttttagttttcggagtagttgggattataggcgttaggtattatgtttagttaatttttgtatttttagtagagatagggttttattatgttggttaggttggtttcgaattgttgattttaggtgatttattcgtttcggttttttaaagtgttgggattataggcgtgagttatcgtgttaggtttttaatattattaataatttaatatttaaaaaatttataattattattattattatttttattatgaatgaatattgtatagtgtttgatataaagtaggtgtttagattggtgaatgaatgatggaatggatgagaattgtttttatgaggttggggtttgatggattttttttagttttatgatgatttttattttcgtggtagtttttggtaggttaaatagtaggttatagcggaggttaggaaatatatatatgaataagatattgattttgtttttgtagttttttatatattttgagttattatttttttttttgtaaaatgggaggagggttagttttgagtttttaatatgttatttttgggttgagttatgaagtttaggattttggtaattgggtttttagagtatcgtgaaaatttaatttgaggttttttaaggttgtataggtatgttaatatatttttttttgaggtttttattttatattttagaatgttaatattggtttttttttgttgattagatatttttattagaaaaaaaatttaaaatttaaattaaaaaaaattttttattgttcgggtgcggtggtttacgtttgtaattttagtatttttggaggtcgaggtgggcggattatgaggttaggagtttgagattagtttggttaagagattagtttggttaatatggtgaaatttcgtttttattaaaaatataaaaagtagttaggcgtggtggcgggcgtttgtaattttagttattcgggaggttgaggtaggagaattgtttgaatttaggaggtagaggttgtagtgagtcgagatttcgttattgtattttagtttgggtgatagagtttgggggtgaaaggttaagagttttttttaggtggtggtttaggtttttaggggggttattattggatcgttttagaattttttgtaaattaaattatatttggaaggtgggggtttggaaatttcggtttagtttttcggattcgtttatttggggtgtttaggttttttgattcgggattgtcgggtcgggaaaattttatgttcgaattgtgacgtcggttcgttgttatggcggcgaaggtagatatttcgcggtgattttattgtagaattaggtagttgttatatgacgcgcgggtaggagatcggtcgggcgatcgagggttatttgttaagtgaatatggtagtttcgatttcgtttaaggttaagttttaagcgggtggcggttgggattcgggtaggcgttattcgggtttcgtgtatttcgttacggggaagggtcgcgttcggttaggtagggttttagttttttggttttacgcgcgggggtaggcgtcgattttaggttttttttaagttttcgttgtggttttcggaggggttatcgcgttcgggtttttttaatttaagattcgcgatatttcgattttagtttcgggtgggcggggcgtttcgagagggacggcggggtcgggttcgcgaaagggatttacgcgttgtttacgtagattcgcggggtgatttcgttgtagggttggttcgggaggttgtagtagtcgttgtcgttcgagagtaggtcgttgagattttgtatcgagagttcgaacgagttcgatatggcggcggcggggttttgtacgttcggtaggagtaagcgaggcggagagcggcggattagttgggcgggggttcgcgtcgggagtcgtttcgtttcgtttttggggcgggttcgtcgggtttcgggagttgcggagcgcgggcgtcgtgacgcgggggtttcgcgcgttatttttgggcgcgtttcggggggaagacgttatcgttttggagttttaggggttttcgttttatttcggtttaggtcgtttgtgtatttttgtaaattggtaagcgcggtaatttttttttttgaattaaatgtagggtttaataaatatttcgtggcggaggtatatttaggggtcgttttagttttttatgattatagggatcgtcgggttcggttcgtgagcggttttttgtagtggaggtattattcgggcgtttgatagaattttcgttttagtttagttttgttggattagagtggatattttacggattttaggaggtttttacggttaaagtttgagaagttttattttggggcgtatttgtttttaatatttattgagagttatcgtcgtgtttaaaagtagttaggtttggaattttgaggaattatttaatttgagtttgtttgtagggaaaaaaaaaaaaagcgggatagtaatggtatttaattttagggttgttggaagggttaaatgtgatatttaaagaaggtatttagtattgtatggcgagtatttaataggtgttagttttttattaataaatgcgttgagtatttagtgggtgttatattttgtgttggggtggagataaattagatttttgtagttttttttggagtagatgttagtttattataagttatttagtattttttgaatttttattaagtataaaagatagtttttgtattggaggaaagttgtttttttttattgttatgaaaaattggtagttttttttttgtaaaagggtaaatttggttttgaatttaggaattttatattttgagtttagttttgttattaatttggtttttgagtaacgttgttgttgttgtggtttttagtttttttatttgtaaaaggaattggattcgattattattagggttaattttttttttttttaaaatttgtggttttgtatttttaggggagttattgtagtggagattatttagttgatagtttaagatgtgtaattaaggttggaatttttgtattttttattttatttcgtgtttgtttatttttttcggtgtattatttttttttttttggtgttggttggtagtatttgtattttaagtagcggggaaagttttcgagttttttgatttttattttgatttgagtcgaggttagtattaaaaatataagtttagaggtagttagttatgttttgttgtttttatttttttttcgggatttgtttttgatgttataattgggtaattatgatagtttgttatggggatagttaggtattttatagaggagtttgggtattttatttttgaagtgagattaggaagagaagatgaataattttttggattatttggtttattttgttatcgtttttaattataggtaaagtataatttttagaaagaaattggattttggttattacgtattttataagaatagaatataaataggtatgtgggtagtttgggttggatattgttattagggattttggaatggtattttataaagagattaataggaaattagattaggttatagttttgggatgatatggttttatttgttgagtttggggaagagggtattagtattaataataaaatgtattttttattagggagtttattggatggaaatatttttttaaattttttaaagtcgaagtacgttagaaaggggataagattttagaagttaatagataggttaataatattggaaaaagattggaagagaagtttttttattggattagaaggatatttatttttgtaaattttatttttattatttttttgtttttgtttaaaattttttagagatgtttatttgataaattaaattaaattttttgagtcgtattaaggttttaattcgaaattgtttattagttaaggatattgtttagtgttggttttttgaggtcgttattggaatttttgtgatgtaatattgtttttttttattttttttttttagcgaagtttattgttgatattaaatttttagtggcgtatataaattatattttaaaattgagtaaattataggtatttgtttttgttgtttgtagatgtgtagatgtattttattgatttttagtttgttttttaaagaggtttaattttttagagttttttaaatatttatttatttaaagatttgttaatattttttttttttacgcgttatttttagtcgttttttttttttttgatacggagtttcgttttgttgtttaggttggagtgtataatttcggtttattgtaattttcgttttttagatttaagtaattttttcgttttagtttttagagtagttgggattataggtatgtggtattatgtttagttaattttttatatttttagtagagataggggtttattatgttggttaggatggttttagttttattatttttcgtttgtttcggttttttaaagtgttgggattataggcgtgagttatcgtgttcggtcgtttagttttttaagttttgtttttagtttttattgtggtttttaatgtattttttttttacgattttagaggaggggaatattaagttattgtgtgttggggtagtgtattgatggtgttattatggtgaggtgtggttttttattagggtgaataaaagaaaattaataaaatcgagtatgaaaataagtaattgtgttagaaaatcgtaaatgtttatcgcggttttgttaaggtggattgttggaatgaatatttttttaagaggtaatgttttttgtttttattttagttttgaaaagttaaaattgattttttttttgggttttagtgtgaggtttttttaagttagagaagtatttaagggaagttattttgagggagaattaaatagattatgttatatagaatgaaaattttaaaaatggggatttttttttagtattaaagagtttttattttatcgaagagattttttagagttttatttagtgtgttataagaatgtattgcgtatttttataaaatggtggttatgtgttttagtttattatagggcgttatagtaaattgttataaattggtggtttataaataataaaaattttttatagttttagaggtaaggaagtttaaagattaaggtgttagtaaattcggtatttgaggagggtttgttttatagataattatttttttattgtaattttacggggtagaaggagaaagaggttttttttataaggatattaattttattagggtgatttaattagtttttaaaggtttattttttaatattattatttttatggttaggatttgaatataagaattttgggggatataggtatttgttttatagtattatggttggggttatgatgtgatatttttaaaattagttttagaaattttttttgagtaattattatgtgttaggtattaggaataataaagatgaaatgagatgtatatttttttattttaaagaatttaaggttttgtaggggagatatttatggaaataatgataatgtagtgtgattagggatataaaagaagtttatgtaagagaaagaatttgttgggggcgaggagatggttaagatgttattttatattttggtatattttggtataagttgaaagttgagaggagtgaggtgatttaaaatttgtcgttagtcgtttgtgatttatttatagggagatttttttttaattagaagtttttaattttggttttatattataatttttggggaattttaagaaaatgttagtgtgtacggtttattttagattaatgaagtagaatttttttatgggtaatagggttgaggattattgatataaatttgcgaatgcggtgtatgtttttcggagtgtagtgtagattaataggttgttttaggggtttgtgggtttagtaggatagtttattttttgtatttagatagtttggtatttatgattttatgattttattttttttattcgttaagatgagtatttttttttttatttatttcggggttttgtgttttttagtttaaatagagaaataaggaatcgcgagttagtgagaattattatggaaaattagggtattttgaagaggtttgttgatcgtaaattttattatgatcgtagggtatttgagatagattggtaggtacgtgggtatttatgttatatttttagatatatatagagtttgtcggtgtttagtttagagagagttttagaaaaatttttgaatagttagagttagattatatgaaatgtaataatcgttaaaagaaaaattatttaaagtaaataaagttaataggtataaattattaaataaatagttaaaatagtttggtagtaaagttattatgtgttagttttataatataataattatgtgttagttttagaaaaataatttagtagcgtttttttttattttttaatttattaagaaaggttgaatgtatagggatgaagggtataagatttagttagtatgcggttggtttgttttatttaggaatgatttttaaaaaggttaggggaggggaaattatttgtggtgttttaaaaaatttttatttatcgattttggtttttaaattttttttaagttatttttgggatttagaattttagtaatagtattaatgttttggtattgatataaattaattttttttttttaagaatttaaggcgttatattagaaatattacgagatatttttttttttaaaatgaataggtatgttttttttattattaaatattgtgattatagttgatattaaagttttgagaatt

SEQ ID NO: 97 - DNA, 15282 bp, Artificial Sequence
  chemically treated genomic DNA (Homo sapiens)
tttgtatttttaatgttggttaggttggtttttaatttttgattttaagtgattcgttagttttttaaagtgttgggggattataggtatgagttattatttatgtttagttttcgagtttatttttatttcgtttggagaagtgtttttttttaaaatttgtttttgaaattttgaagacgttttattaaaatgtttgggacgttagtacgtgattaaataaataaataaaaattatgagttttgttgtttatgagtttatattttaaagtagggataaggaggagttagagatcgttttttattttatggtattatagtgtgtttggttttttagagggcgagatgggaaatttatgaaatttggattcggagttgagaagtttttttttgtttagaattatatagggtcggaaatagattagatttgagaaattattttgtttaaattttttattttgtaggtgaagaaagtgaggttaaaggagattgttttgtttaaggttattaagttagatggtggtatagtttagattgaatagttttaaaataaagtagtaaataaagtaatgtattaaaatttttttgtagagattttgggttagaaatttaattttttattattttttatttgtatttatttatttattttgagatggagttttgtttttgtcgtttaggttggagtgtagtgaggggattttagtttattgtaatttttatttttcgggtttaagcgatttttttgttttagtttttagtgtagttgggattatgggtgcgcgttcgttatgttggttaattttgtatttttagaagagatagggttttattatgttgattaggttggttttaaatttttgattttaggtgatttgtttatttcggttttttaaagtgttgggattattagcgtgagttatttcgtttggtcgatatatagttttttaaattattaataagtgttagagtattaagtatagaaaataaaaaagatttgtaataaagttaggatttaaaaaaagaaatttttaggttatgtttttgagagtttttggttaggtttagtgtgaattttgaagattttttttcgtttttagttttgatttgatgggtagaggtacgtagggaaggataggtattttttaattttatttttaaacgttgtttaagaatacgttgtgtagattataggtttttttgtttttaggagtaggagagggttttttagtttttttgagtttttttattattagggggtaagttttttaattagttgatttaagaagtttaattaataagatttgtgtaaaatggattatttttgttttagttcgacgtaatagtaaggttgtttttttgtttaagaaaggaaaagttataggatttttttttttattattattttaattaatttattaatgattttttaggtaagttttatttaggtattttgggatagagtagtgagttagaggttggtattaaaattagaatagaagttgtatttttttttggggattttatttcgggttttagatttttcgattatataattttttaattggaaagaaatgtttttaaataagagtaggtgttttgttggagtttgatagtgattaataaggtcggtttaaggattgattgatgaaagagaagttggatttatttgttatagcgaatttttaaaagtttttttatttcgaggtttattgttgaatataaataaaagatttttttttgggtaattttattttaatttttataaatatgttttagttaattaaattaattttgaaatgatatttcgtgttttgttttaaattgtttttgttttttttaagatttgtttattgataagttgttttataaggtttttgtttaaaatggttatgtttcgtttatagattgtagacgaattggagataggttttatttatagtcggtatggagtagttttcgcgttgtatttatttaattgtggattaatggtttataaatatataattaaaaaatatatatttagggtgtttatatagtatttcgataaatataatatggtaatttaaattttttttgttgaaatttatataattgaaggttaatttttgagttggtaatggggtgtggattttaaaaattagttttttttaaaaattaggttttcgttttcgtaatttaagtggttttcggtttaaatatattaagttttaagttgtgatttttttttagtgaatagtcgcgtaggcgcgggtacgtatacgtggatatatatatttatacgcgtttttttatattttttttcgtgtgaatcgtttgcgggatttagggtttttttattagcgattattgttaggtgtagaaagtaagtttttttgttttatgggtatttttttttttttggatttgattgttatttattggttacgtgagcgttaggcgcgggttcggcggggaaggcgattttagaatagggtagataaaagttggtttagagcgcgattcgtgcgttttagggacgtttttttagtttttgcgatacgcgtgaaattggttcggatttgttttttgagaggttttttttagaaatgttttgttaaagtttttgtaaaggaattagtgtttatttgcgtcgggagagtttcggttttgggttttggtaggcggcggatttttgagttgttggagagtaattcgggaaagtaaaattagttttggattgtcggggtttttggggttttttgttttttatcgaaagcgagttattagatagatttttatagttttatttagtagaatgggaaattggatttagatattttttgttttttttatagggaggttacgtcgtgcggttttgattattgattttttattcggagtgttcgacgtttagggttttgttatcgggtagtttcggttagtttatagttgtggttttttttagggtttggattagggtgagtataagttttgagcgtaatatttaagaagggcgtcgaaaagttagtaattaaaagaaatattttgatgtaatgtttttttaaaagaaaaaaaaatgtaaaaaatttatgatgaataaaatattaaattttaaaaagagaaaggattcgtgtagtgttatcgtaagttattttggagttcggagtaaaaggaaatattattttgtttaagcggtgtttttatagtttattcgagtagggttcgggggtcgaggtattcggggtttagtgggggacgaggttagtcgaaggtttcggaagtggaggtttcgtcgagtttcggtcggggagtgtagggatggttttcgggatcggaggtgagagttcgggaaagtcgtttcgttcggaataaaggtatggggagagggtgagtttgggcgggagagattcggcgggtatcggtgttttcgttgtttgggtcgggtttttacgcgcgtttcggaatggaatacgttattttgtagttttcgaaattgcgagcgagttttgtaatttttttgttttgtgattaatttttattaataagatttggtaagatgtcgggcgaatgatttttggtttttgtacggtttttatcgcgtgcgtgtataaatttttagttaaaagtcgtttttgggaaattaaatgtaaaagagaaatggggatggggagggttgttacgtgattaggaaaaagggatgtttagaaatatgaatcggatttagagttgttgaagtttttttaaaaggttattttttgcgggtatattttttagggtttagtttcgtaataaatgtggattttgttattttttgaaaggataatttataattatgtaagatagggtgaagacgttttttaaattcgaaaattttgtttttttttcgattagggttaaataaatattttttaggaagcgtggataggagcgtagtttgtttttttttttcggaatattatttcggtaattaatgtttttttttgggtagtaaagtaataaattttatattttatttcgattttgggtttcgggcgggaggatttttttttttattttttaagtagggggttgtttacgtttttggggaagttataaaattgatttaatggttttagatgaaaatcgattacgttaatgtatacgttaacgttttaggaatcgtatatttagaaaggattggtcgggtcgaaagcgtacggggagtttggggttaggaggtgttaggtttcgttgggtgggtagtagcgtttcggttttttttttatttgggtaatcgggaaaaatttacggggttgttacgcggggaagcgcgaaggtgttaagggatgaaagtttaaattcgagttttggtttttttagtcggttattttttttggcgtcgttcgtttagcggcggggtgtagcggcggtataggtgtcggtgtcgggttggaggcgcggcgtatgttgggttcgcgggtagacggcgaaaggcgtcgcgcgttttatttataaagttcgggcgttgttcgtcgttggcggcgggtcggaggtcgtttttttttttttttcggtttcggttttatgaatgggtttgatggcgagtattcggcgttttgtttatttcgttttttgtgacgtcgagttttcgtgatcgggagttagcggtcgcgttttatttaagtttcggggagggggtgggaggaggggttcggagggggcggggagttagcgcggggggcgggggatagcgcggggggcgggggacggcgcggggttcggaatggaacggggcggggtttggcggggtagtatttagcgttttttttttcgggagcgcggaggagtattaataaatttttaagtcgaggagaaaattttggttggggtagtgcgttgagcgtcggaggagcgtaggtagggtagcgttggcgttagtggcgataggagtcgcgcgatcggtaaaaatatacgggaggtcgtcgtcgaaaagagttcgcggttttttttcgtaaatatatttttttttatcggcgttttttttttcgttttgcgcgtcgttcggttgggcgttcgaggtcgtttcgattgttatgtgatcgcgaggttgcgggaggaaggggatagggaagaagaggttttttcgcgggagtttttgaggattaagtttgcggttatttttgtaggcgtttttttttagttttcgttcgtttttttttgtagtttaggcggttcgggtttttttttttttttcgcgcgtttagtcgtttcggttttcggcgattatggtgacgatggaggagttgcgggagatggattgtagtgtgtttaaaaggttgatgaatcgggacgagaatggcggcggcgcgggcggtagcggtagttacggtattttggggttgtcgagcggcggtaagtgtttgttgttggattgtagatcgtttttggcgtatagcgcgggttatattttaggttcggttaacgtgcgttgtaatattatcgtgcggcggcgggttaagggtttcgtgagtttggagtagattttgttcgtcgaggaggaggtacgcgttcgtttgcgtttcggtttttattcggcggttatcgtttacgacgagcgtagttcgcgcgtcgagagttttcgcgaggatagtatcgtgtcgttggtggtgtaggcgttgcgtcgtaacgtcgagcgtatcgatatttgtttgtttaaaggtaaacgagggtttcgggcgttagttggagtcggggagatggagggggttttggcggtttgcgttttattggtacgggaaggagttttcggcgtgattcgtggttgcggggattttcgcgcgtttttttgtgtgtgttggtgtgtaggggtttgtaaggtttttgtgtaagtgcgaggtttaagtttttagggaaagtgcggacgggttttttcggttatttgtaatttcgtatcgttttagcgaggtttcgtttattgatattaacggttttagtttcgaggatgaagcgatttttttgcgcggtttattttgagtttcgggaatagtttttaagtattacggggcgcgtggggataagataggtttgttggtttggcgtgttggggttttatattgagtcggatcgggagaattttagaggtggagaaaaggtgaagaggggtgggcgtcgaggtataattggttttgttagttttattgaaaataagattttggtaaatgtagaaagggagattgggttgtatatattgtgtagagcgatttgtatttgcgttttcgttgtttaattttaagtttagtttggaaggtggttaattttcgtttcgggttagatttaggttttgggagcgggaggttgaaggattgggtatttgggggacgtcgggcggaatcggttttttagcgtttgtaaattcgggtagcggagaatgattattttttgtttagttcggattttcgattatttgatggcggcgcgtgtcggattttagcgagttttggcgaaattttcggcggcgagattgttttgttatatttggtagtcggaaattttggaaaaatcgcgtgttgttcgagtttttggagggatttggcgttcgttatatttgtagggtagggtgggttcgcggttttcgggttagggagcgggtagggcgcgtggggttcgggcgtttttcgtcgcgttgcgttttcgtttttcgtcgtcgtatttcgcgtattttttcgcgcgggtagggtttgcgttttcgagttcggtaggtagtttagatttttttatatttattaaagagtcgtttttttttttcgtaggcgttttcgtcgtttttttttttttttttttttttcgtttttttttcgatttgtttattcgggaggaagggagttggaaagggggcggaaattttttttttttaaaaagtataataaaattgtttagtgcggaggagtcgggttcgtttttgtcggatagcggggggttttgtttttcgtagttgttttttgtttatttgatttgttagttgttggggaaacgttgttgttgatttttggttgaattgttaaggcgattttgttgattttttttttttttttcgcgagggttgttttttgtttttttaaatgagtttagttttttttttttttttttaaagcgttttaagagaaagtgttaggaaggggtttgtttcggaaggtttggcggttgagcggggttaggttttggttaggttattagggtgggcgttcgcgttattgtttgagtttgtcggcgttggtgggagagatgagggtaatttttttgggacgtaagttttttcgaatggtcggggttggtcgggatgtttttcgtacggcgttgttttcgagttttttcgatggagagcgcgggcgcgttttttttcgttggcgtttaaattcgggattagttagaatatagtagggttgggattgggttttagttttacgtggagtttggatttgttttgttgtgttttgtttttttttttggaagaaatttcgaggggatcgttttagagcggtagttttaggatttcggtttttgggttttcgggggtgtagttatttaggtttcgttttcggggagagagggattattttttaagatttatttttagggcgcgcggtatttttttgtttttcgtgaatttcgttgagagttttttttttttaattttttttatttttttagttagatcgattcgagagttttggagattttgggcgaggttagtgattgggtagtataggtttttaggtaaaatgatagttttttggtgggtggcgaggtgtttggttaatataagagaagtattttaagggttgtttttttttggagtttgtattgtttttcgtagtcggtttcgacgcgggtagggagaattattttttgtattttaaagtggatatttttgtagatggaggtgtgtaggtttgggttatagatttagtttcggttttttttagaatagttttttttagttagaagtttagtttttgtttttaaagggagtttgtttttggaagtaagtatttaaaattgagaggtgggggaattttttagtttgttttgttgtggtgaatatcgttgaggttaattgggttttattcggtttagtttagttgattttgatatatgtgtttagtagaggttatttttaatttagttttttttttttttttttgttttttaatggaaaggtatttttagagaggttagaaggaaaaagttagtatttgtttttatagttttgcgggaaggggttggggaaggaaattaaggtgttttttaggtttttagatatattttttttttatgtttggaagttagtgtagtggagtaaatgtggtttttcgggagggggttttggggtagagatttaaaggggaattttgagaagtaaaggaagaaaaagttttttagattatttttagtaaatgtttgaattggtgaagggttggagaatttgttttttattggagtaatttattttattttttagcgagggaatgtatgtatgttttattttaggtgtgtttgtgcgtgtttgtaaagtaggataggaagttagtggaaggtttgatggttggtgtttgttatttttggaggggttaggagaagtagtaaaagtaataagagtatttttagaagtgatagtagtatgtttagttaaagttatttaattttattaattgtattttaaaatttagtttttttatttttgttacgttgaagggttattttaattacgttgaattggttattttatgtaggtggtaggaggtaaatttcgtttaatattaagaaagtatagtttagtttttatatttttttagattattcgatttttgttaaaagtaataacgaaaaatttaatgttttttatttttgttagtaaaggatttttagtggggtaatttttttaaaatttatttaatttaaaattttgtaaggtatttttagagttagtttggaaattttagttttttagattttattataatatattttttgaaattttttttttttttattcgtaaatttttggattagagtttgagatttttttggttattagagaaagataaaaagagtttttttttattttattttttgtttttattaattttaaataataaaataatttgttatgtaaaaagattgtaggtataaaaatattatttttttttttatttatttaaaattttttttagtttttgttagttttaatttaaaagttgttttggagttgttggagaaatggggaagattatttagatattttagtttttttttttatttattttatagtatcggatagtatttaatagtttagggtttgattatatagtttatgatattattttttttgtagaaaatagttattaaggttattgatgaatgtggggggagaggaatataattaatagttttggaaattttggtgatatttttttgttttttttttttttagttttattattgttttttttgtttttagttttttaggagggtaatggtattaaatagtatagttttgggggatgttaatattgtatattttttttatttaaagggaaaatgattcgtttttttgtttgtaaatatggtagtttttgtttataaatgtaatataatgtttatgatagttaaggattggaagtataagttgttaggttttataggtgattttttataatgaagtaaatttattatgttagatattatttatattggatgtttttaattaataaaagtaattaaagatagatgtaggtgtaaattgagagtgaaatttgattttttagatcgttataatttttttgggtttattttgggtgtttataggagaggtgggttttatttataaaaatggattgtttagaaaaatgagggagagagaaagggtggttattttttcgagttaagaaattttttgaaaaaaaattagaatatttgaaattagagagtcgatttttttatcgggaggtagtttttggttaacgaagaggaagtacgatgggaagaaaagtttattttaacggaagttagtttgttgaatatagtagatcgtttaggaggattgggagagattgtaaattagttcgagtttttagtatggcgttaggtgttagttagttggtaggaaggtttaggtgtttgtgtttagagttttaaggtgagaagtttatttagttggattttaaatatagtttagtatttatataggtgtttattaagttaatagttatataaagtagagtttttaaaggtaaatggtttttaaataattttagatttttttgtaagagtatgatttttttggtaagagtaaggttatgagttttgtttgggatttggtattattttgagtgttgggggtataatggggaaaaagtggtagttatattaagatttatgattaaggtcgggtgtggtggtttatatttgtaattttagtattttgagagattgaggtaggtagattatttgaggttaggataatatggtaaatttggtttttataaaaaatgtaaaaattagtcgggcgagatggtatgtgtttgtaattttagttatttaggaggttgaagtaaggagattgtttgagtttagggaagttaaggttatagtgagttataatcgtgttattgtattgtagtttgggtgagagagtgatagtgatagattttgtttggggaaaaaaaaaaaaaaaagatttatgattatagttattattaaaggatagttttttttattataaattttagtaatagttttattatggtgatattattaatttgttttttgtaaagtatttttatatatattattttttatttttgtaagggacgggggagtgtggtggagggtttttaatgaggggtttttatttttattaaatttggaaaattgtttttttgtatgaggatgtgagaaggaggaggtatagtggagttgaattgtagatggagttatttttaagtaagtttgatgaaaattatattttttttttttttttagatttttaaattgtaaaataaaggtgataaaatgagagatttaggaatagaaaatatatttttaaataaggatatgggaaaaataggttgaaattagtaagaaattttttatggaattatatttagtaggatatagatacgtttaatatatttattttatatatttaaagggtataggaaaaatagaatttatttatttagaatggtatatttgataatgaaattatttaggagatagaaatgtagattttaggtatttgttgttttagagttggtaaaattgatacgtaaataagtagattttggatatttagaagtagaggatattggaatttaaagattattataattagaaatttttatattttgagagtgggaaaaattagagttgaggagggaatatatttgtttaagttttataagttgagttggatttatatttggatttgtttttatttttttttgtatatttgttaggggtacgggaaggagtttagtttttttgtagataatgagaataagtttttttttttatgattttttgggataaaattaggtgatttaaatttagtttttgaaagggttgtggttatggtatttgtatggatttggggatgggtaggagggattgagtggaagttattttagaataattttttttaattttgtttatagtaagaaatatattttaatttatattgtgatttaggagagggatatatgtatatttgaagaaaagttttataaaatgatattttttttaagggtagtgtatttttttaatttttattttattgtattttattttaaaaatgtgggttatgattttttaatgatagtttggattaggaaattaatgggtagaagtagagtttggtgaaatattagtagtgttttatttggattagttttgtttttgtatgaaaagtttgtttttatttgatgaaatttgtaggtagtgttttttggagaagggtttattaggaaggggtggaaggtagaggtggtatagattgatatttagagatgatttattggggtatggttttgtggggggtggatttgagtagttttttttatcgatggataaatgttaatttgtatgtattttttcgtattatttttattgtgtttttcgggttttattagtttagaatatatcgtttttatttatgagtgttggtttgagtgtagtttagggtttattaaaaggaattttttttagtgtggtattttgtgaaattagttatagatttttaaaagttggttattattgttagggacgagaattttttagtgtttttgttttttgagcgaatttgtttttttattttgtttttttttttttttttttttttgagacggagtttcgttttgacgtttaggttggaatgtagtggcgcgatttcggtttattgtaattttcgttttttagggttacgttatttttttgttttagtttttcgagtagttgggattatagatattcgttattacgttcggttaatttttttgtatttttagtagagacggggttttatcgtgttagttaggatgggttcgattttttgatttcgtgatttattcgtttcggttttttaaagtgttgggattataggcgtgagttatcgcgtttagtttattttggttatttttgtttggtttttaaaatttttttagagggaattgatttttttgtaattatttttttgttgttttttaatggtgttttttttagatagttgcgatgagtttgggggagatgacgaatggtttttttaggttatatttagtttgttttttattaaatgggttatttgggttttttttgttttttatattattttatggttagtagtcggtgttaggtttttgataagggttttgttgagtggtagttatggttatgtttgggagagaagatggaggtttggaggttttcggaaattaagagataggtttttaggagagtaggttgttaaatgtttagtattttattagtattattttgttttcggtttttttttggtttttgaggatttttgttgagggtattcgagggtatttttttatgtaggtatcgagaagggaaaattttatgatttgtttttttgatgttaggtatagagtttggttgttagaattagtttttataggtttttgtgtaggggatttttattatttatagacgaggaggaggtttcgagaggtttaggaggttcgggttgtataggtgatatatgtttagggtggggtgtaattttatggtagagtttgtgttttttcggaattttattttagtgttttgttttatatttttagtaatggagataatatttttttagttgttttgggttttttttgtttttttagttttgagggttattttgttttgtgatcgtggggtttgttttggtatttttgggttatttaattatttatttttgagtgtaggcgatagtttgtttgttttggtggtgagtttttgtaggatattatttgtgtttaatatgttgttttaaaatgtgttttaatagtttaaattatgtaatagataaaaggattatgtatttagaatttttttaaattttagagaagtatatagagtaataagtgatggtttgggatataagtgattaattattgttaatgaatgagttttttttttatttttttcgaaagggagtatggattgaagttttttattatagaagtttttgaaggattttagttgtagatagatattttttttttttttttttattttttaattattgtattttgggtagtagtggtggtagtcgaataaggaaaggggtttatgatgggagggagggggtgtttttgtgatgaagtggttgtcgaggttattagtatgatcgaggttgacggtattagttttattagtaggttttttatttagggaggttggttattgtgatttagtaggaataagggtttgtgattagagagagatttatttatattttgagggagggagaggaggggaatagagaagttttcggttagagaggaaaaaatgtatattttgtttttataagttttatgatgtggtagagaatcgtttttttttttttagtaggaagtagtttttagggttgggatttggcgtaagtgattgatttatcgttatatgtttgtatattggaaaatttttattaatggttttagggtatagaggttttatgttattgttatgaagatcgtaaaggtagcgatatttaggattgttggttaaattgttattggagttagttgaatgggtttgttggaatggtggttttttaacgtataggttttattgaattaattgaatttatttttggttttatagatattgtaaaataaaaataaaagtagggttatatattgatagtattgtggattggaagttggtcgtaaaaggaagttttagagattataagaaagttagagatagggtttgaaaggttgtttttttggatggtttttttgtggtttttttttgtattttatttgtttttattttttttagataggagtatttattttattttagtttagttggttatttattattattttttttttttatttaaaagattttttttttttggaagatgattttatagataattattttagggtttatttatttttaggttaggaaatatttttttgttttaaatttgtatatagtatgaggggtttatttagatttaagttcgttttttttttgttttggttttttggtgacggaatagttatttatgaggacgtgtaatggatatttgttttattgttgagatttagaagagtttgtattagggttattttttttttttttttttatattggagaattttttttgaggaagggttggaattaggggtggtaggtgtttttataggtatttagtgtttttggaagtttagcgtgatttttgtttttttattttgttattgttttgaggagttattttatagttatttttgtatatttttttgtacgtttttttttgtatgtttatttttttaatttaagttttgtttataaagtttatttttttagttttgttgtagttttgacgagtgtgttttttgtatttttggaaattattttatggttattttttaggtttatagcgttatttagtggttaatatggagtacgttagtttttgtttttttagtagttcgtttgagtttgtaggagtcgagttttttttgattttttgttggtttagtgattttattaatttgagttttttttttttttatagg

SEQ ID NO: 98 - DNA, 15282 bp, Artificial Sequence
  chemically treated genomic DNA (Homo sapiens)
tttgtaaaggagaaagaagtttaggttaatggggttattaagttagtaggaagttagaaagaattcgatttttatagatttaggcggattgttaggaaggtaggggttggcgtgttttatattggttattaggtggcgttgtggatttagagaatggttatggagtggtttttagagatgtagaggatatattcgttaggattgtagtaaagttggaaggataagttttatggataagatttgggttagagaggtagatatataaaggaagacgtgtagggggatgtgtagaagtgattgtggagtagttttttaggataatgataaaatagagaagtaaaggttacgttgggtttttaaggatattaagtatttgtagagatatttgttatttttgattttagtttttttttaggggaggttttttaatgtgagaaagaagggaaaaaatgattttggtataaatttttttggattttagtaatggaatagatgtttattgtacgtttttatgaatagttgtttcgttattaagagattagaataagaggaaaacgggtttaaatttaaataaattttttatgttatgtataggtttggggtaagggagtattttttgatttgagagtgggtaagttttggaatggttatttgtgggattattttttagagaagggagattttttaaataaaaaaagaagatgatgataaatggttagttgagttggggtagggtgagtgtttttatttaggaggggtggaggtaggtgggatatagggagaggttatagggaggttatttaaaaagataattttttaagttttatttttggtttttttgtgatttttgggatttttttttgcggttaatttttaatttatagtgttattaatgtatggttttgtttttatttttattttatagtgtttgtagggttagaaatggatttaattgatttagtagggtttgtgcgttggagaattattattttaataaatttatttaattgattttaatgataatttggttaatagttttggatgtcgttatttttgcggtttttatgatagtgatataggatttttgtgttttagggttattgatagaaattttttaatgtgtagatatgtgacggtgagttagttatttgcgttaaattttaattttaaagattgttttttattgagaggaaggaaacggttttttattatattatgaggtttatagaaatagggtgtatatttttttttttttgatcggaggtttttttatttttttttttttttttttttaggatataaatggatttttttttggttataggtttttgtttttgttgagttatagtgattagtttttttggatggaaaatttgttggtggggttggtatcgttagtttcggttatgttggtggtttcggtagttattttattatagaagtatttttttttttttattataaatttttttttttattcggttgttattattgttgtttaaaatgtagtaattagaggatgagggaagaggaaggaaatatttgtttgtagttgaagttttttaggggtttttgtgatgggaaattttagtttatgttttttttcggagaaagtggaagggaaatttatttattaatagtggttgattatttgtattttaagttattatttgttattttatatatttttttaggatttgaaaaaattttaagtatatgatttttttgtttattatataatttgagttattaaaatatattttaaaataatatgttagatataggtggtgttttgtaaaaatttattattaagatagataagttatcgtttgtatttaaaagtgaatggttgggtggtttaggagtgttagggtaggttttacggttatagagtagagtggtttttagggttggagaagtaggaagagtttagagtagttgagaggatgttgtttttattgttgagggtatggaatagggtattggagtgaagtttcgaaagggtataggttttgttatgaggttgtattttattttgagtatgtattatttgtgtagttcgggttttttgaatttttcggagtttttttttcgtttgtaagtgatgaaagttttttgtataaaggtttatgaggattggttttgatagttaggttttgtgtttggtattagggagatagattatgaagtttttttttttcggtgtttatatggaggggtgttttcggatgtttttagtagagatttttaaaggttaaagaggaatcggggatagggtaatgttggtaaggtattgggtatttgatagtttgtttttttggaaatttgttttttggttttcggagatttttagatttttatttttttttttaggtatggttatggttgttatttagtagaatttttgttagggatttggtatcggttgttggttatggagtggtgtggggggtaaggagggtttaagtgatttatttggtggggaataggttagatgtggtttgagagggttattcgttattttttttaggtttatcgtaattgtttggaaaaggtattattagaaggtagtagaaaaatgattatagaaaagttagttttttttgagggagttttaaagattaagtaaaaatgattaaggtgagttgggcgcggtggtttacgtttgtaattttagtattttgggaggtcgaggcgggtggattacgaggttaggagatcgagtttattttggttaatacggtgaaatttcgtttttattaaaaatataaaaaaattagtcgggcgtggtggcgggtgtttgtagttttagttattcgggaggttgaggtaggagaatggcgtgattttgggaggcggaggttgtagtgagtcgagatcgcgttattgtattttagtttgggcgttagagcgagatttcgttttaaaaaaaaaaaaaaaaaaaggaataaggtgaagaagtagattcgtttaaggggtagaaatattggaaggttttcgtttttgatagtggtggttagtttttgggggtttgtggttggttttataagatgttatattaaagggggttttttttggtgggttttgggttgtatttaggttagtatttatgggtgagaacgatatgttttgggttggtggagttcggaggatatagtgaaggtgatgcgggaggatgtatgtaagttagtatttatttatcggtggaagaagttgtttaagtttattttttatagggttatgttttagtaagttatttttgggtgttagtttatgttatttttgttttttatttttttttggtgggtttttttttagggggtattgtttgtaggttttattaagtgaagatagattttttatgtaaaaatagaattgatttaaatagggtattgttgatattttattaaattttgtttttatttattggttttttaatttaggttgttattaaagagttatgatttatatttttaaaatggaatataatagaataggaattaggaggatgtattgtttttaaagaggatattattttatggaatttttttttagatgtgtatgtattttttttttgggttataatataaattaaaatgtgttttttattgtgggtagggttaaaaaagattattttaaggtgatttttatttagttttttttatttatttttaaatttatgtaagtattatagttatagtttttttaagagttagatttagattatttagttttattttaaaaaattatgaaagggaaagtttatttttattgtttataaaggggttgggttttttttcgtgtttttagtaggtgtgtaaggagaagtggagatagatttaggtgtaagtttaatttaatttgtggaatttggataagtatgttttttttttaattttggttttttttatttttaaaatgtaagaatttttgattataatgatttttaagttttaatattttttgtttttaaatatttaggatttatttatttgcgtgttagttttgttagttttgaagtagtaggtgtttaaaatttgtatttttattttttgaataattttattattaaatgtgttattttgaatgaatgaattttgttttttttatgttttttgaatgtatgaaatgaatgtattgaacgtgtttgtgttttattgaatgtaattttataagaggttttttattaattttaatttgttttttttatgtttttatttaagaatatattttttatttttaaattttttattttattatttttattttataatttgaaagtttggaagaaaaaaaggagtgtgatttttattagatttatttaagaataattttatttatagtttaattttattgtgtttttttttttttatatttttatatagggaggtaattttttaagtttagtggaaatgaggattttttattagaagttttttattatattttttcgttttttgtaggagtaggagataatgtatgtaaaagtattttataaagggtagattgataatattattataataggattgttattgggatttgtgatggggaagattgttttttggtggtgattatggttatggattttttttttttttttttttttagatagggtttgttattgttatttttttatttaggttgtagtgtagtggtacgattatggtttattgtagttttgatttttttgggtttaagtaatttttttgttttagttttttgagtagttgagattataggtatatgttatttcgttcggttaatttttgtattttttgtagagattaagtttgttatgttgttttggttttaagtgatttgtttgttttagttttttaaagtgttaggattgtaggtgtgagttattatattcggttttggttatgaattttaatgtggttgttattttttttttattatgtttttaatatttagaatagtgttaggttttaggtagggtttatggttttgtttttgttagaaaagttatgtttttgtaagaaagtttggggttgtttgaaggttatttgtttttgggaattttattttatgtgattgttgatttagtaagtatttatgtaaatgttgagttgtatttaaaatttaattaagtgaattttttattttgagattttgaatatagatatttggatttttttgttagttggttgatatttaacgttatgttgggggttcgaattggtttgtagttttttttagtttttttgggcgatttgttatgtttagtaaattggttttcgttggagtgaatttttttttttatcgtgtttttttttcgttagttaggaattgtttttcggtaaggaaatcggttttttggttttagatgttttgatttttttttaaggaattttttggttcgggaaagtggttatttttttttttttttttatttttttgagtagtttatttttgtgggtggagtttattttttttataagtatttaggataagtttaaggaagttgtgacggtttaaagggttaaattttatttttaatttatatttatatttgtttttagttatttttgttagttggagatatttaatgtaaatggtgtttaatatagtgagtttgttttattgtaaaaaattatttgtaagatttagtaatttatgtttttagtttttggttgttatgggtattgtattatatttgtaagtagaaattattatatttgtaagtagaaaagcgagttattttttttttaggtagaaaaggtatgtaatattgatattttttagagttgtgttgtttgatgttattgtttttttggggaattgaagatagagagagtaatggtggggttagagagagaaaaaatagaaaaatgttattagagtttttagagttgttaattgtgtttttttttttttatatttattagtggttttagtgattgttttttatagaaagggtaatattatgggttgtatggttaggttttgggttattggatgttattcggtattatagggtgagtggaaggagaaattggaatatttagatgattttttttatttttttaatagttttaggatagtttttaaattagaattgataaaggttgagggaagttttaggtaggtggaaaggaaggtaatgtttttatatttgtaatttttttgtataatagattattttgttatttggggttaataaaggtaaagaatagggtaagaaaaagttttttttgtttttttttaatgattaggggagttttaaattttaatttaaggatttacgaatgagagagaaagggattttaagaagtgtattgtgataaaatttgaaaaattaaaatttttaaattgattttaaaaatgttttataagattttaaattaaatgagttttaaaaaaattattttattggaaattttttattagtaaagatagaaaatattagatttttcgttattgtttttagtaaaagtcgggtaatttgaggaaatgtaaaggttaggttgtatttttttgatattaagcgaagtttattttttgttatttgtatggagtaattagtttaacgtggttgaagtaattttttaacgtggtagaaatagaaaaattgaattttaaaatgtaattaatagaattagatagttttggttggatatgttattattatttttgaaaatatttttgttgtttttattgttttttttaatttttttaagaatggtagatattaattattaagttttttattggttttttgttttgttttatagatacgtataggtatatttgaaatgagatatatatatattttttcgttggaaaataaaatgaattattttagtaggaaataaattttttaattttttattaatttaggtatttattaaagataatttaaggggttttttttttttttgttttttaaaatttttttttaggtttttgttttagagttttttttcgggaaattatatttgttttattgtattggtttttaggtatggaagggaggtgtatttggagatttgggagatattttgatttttttttttagttttttttcgtagagttgtgggagtagatattgattttttttttttgatttttttagggatgtttttttattagagggtaaagaggaagaagaggaattgggttaaagatggtttttgttgaatatatatgttaaaattagttaagttaaatcgaatagggtttagttaattttaacgatgtttattataatagagtaggttggaagatttttttattttttaattttaggtgtttgtttttaagggtaggttttttttggaagtagaagttgaatttttggttaggaggggttattttagaagagatcgaagttaaatttgtggtttaggtttgtatatttttatttgtaaggatgtttattttgagatgtagaagatgattttttttgttcgcgtcggggtcgattacgagaggtagtgtaggttttaggaggaaatagtttttaaagtattttttttatgttggttaggtatttcgttatttattagagggttgttattttatttagaggtttgtattatttagttattagtttcgtttagaatttttagggttttcgaatcggtttggttggggaaatggaggaggttggggagggaggatttttaacgggatttacgagggatagggaaatgtcgcgcgttttggggataaattttaaaaaataattttttttttttcgggagcggggtttaagtggttgtattttcggaagtttaagggtcgaggttttggagttgtcgttttagggcggttttttcgggattttttttaggaaggaaagtaaaatataataaaataaatttagattttacgtggggttggaatttagttttagttttgttgtgttttagttggtttcgggtttggacgttagcgaaggaaggcgcgttcgcgttttttatcggggggattcgagggtagcgtcgtgcggggaatatttcggttagtttcggttattcgaggggatttgcgttttagaggaattgtttttattttttttattagcgtcgataagtttaaataatggcgcggacgtttattttggtggtttaattaggatttggtttcgtttagtcgttaggtttttcgggataagtttttttttggtatttttttttggagcgttttggggagaagggagggggattgggtttatttggaggagtaaaagatagttttcgcggaaaaagaaagaaaaattagtaaaatcgttttagtagtttaattaaaggttaatagtagcgtttttttagtagttgataggttaaatgggtaggaaataattgcggggaataaagtttttcgttgttcggtaggggcgaattcggttttttcgtattgaatagttttgttgtgttttttggaggggagaggttttcgttttttttttagttttttttttttcgggtggataggtcggaagaggagcggaaaggaaaggaagggagggaggcggcgaaggcgtttgcgggggggaggagcggttttttgatgggtgtgggggggtttgaattgtttatcgggttcggaagcgtagattttattcgcgcggaagaatgcgcggaatgcggcggcgggaggcggaggcgtagcgcggcggggggcgttcggattttacgcgttttgttcgttttttagttcgagggtcgcggatttattttgttttgtaggtgtggcgggcgttaggtttttttagggattcggatagtacgcgatttttttaggattttcgattattaaatgtgataagatagtttcgtcgtcgagagtttcgttagggttcgttaaaattcggtacgcgtcgttattagatagtcgaaaattcgggttgaataaaaggtgattatttttcgttgttcggatttgtaggcgttagaggatcggtttcgttcggcgttttttagatatttagttttttagtttttcgtttttagagtttggatttagttcgggacggggattggttattttttaagttgagtttggagttgggtagcgggaacgtagatatagatcgttttatatagtgtgtgtaatttaatttttttttttgtatttgttagggttttgtttttagtgaaattggtaaggttaattgtatttcggcgtttatttttttttattttttttttatttttgggattttttcggttcggtttagtgtagggttttagtacgttaaattaataggtttattttgtttttacgcgtttcgtggtatttggaaattgttttcgggatttaagatggatcgcgtagaggagtcgttttattttcgaggttaggatcgttaatgttaataaacggggtttcgttaggacggtgcggaattgtaggtgatcggagaaattcgttcgtattttttttgaggatttgaatttcgtatttgtatagaaattttgtaaatttttatatattaatatatataaaggggcgcgcggggattttcgtaattacgaattacgtcggggattttttttcgtgttaataaggcgtaggtcgttaagattttttttattttttcgattttagttagcgttcggagttttcgtttatttttgagtaggtagatgtcggtgcgttcggcgttgcggcgtagcgtttgtattattagcgatacggtgttgttttcgcggaggttttcggcgcgcgggttgcgttcgtcgtagacgatgatcgtcgagtagaggtcggagcgtaagcgggcgcgtatttttttttcggcgggtaggatttgttttaggtttacggagtttttagttcgtcgtcgtacgatggtgttatagcgtacgttgatcgaatttaggatgtagttcgcgttgtgcgttaggaacggtttgtagtttagtagtaggtatttgtcgtcgttcggtagttttagggtgtcgtggttgtcgttgtcgttcgcgtcgtcgttattttcgtttcggtttattagttttttgagtatattgtagtttatttttcgtagtttttttatcgttattatggtcgtcgggaatcgaggcggttgggcgcgcgaggaagagaagagaattcgggtcgtttaggttgtagaaaggggcgggcgagagttaagaagggacgtttgtagaagtggtcgtaaatttggtttttaagggttttcgcgggagagtttttttttttttgttttttttttttcgtagtttcgcggttatatagtagtcggagcggtttcgggcgtttagtcgggcggcgcgtagagcggagggggaggcgtcggtggaggagagtgtgtttacgagagaggatcgcggatttttttcggcgacggtttttcgtgtatttttgtcggtcgcgcggtttttgtcgttattggcgttagcgttgttttgtttacgttttttcggcgtttagcgtattgttttagttagagtttttttttcggtttagaggtttattaatgttttttcgcgttttcgggggagggggcgttaggtattatttcgttaggtttcgtttcgttttatttcgggtttcgcgtcgtttttcgtttttcgcgttgtttttcgtttttcgcgttgatttttcgtttttttcgggtttttttttttatttttttttcggagtttgaatggagcgcggtcgttggttttcggttacgggaattcgacgttataaagagcggagtaaatagggcgtcgggtgttcgttattaggtttatttataaaatcgaggtcgagaggaagagggaggcggttttcgattcgtcgttagcggcgggtagcgttcggattttgtgaatggagcgcgcggcgtttttcgtcgtttattcgcgggtttagtatgcgtcgcgtttttagttcgatatcggtatttgtgtcgtcgttgtatttcgtcgttaggcgggcggcgttaaaggaaatagtcggttgaggaggttagggttcgggtttgagtttttattttttggtattttcgcgttttttcgcgtgatagtttcgtaggtttttttcggttatttaagtggagaggggatcggagcgttgttgtttatttagcggggtttgatattttttagttttagatttttcgtgcgttttcggttcggttagttttttttgaatatgcgatttttgagacgttagcgtatgtattagcgtgatcgatttttatttaaagttattaaattagttttatagtttttttaagaacgtgggtaattttttgtttggaagatgaaagagaaagttttttcgttcgaagtttaggatcggagtgaggtgtggggtttgttgttttattatttaaagggaggtattaattgtcggaatggtgtttcgagggaggagagtaggttgcgtttttgtttacgttttttaaaagatgtttatttaattttggtcgggggaaaaataaggttttcgggtttgggaaacgtttttattttattttgtatagttgtgaattatttttttaggaaatgatagggtttatatttgttgcggagttggattttggaaaatgtattcgtaaagaatgattttttgaaaggattttagtagttttgggttcgatttatgtttttgggtattttttttttttggttacgtagtagttttttttatttttattttttttttgtatttaattttttagaggcggtttttggttgggggtttgtgtacgtacgcggtggggatcgtgtagaagttaaaaattattcgttcgatattttgttaagttttgttagtgagaattaattatagagtaagggagttataggattcgttcgtagtttcggaggttgtagagtagcgtattttatttcggggcgcgcgtggaagttcgatttaggtagcgagggtatcggtattcgtcgggtttttttcgtttaagtttattttttttttatgtttttgtttcgggcggagcggttttttcgagtttttattttcggtttcgggggttatttttgtatttttcgatcggagttcggcggagtttttattttcgagattttcgattggtttcgttttttattgggtttcgaatgtttcgattttcgggttttattcggatgagttgtaggggtatcgtttgggtaaggtgatatttttttttgtttcgggttttaaaatggtttacgatggtattgtacggattttttttttttttaaaatttagtattttatttattatggattttttgtattttttttttttttaaagaggtattgtattaagatattttttttgattattgatttttcggcgttttttttaaatgttgcgtttaaggtttgtgtttattttagtttaggttttggaaggagttataattgtggattgatcgaggttgttcggtggtaggattttgggcgtcgggtatttcgggtgggagattagtggttaaagtcgtacggcgtggtttttttgtggggagggtaaaaggtgtttgagtttagttttttattttgttgaatgggattgtgggggtttatttaataattcgttttcgataaggagtaaggagttttaggggtttcgatagtttaaggttgattttgttttttcgggttgttttttagtagtttagaaattcgtcgtttgttaggatttagggtcggagttttttcggcgtaagtaaatattgatttttttataaaggttttaataagatatttttgggaaaagttttttaggaggtaggttcgggttaattttacgcgtgtcgtaggagttggggagacgtttttggggcgtacgggtcgcgttttgggttagtttttgtttattttgttttggggtcgtttttttcgtcggattcgcgtttggcgtttacgtggttagtaaataatagttaaatttagggggaggaaaatgtttatagaataaagaggtttgttttttgtatttgatagtaatcgttggtggagaagttttaaatttcgtaggcgatttatacggaaaggggtgtgggagggcgcgtgtgagtgtgtgtgtttacgtgtgcgtgttcgcgtttacgcggttgtttattggaagggagttatagtttgggatttaatgtgtttaagtcgagagttatttgaattgcgaaagcgaaggtttgatttttaaaaaagattaatttttaaaatttatattttattgttaatttaggaattggtttttagttgtgtgaattttagtaaaggagatttaagttattatattgtatttatcgggatattgtgtaaatattttagatatatattttttaattgtatgtttgtgaattattggtttatagttaaatgagtataacgcgagggttattttatgtcggttatagataaaatttgtttttaattcgtttgtagtttgtggacgaaatataattattttaaataggaattttgtgaaatagtttgttaatgagtagattttggagaaaataaaggtaatttggagtaagatacggaatgttattttaaagttaatttaattaattaaggtatatttgtaggaattgggatgggattgtttaaggagaggttttttatttatatttagtagtaaatttcggggtgaaagaatttttaaaaattcgttgtgataagtaaatttagttttttttttattagttagtttttagatcgattttattagttattgttaggttttagtaaaatatttgtttttgtttaggaatatttttttttaattaggaagttgtatgatcggggaatttaaagttcggagtagaatttttagagagaagtatagtttttattttagttttgatgttaatttttgatttattgttttgttttaaagtgtttgaataaaatttgtttgaaaaattattaatgaattaattaaggtggtgatggaaagaaaagttttgtggtttttttttttttgagtaaagaggtagttttgttattacgtcgaattggaataggaataatttattttgtatagattttgttggttaggttttttagattaattaattagggaatttgttttttggtagtgggaaggtttaaaagaattgggagatttttttttgtttttgaaagtagagaagtttgtggtttatatagcgtgtttttaggtaacgtttagaaatggaattgagaaatgtttgtttttttttacgtatttttgtttattaagttaggattgaaagcgaaggaaagtttttaaagtttatattgaatttaattaaaaatttttaaagatatagtttgaggatttttttttttaagttttgattttgttatagattttttttgttttttatgtttgatattttagtatttattaatgatttaaaaggttatgtatcggttaggcgaggtggtttacgttagtaattttagtattttggaagatcgaagtgggtagattatttgaggttaggagtttaagattagtttggttaatatggtgaaattttgttttttttaaaaatataaaattagttagtatgacgggcgcgtatttataattttagttatattggaggttgaggtaggagaatcgtttgaattcgggaggtagaggttgtagtgagttgagatttttttattgtattttagtttgggcgataagagtaaaattttattttaaaataaataaataaatataaataaaaaataataaaagattaagtttttaatttagggtttttgtagaaaggttttaatgtattgttttatttattgttttattttaaaattatttaatttaggttatgttattatttagtttggtggttttgggtaagatagttttttttggttttattttttttatttgtaaaatgaagagtttgggtaggatggttttttaggtttggtttattttcgattttgtatgattttgagtagaagaagattttttagtttcgagtttaagttttataggttttttatttcgttttttgaagagttaagtatattataatgttataagataaaggacgatttttagtttttttttgtttttgttttagaatataaatttatggatagtagagtttatagtttttatttatttgtttagttacgtgttaacgttttaagtattttgataaaacgtttttaaaattttagaaataaattttggaaagaaatatttttttaaacgggataaaaatgaattcggaggttgggtatggatggtggtttatgtttgtaattttttagtattttgggaggttggcggattatttgaggttaggagttggagattagtttgattaatattaaaaatataaa

SEQ ID NO: 99 - DNA, 11735 bp, Artificial Sequence
  chemically treated genomic DNA (Homo sapiens)
atttattttttaataatgttttagtaaaaaggttattattagtagaatttttttaaagtaatattttgtttttttttttaaaaaataatttttttttttttaattattaaagtaatatatgtttattgtagaataggaaaagtataaagaagatggagtagggattttttttttttgttttttatagttttgatttggtttttttgtgatttgggattcgtgtgaataggtgatgtgttgaggagttcgggatagggaatatgtatttttaggaagtgtttgttaagtagtttgtattttgattaataggattttgagtatagggaatttgtggaattttttaggagaagatatattagttggaatggaagtttgttttagtttggggatttttttaggattatttggggttgtttggaataggaatttttttatttatttgttttgtggttttaggtaagttatggtttttttatttggaaaatagtattaagtatttttaatttatttagttgtgggatatagtttttttatttttagtaatgtgtgtagtattggaatttttggtttattagtagaatgtatttttttttatatggggttttggggttgagtttattgtttataatagcgtagtgttttgggagagatttgagtttagattttgattttatttttaaatagttgttaagtttttttatatattttagttttaatttttttatttgtttaaaatgtatttgtgttatagggtagttgggaggtttcgataaaataatgtatgtaaaatatttagttgggtgtttacgtttaggaagtttttaggaaatgtgaattattattatttattttaggtttattttgtgtttggtattttaggggaggaaggcgtaaaagtgaaaataaagtttgggttttgtttttaaggagtttgaagatttgttgataggtagattaaagtaaaagggttttatgtattggagataggattagagacgtaagaaaattgttaatttttgaggttttttataaattaggttttatgttgaaagttttatatgtattatttatgagatttttttataattttatgaggtaagtgttattaggattagaaaattaaggattaaagattagagaatttaggaaattttgtttgggttatatagttaataaagtgttagggtttgggtttgaattttgggatgtttgattttagattttttgttttttttattttatttgagttggattttgaaggatgagttagatttgggtatatggggatggaggggaggaggggtttggaggggaggcggggtttgaagaataggaggatatggagttaggtaagtaaagtttgggagatgggaaagtgtagggcgtgtacggtagaaattttgagggttttgtgtgtgtgtgtgtgtgtgtgtgtgtgtgtgtatgtgtgtgtgtgtgtttgagatagggtttcgttttgtgatttaggttggagtgtagtggtacgattttggtttattgtaatttttattttttgggtttaagcgatttttttgttttagtttttcgagtagttgggattataagtatatattattacgtttggttaattttttttttttttgtatttttagtagagataggtttttgttatgttgattatgttgattttaagtttttggttttaagtgatttatttatttcggttttttaaagtgttgggattataggtatgagttatcgtgttcggtttgtttgtttattttgagatagttttattgtgttatttaggttggagtgtagtgatatgattatggtttattgtagttttgatttttttgggtttaggtgatttttttattttagtttttcgagtagttgggattataggcgtgtgttattacgtttagttaatttttttgtattttggagagatagagttttgttatgttgtttaggttggttttaaatttttgggtttaatagatttgtttattttggttttttaaagtgttgggtttataggtatgaattaatgtgttcggtttgaaattgtaagtatttagtttggttttatgtgagggttttttcgggtttattttatataaattttagttaaaatatattaagtatttattatgtatttgatatttttttaaggattttataattaatattttattaaggttttatagtaaatggagaggttatttgtgtcgtttttattttaaagatgaggaaattgagatttagaatggtttagtaatttgattatgattataatgttaggaatgaatggggtaggaatttaagtttagggaggtagattttagatttgtgttttatatttattgtaagaattagttagtttttaggtagtgaaattttaaagttagttttagttgttcgaaatttaattatagagagttggtttttagttttttattggtttttttttttttttttagttttattttgttatttttatttttttttttggttttggggttttgttgtttttttaaatttgttttgttataattttttttaggtttttttatttgtaaaatggggataataatagtgttcgttttagagtagtgttgtgaggattagaggaggggtttaaggtgtttagagtttagtgtatagtaggtttttaataaaaattagtgattatcgttattattgttatttaagtagtgtttttgaagtaatgtgaaattgattgagtgatagtattatttatatttgatggttgaggaaattgtggttaagagaagtgaagtagcggttgtttagtgttatttaattaggaagtagagagcgggatttatttaatttgggttttttgattttttgattttagattttattaattttttttattttttgtagttaggtagatgagtgaattataattagtatttattatttgttttttgtattttaagttaggttttagatgttaaggggtattttagagagatttgatttagatttttgaaggagtatagaatttaattgataaataaggtatgaaaacgaagttttgttttgttgaggtagaatatattaagggttttaagagggtaagagttattttggttgagaggaagtaggtaggggaggttttttggaggaggtgagatttaagttggtttttaaaggattaaaaaggattaatgagatacgtagattagagtaaaagggttttatgtattggagataaggttagagatgtgatcgggagcggtgatttatatttgtaattttagtattttgggaggttaagtagggcggattgtttgaggttaggagttcgagattagcgtggttaatatggtgaaattttgtttttattgaaaatataaaaattagttaggtatggtggttggcgtttgtaattttagttattcgggaggttgaggtaggagatttatttgaatttgaggtaggagaattgtatcgttgtattttaatttggtgatagagtgagattttgtttaaaaaaaaaaagttagagatataataatagttgttaatttttgaggttttttatgatttaggttttgtgatgaaagttttatatgtattattttatgagatttttttatgattatatgaggtaagtgttattaggaggagaaaattaaggattaaggattagagaatttataaaatttgttttggttatataatgaataataaagtgtttgggtttgggtttgaattcggggttgttggttataaagtttgggtttttaattattatgggttattgttattttggttttaattatttaatgaggaattaagttgtggattgtttttggagggttttgaatgttaaggtttagatttgtataaaaattatatagtattaggtaagaaattagatttgaaatttagtagtagtttttagtaattttttattatttattatttaagtttgtttttttgagtttttttaaatcggagtgatgaggaatgtattattagtaatgaaggtttttgaatgaggtagagaggtttttgtgataaaaggattgtttaaaagaaatttagagatgtttaaatatttattgagtattgggttttaataatataattgtgaataagataaagttttgtagtgggattttgattttgttgtgtttttaggtagtttgggagagtagaagaattttttaattggaaaaataagggttttagagttgggatttgttttagattttgttgttagtttttaaattagggaatttttttgtatgattttgggtaagttatttagttttttagattgttagtttttattatggggattattatttttttttttaggattgttggaataaattaattaaaataacgtttgtaaggatttagtatggtgtttggtattttgtaggcgttgaatagatgttagttttttttataaagaagtagattagtttgttttcgttttttatttttttgttattaaagggaataggtttttggtttttattttagtaggaaaggggatatgaatgtatatgtgttagttaagtaataatgtaaattaataaaagggtttgtggtttggggaatatattgttgggtttgggtttaggttgggatttcgcgttaaaatgtttttttttaattttagggaattcgggtttatttttcggggcgttgtgtattgttttggtcgtttttgtattgtgaatttcggaattattttttgttttcgtttcgtcggttgttaattagcgcggtcggcggttggcggtattaatagtaggtgtggttgtttttttaagtagcgaagttagtgttgtaatcgtcgtttcgaggacgcgtttttttcgggggggggggggggggtggagtttgtattgtcgtagtagttaatcggagcgcggtatttttcgcgggagattcgaatttcgcggtacgacgtttggcgttaaaaaaaaaaaaaaaagaagaaaaaaaagaggtagagaaagatttaaggattagagagcgagtcgtaaggaagtcggtgtagtcgagatttttttttttattttagcgtatcgcgttttcgtcgagtttgagggtacgtcggggatttttttttagagtcggtcggattttaggtgtcgaggttttggggagcgcggggcgtttcgggtcgcggtgttttcgggacgagatagtttttggtagtgttattatcgtagtcgtcgggcgatttttaagcggcgatttttaagcgttgttttttgttcggtcgcgggttaggaggggagggttcggttttgtttcgtaggcgtttattggcggtttttttcggttttcgcgttatgtcgcgggtcgtgtgaaaggcggtagtatcggaattcgtaggtgttcgcgggcgcgttaagtttttttgggtagggggcgttttattcgttatgttgtaagggtttcgggttttggtttcggtcgttgggtagatttcgaaggtggtgttcgcgatgagttttatagagttgtggttattcggttttagtagtttttagttttgtttagttattgttatttattatatatcgttgtattcgtagacggcgtttttcgtagcggcgttaggtatttgtttcgacgttattttttacggattcgagggttaagttgtgcgatgtttgtcggtaggtcggttgtcggtaatgttgggggtttttatcgtttttttttatgtttttttaggtgtgggaaaggagggaggggtgtttgagatttagtttgagtggagtaggtagagttttgggaagagggaagatgagtttttagtttttaggatttagtgtttttaatatttgagtagaagatttttttatttttagattttggatgaaataattttatttattttagtggagtggaatgagtattggattgcgagtttggagggagatttaatttattatttttagtgtattgtgtgattttggggaagtttatgtagttagcgttgtcgttatttatttattattttattgtttggttagaaattagtattgggtgtttgttattgtttaggtaaagagtatggtttggggatattgtgggattttggtaagatagagggataggtttagtgggttttttatatttaatttgttatggatagattttaaattgtttagttagtttttgagatagttttaagtatttgttttaggtttttttttaggtttagtttttttttttagatagttatgtagtagatataaatgtgggtagtttttttgggttttgtttagattggttgttttttttttaagtttttaggttcgttgttagagagggtttaaagtgtagtggtattaggttgtttgttgatttgggtttagggtgtgttttgtgggagtggaatttttggagttcgtgtgaattaaaataattttagggtggggggtggagtgggaaaagtttgggggagtggaggtggtggtggttgaggagtttggtttttggtgtgattttgttattaattttttgtgtgtttttggataagttttggatttagtttgggttttagtgtttttttttttataatgcgtgtgtgtatagggtggttgtggggttagttttttttagttatatttagttttaggttttgggttttggaagtaggttttagggagaggaagggggtgttgtaggtttgtttagttgtgagtttggtgaataagttcgggtatagggataagattattttttattgttttagaggtatttggttagatttgtgttagttagtaagtacggatgtttagttagttttggatgtaggtagagttattattttttgttagtggatttaggttttgtttatgtttaaaacgttaatttttttggagattttttttgtatatgatttttaattaggagggtagtgggtaggaatggtattatttttattttataggttaagtaatcgaggataattgggattgggtattttgtgtttagtgttttatagtttaaaatatttttgtagttcgtgaaatagatggtattaatagttttatgttatagggggaaattgaggtttagagaggggatgtgatttaaggttagagatggggatggggtagagtgatgggatttataaggtagttagtttttttgttttttattttttattttttgtagagataggggtttttttatgttttttaggttggttttaaatttttgggtttaagtaatttttttgttttagttttttaaagtgttgggattataggtatgagttagttattttaatgtatttggttaggtagtaggtttttttttatgtagttttgattttttttaatattgtttaatttaggagttgagttttttttagggaagggagttttgcggtaggtttatttttttttggttagttgtttttagattggaagttttagtaatagttgtggttttatattgttttgaatttttttagaggagtttaagtatatttgtttgtattttttttttagaagggtttagtgattttagtaagaaggttttttttttattgagtgtttttcgtgtgttagatattgtttggtattttttacgtttattattttggttaggatgtttagaatgaggtattttgtagataaggaaattgagtaaagaaaggaagttatttgtttgggttataagtgaagaagtaggggagtttttttgtagtagattattttaaagttttgttaggtttagagttttcgtttttgttaatttttagatgttcggggtttagtttcgtgggtaggtttgttttttgtttatttattttataagggcgtgatttggaatagttttaaatttaattttgggtgtggtcgtttgttttgtggtcgggttgtaaagtgtagggtgagtaggatttgttgtggagtttttgtttaaagggattttaggtattgtttaaggatggtaattaagtttaatggtagaatgaaggttataatttagattttttggttttttgtttagagttttttttaagttttttgaggaaggtttagggaatgtttttttatcgtatgttttttttggttaggcgtatggtattatttttttttacgtttgtaggaagttttgtttaggttggtttgtaatagcgttatttttgtttattgtaaattttattttttaggtttaaatgatttttttgttttagttttttaagtagttgggattattttttgtatttttagtagagatggggttttattatgttggttaggttagtttcgaatttttgattttaggtgatttattcgttttggttttttaaagtgttgggattataagcgtgagttattacgttcggtttttttttttttttaatttgtttatattttttagatttttttttgtgaggtatgaaagaaaataaatattttaatatataattttataaggtaggttaggtgaggaggtgtaggtttagagaggtaagatagtgaattttaggttgtttagttacgaagtggtagagttgggatttgaaagtaaggttcgattttttatatttgtttttatttttattatttgatttagggtttaggagagattaggttttattttgcgtgattttgggtaagttaattttttttttttaagttttagtttttttatcgtggtgttcgtaagggggttgtgtttggtgatttttgattttttgtatttttgtagttgtttgaggaaggagttgtatttttttttataggggttggtagggtgggtttgcgttttgattaggttttgaagatttagttaaaggggttgtttaagagcgtttaggatagggttaagttggtttttggttgtggttatagtttttgtttttttttttttatcgtagtttttttttagtttatttttgaatttttttttttttttattggtgttttttatatattagtgttagtagttttttggtgggggtattttttatgggtaaagcgttttgttgtattattttattgaatttttagtataggtggagataatgatgtttattttataggtgatttgacgttaattgattttttagttaagaaggggaaggtttagatgtaaagttaggttagtttgattttaagatttgtgtttagttttattttgatgttgatttttttgggtttgttttttgttatttgtgttttgtaggtttagtttaagttataggttgatttttttttgggtattgtttaaaggtgttagggaggtatttttagggggatatttgtcgtattgggattttgggagtgtagaataagggtgaaggagagtgagaaaagagagaaggttgtgtgtgtgtgtgtgtgtgtgtgtgtgtgtaagtatatgtagtgatgggggtaggtgggcgtagtttaggttttggtttaaattttagtaaattttggggtagcgtgtgtgggatgtagttgaggtagtttggtatatggttttgtagttagataggtttgggtttaaattttggtttcggtttttgtgtgattttgggtatgtgtttattttttgtaagtttttattttttggttttcgagagttagtgttaatattgatgtggtaggattgttacgagtatgtaataggtttagtatagatattttgtttaaggtttttttgggattttttttggtttgttttggcgggggagataggtgtggttggggaggttttgggttgttttatttttgttttaggtagaattttatttgagtttttttttttttttttgtttttggtgtttttgttgggggatatatgaagaatattaggatgtgtagttttggttaggattgatggaggtttcggagttttttaagttttaattattttagttgtataatggggattagtggtatgggaagatttagtgaagtgatgaatgttggggcgtggtttagggtatgtggaaggttttagttagtgattggttttttttttagtgatagtatggggttaaatttttagaatataggattttattagttaggaaggtagaaaaggaatatttaagagatttatttaagaatgagtagtaaagtgtttggatggtttttaggtttcggtagtggtggaaagtaagagtgttatatttaggttttttaaattaaggagtagggttttttatattagtttaggaagattttttggagggggtaggagtgggggaaggggaattgatagtaggaagagttgttattatttttaatatttgttagtttagttgtgtttagtagtagttagaagttttagttttgttgagtatgattttattattaaatgttaaaataggtttttttgtttaagttagggtaggggtgtttgggggatttagagttggaaagaggaaagaaatgggttcgatgatttttagaaggatgtatgaaggaagaggtcgagattagattttagggaagggattttgtgttttttgaatatttattgtgtgttgagatataggttgagaattttatagaagttaaaggagtaggagttaattagggttttttttttatatgtagatagggagttaaataagtgttttaaagggaagttacgcggggattaatttagtttgttttagggtttttaagatgtagaggttgtttaggtagtgttttttttgaatttttataatagttttttgaggtaggtatttttattttatttatagaggaagaaattgaggttttttagatgtgtaatattttttttaatttgtatcgtgagtttgcgaaggagttggagatttaagtatgggtttttgatttatgttttagtgttttagtgttttagttttgtttttgttttgtttttgtttagttttaattaggagagaggtttttttcgggttagtgtagttttgggtttaattggggttcgggtggtaatagggtggagaggagtagatgggtttgtggtttgatttttttagtaggtgttttttaagtttggcgggaatagaaagggggagttggagggggggggtggttttagttgtttgtttttaagatacgggaaggatttattgtttgtttttttcggtaaagaaagaatggtaaatgtagtttatttaggaggttttggggtttttaagttggagtttaaatatgggggtggggatgtttgtattgttttttattgtgggtatttttttgggttgtggtattgagttaggaagttttttgggtttgggcggatgtttagtttcgttttgataaggattagttgtgggattgtgatgggtatttagtttagttgggttagttgtttttgtaggggggttttttttttattttgatgtggtttaggttttatttattgtttttttttggtattattttttgggtgtggtggggtgaggagtaggtataggagtcggtttagggttcgtggttaaggagttttgagtttttggttagattggttttggtagggttttaagtgtttgggttttagaggatgggagttttatttgttttttagaaaataagattttttttgaaagtttattttttaggttattgatgtttttttattaagtatagtagtgttttattaggattggcggtaaattgaggtatagaggtggttgttaagtggttttattgttttggttttatattagggaaaggttaaaggaggaatgatttttaaattttgttttttttttttttttttttttaagg

SEQ ID NO: 100 - DNA, 11735 bp, Artificial Sequence
  chemically treated genomic DNA (Homo sapiens)
ttttggagaaaagggggagagagaggtagagtttgagaattattttttttttagtttttttttgatgtggggttaaagtaatgaagttatttagtagttatttttgtgttttagtttatcgttagttttggtgaagtattgttgtatttgataggaaaatattagtgatttgagaagtgagtttttaggggaaattttgttttttgaagggtaaataaaatttttattttttgaggtttaggtatttgagattttattaaagttagtttggttaagggtttagagttttttaattacgggttttaagtcggtttttatatttgttttttattttattatatttagaggatgatattaggaggaagtagtgggtggggtttaaattatattagggtggggaaagggtttttttatagaagtagttggtttagttagattgagtgtttattatagttttatagttggtttttattagggcggggttgggtattcgtttagatttaggggattttttggtttagtgttataatttagggaggtgtttatagtgggaagtagtgtaaatatttttatttttatgtttgggttttagtttgagggttttagggttttttgaatagattgtatttgttattttttttttgtcgagaggggtagataatgaatttttttcgtgttttaaggataagtagttgaggttattttttttttttagttttttttttttgttttcgttaagtttgggaaatatttgttggggaaattaaattatagatttatttgtttttttttattttgttgttattcgggttttaattaggtttagagttgtattggttcggaaagggttttttttttggttagggttgggtaggggtagggtaggggtagagttggggtattgggatattgggatataggttagagatttatgtttgaatttttagttttttcgtaggtttacggtataagttgggggaaatgttatatatttaaggagttttagtttttttttttgtaaatggggtaaaaatgtttattttaaggggttattgtaaggatttaaggaaggtattatttgggtagtttttgtattttaaaaattttggaataggttgaattaattttcgcgtggtttttttttgaagtatttatttagttttttgtttgtatgtgggagaaagattttggttagtttttgtttttttaatttttgtaaagtttttagtttgtgttttagtatatagtaggtgtttaggaaatatagagttttttttttaaaatttaatttcgatttttttttttatatatttttttgggggttatcgagtttattttttttttttttttaattttggattttttagatatttttattttggtttggatagagaggtttattttaatatttagtggtgaggttatgtttagtagggttgagatttttaattgttgttgagtatagttgggttgataggtgttggaggtggtgatagttttttttgttgttagtttttttttttttatttttgttttttttaggaagtttttttgggttgatgtgaggagttttgttttttggtttgaggagtttggatataatatttttgttttttattattatcgagatttggaaattatttaaatattttattgtttatttttgaatgagttttttgaatattttttttttatttttttaattggtgaaattttatattttagagatttagttttatgttgttattagagaaagggttagttattggttgagattttttatatgttttgaattacgttttaatatttattattttattgaatttttttatattattaatttttattgtatagttgaagtaattgaggtttggggagtttcgaggtttttattaattttgattaaggttgtatattttagtattttttatatattttttagtaggagtattaagggtagggagaggaagggaagtttaggtggagttttatttgaggtagaggtggggtagtttagagtttttttagttatatttgtttttttcgttagaataaattagaaagaattttaggaagattttgaatagaatatttatgttgagtttgttatatgttcgtaatagttttattatattagtattggtattggttttcggaagttaaaaaatggagatttatagagagtaagtatatgtttaaggttatataaaggtcggagttagggtttgaatttaggtttgtttgattgtaaagttatgtattaggttgttttagttgtattttatatacgttgttttaggatttgttagaatttgggttaaggtttgggttacgtttatttgtttttattattgtatgtatttgtatatatatatatatatatatatatatatagttttttttttttttttatttttttttatttttattttgtatttttagggttttaatgcggtaagtgtttttttaaggatatttttttgatatttttggatagtgtttagaggaaagttagtttatggtttgggttgaatttgtagaatataggtggtagaggataagtttaggaggattagtattaaggtgaggttgagtataggttttggagttagattggtttggttttgtatttaggtttttttttttttagttgggaaattagttgacgttaagttatttataaaatgggtattattgtttttatttatgttgaggatttagtgagatagtgtagtaaagcgttttgtttatagggagtgtttttattagggagttgttagtattgatgtatggggagtattagtgggaaaaggggaaagtttaagggtgagttgaaaagagattgcgatgaggggaggagagtaaaggttatggttatagttagaggttagtttagttttattttggacgtttttaggtagtttttttggttggatttttaaggtttggttaggacgtaagtttattttgttaatttttatggagaagagtatagttttttttttaggtagttgtagaagtgtagagggttagagattattaggtataatttttttacgggtattacggtgaggaaattgggatttggggaagaggaattgatttgtttaaggttacgtagagtggagtttggttttttttaagttttaagttagatggtgggggtaggagtaaatgtaaggggtcgaattttgtttttagattttagttttgttatttcgtagttgaatagtttgggatttattgttttgtttttttgagtttatatttttttatttgatttgttttgtagagttgtgtgttaaaatgtttatttttttttatgttttataagaggaaatttggaaaatgtagataaattgaaagaaaaggaggatcgggcgtggtggtttacgtttgtaattttagtattttgggaggttaaggcgggtggattatttgaggttaggagttcgaagttagtttggttaatatggtgaaattttatttttattaaaaatataaaaagtaattttagttatttgggaggttgagataggagaattatttgaatttgggaggtggagtttgtagtgagtagagatggcgttattgtaagttagtttgggtagagttttttgtaggcgtgaaagagaatgatgttatgcgtttggttagaggaggtatgcgataaaggggtattttttgagttttttttagaggatttggaaagagttttggatagggagttaggagatttgggttgtggtttttattttgttattgaatttggttgttatttttggatagtgtttgaggtttttttaaatagaagttttataataaattttgtttattttgtattttgtagttcggttataaagtaagcggttatatttagggttgggtttggaattgttttaggttacgtttttgtaaaatgagtaagtagagggtaggtttgtttacggggttgggtttcgggtatttggggattgataggagcgggagttttgggtttggtagggttttagggtggtttgttgtaaggagatttttttgtttttttatttgtgatttaggtaagtgattttttttttttgtttagtttttttatttgtaaggtgttttattttggatattttgattaagataatgaacgtgaagagtgttaagtagtgtttggtatacgagaggtatttagtaaaagagagatttttttgttaagattattgagtttttttgggagggaggtatagatagatgtatttgggtttttttgggagggtttaaagtagtgtaaaattatagttgttattgaaatttttagtttgaaagtagttggttagaggagagtgggtttgtcgtaaagtttttttttttggggggagtttagtttttaagttaggtagtattaaaaaaagttaaggttatatagagaagagtttgttgtttgattaggtgtattagagtagttagtttatgtttgtaattttagtattttgggaggttgaggtaagaggattgtttgagtttaggagtttgagattagtttggggaatatagggagatttttgtttttataaaaaataaaaaataaaagatagaagagttgattgttttgtgagttttattattttattttatttttatttttgattttaggttatattttttttttgagttttagtttttttttgtaatatggagttattaatgttatttattttacgaattataaagatgttttaggttataaaatattgaatataagatatttaattttagttattttcggttgtttaatttgtaaaatggggataatattatttttgtttattgtttttttagttagaaattatgtgtaggaagggtttttaggaaggttaacgttttgaatatgggtaaagtttgagtttattggtagggagtggtggttttgtttgtatttagagttggttgggtattcgtgtttgttgattagtataggtttgattagatgtttttggggtagtggggggtggttttatttttgtattcgaatttatttattaaatttataattaagtaaatttataatattttttttttttttttggagtttgtttttaaaatttaggatttggagttgaatgtggttgagaagagttagttttatagttattttgtgtatatacgtattgtgaaggagagaatattgaagtttagattgggtttaagatttgtttaaggatatatagagaattagtggtagagttatattagaaattaggttttttaattattattatttttatttttttaggttttttttattttattttttattttaaagttgttttgatttatacgggttttaggaattttatttttataaaatatattttgagtttaggttagtaggtagtttggtgttattatattttgggttttttttggtaacgagtttgggagtttgaggagagagtagttaatttgaatagaatttaagggggttgtttatatttgtatttgttatatggttgtttgggagggaagattgggtttgggggaggatttagggtagatatttggggttattttaggagttggttggataatttggagtttgtttatggtagattggatgtgagagatttattagatttatttttttgttttattaaagttttatagtgtttttaggttatattttttgtttggataatagtaggtatttagtattggtttttggttaaataatgaagtaatgaatgaatggcggtaacgttggttgtatggatttttttaaggttatatagtgtattgggagtagtgagttgggtttttttttagattcgtaatttagtgtttattttattttattagaatggatgagattattttatttaaagtttgaaaatgaaggggttttttatttagatattgggggtattgggttttggaaattgaaagtttattttttttttttttaaaattttatttgttttatttaaattggattttaggtatttttttttttttttttatatttggaaaagtatagggggaagcggtgggggtttttagtattatcggtagtcggtttgtcggtaggtatcgtataatttggttttcgggttcgtggggagtggcgtcgaggtaggtgtttggcgtcgttgcgggaggcgtcgtttgcgggtatagcggtgtgtagtaggtagtagtagttgggtagagttgggggttgttgaggtcggatggttatagttttgtggggtttatcgcgggtattattttcggggtttgtttagcggtcgaagttaaggttcggggtttttgtagtatagcgagtaaggcgttttttatttaaaagggtttggcgcgttcgcggatatttgcgggtttcggtgttgtcgttttttatacggttcgcggtatggcgcggaggtcgggggaagtcgttaatggacgtttgcggggtaaggtcggattttttttttttggttcgcggtcgagtagagagtagcgtttagagatcgtcgtttggagatcgttcggcggttgcggtggtggtattgttaggggttgtttcgtttcgagggtatcgcgattcgggacgtttcgcgttttttaaggtttcggtatttggggttcggtcggttttggggaggggttttcggcgtgtttttaagttcggcggagacgcgatgcgttgggatggggaggggggtttcgattgtatcgatttttttgcggttcgttttttagtttttgagtttttttttgttttttttttttttttttttttttttttttttagcgttaaacgtcgtgtcgcgaaattcggatttttcgcggaaaatgtcgcgtttcggttggttgttgcgatagtataggttttattttttttttttttttcggaaagaacgcgttttcgaggcggcgattgtaatattagtttcgttgtttaaaggggtagttatatttgttgttggtgtcgttagtcgtcggtcgcgttagttagtagtcggcgagacggagatagagggtggtttcgggatttatagtgtagaggcggttagagtagtgtatagcgtttcgagaaatgggttcggattttttgggattgaagggaaatattttggcgcggggttttagtttgagtttagatttagtagtgtattttttaggttataggtttttttgttagtttgtattgttgtttagttagtatatgtgtatttatatttttttttttgttaaaatgaaggttaggaatttgttttttttaatggtagaggggtgagggacggaggtaaattagtttatttttttgtagggaaaattaatatttatttagcgtttataggatgttaggtattatgttagatttttataagcgttgttttagttaatttattttaataattttgggaagaggaatgatgatttttatgataaagattgatagtttgaaaggttgggtaatttgtttaaggttatatagagagattttttgatttgagagttggtaatagaatttgggataggttttagttttggagtttttgtttttttagttaaggggtttttttatttttttaagttgtttgggggtatagtagggttagagttttattgtagagttttgttttgtttatagttgtattattaggatttaatatttagtaaatgtttgaatatttttaggttttttttaaataatttttttgttataagagtttttttgttttatttaaaaatttttattgttgataatatattttttattatttcggtttagagaggtttagagaagtaaatttgggtagtgagtggtaaaaagttgttagaagttgttgttagattttaggtttgattttttgtttggtgttgtgtgatttttatgtaagtttgagttttggtatttaaagttttttagagatagtttatagtttaattttttattagatggttgaggttaaggtggtaataatttatgatgattaagagtttaggttttgtagttaatagtttcgaatttaaatttaggtttagatattttattatttattgtgtgattaaggtaaattttgtaaattttttgatttttgatttttgattttttttttttaatagtatttattttatatgattatgaggaaattttatgagataatgtatataaagtttttattatagaatttggattataaggagttttaagaattggtagttgttgttatatttttgattttttttttttagatagagttttattttgttattaggttggagtgtagcggtgtaatttttttgttttaggtttaagtgagttttttgttttagtttttcgagtagttgggattataggcgttagttattatgtttggttaatttttgtatttttagtagaggtagggttttattatgttggttacgttggtttcggatttttgattttaggtaattcgttttatttggttttttaaagtgttgggattataggtgtgagttatcgttttcggttatatttttgattttatttttagtgtataagatttttttattttagtttacgtattttattggttttttttggttttttgagggttagtttaaattttattttttttaagaagttttttttgtttgtttttttttagttagaatggtttttatttttttgggatttttagtgtgttttattttaataaaataaggtttcgtttttatattttgtttattagttaggttttatgtttttttaagaatttaggttagatttttttagaatgttttttagtatttagggtttggtttggagtgtagaaggtaggtaataaatattgattatgatttatttatttgtttggttgtaaagaataggagaagttaatgagatttgaagttagaaagttaggaggtttagattaagtaagtttcgttttttattttttagttaagtgatattggatagtcgttgttttattttttttaattataatttttttaattattaaatgtggataatgttattatttagttaattttatattattttagagatattatttaaatgatagtggtggcgatgattattgatttttattgagaatttattatatattgggttttaagtattttgagttttttttttgatttttataatattgttttgagacggatattattattatttttattttatagatgagggaatttggaaggaattgtggtagagtaggtttggggaagtagtagggttttagggttagggagggaaatgggggtggtagggtggagttgggagaaaagaagggagttagtgaggggttgagagttagttttttgtggttgagtttcgggtagttggggttggttttagagttttattgtttgggaattgattaatttttgtaataggtgtggggtatagatttgaaatttgtttttttgagtttgaatttttgttttatttatttttagtattgtgattatggttaggttgttggattattttgagttttaatttttttatttttgaaatggaggcggtataagtgatttttttatttattgtgaggttttagtaaggtgttggttataaagtttttagagaaatgttaggtgtatggtaggtatttaatatattttggttaaggtttatgtgaaatggattcgaagaggtttttatatggaattagattaaatatttgtagttttaggtcgggtatattggtttatgtttgtgaatttagtattttgggaggttaaggtggatagatttgttgagtttaggagtttgagattagtttgggtaatatggtaaaattttgtttttttaaaatatagaaaaattagttgggcgtggtggtatacgtttgtaattttagttgttcgggaggttgaggtgggaggattatttgagtttagggaggttaaggttgtagtgagttatgattatgttattgtattttagtttgggtgatatagtaagattgttttaaaataaataaataggtcgggtacggtggtttatgtttgtaattttagtattttgggaggtcgaggtgggtggattatttgagattaggagtttgagattagtatggttaatatggtaaaaatttgtttttattaaaaatataaaaaaaaaaaaaattagttaggcgtggtggtgtgtgtttgtaattttagttattcgggaggttgaggtaggagaatcgtttgaatttaggaggtggaggttgtaatgagttaagatcgtgttattgtattttagtttgggttatagagcgagattttgttttaaatatatatatatatatatatatatatatatatatatatatatatatataaaatttttagagtttttgtcgtatacgttttatatttttttattttttaggttttgtttatttggttttatatttttttattttttaggtttcgttttttttttaggtttttttttttttttatttttatgtgtttaaatttgatttattttttaaggtttaatttaaatggagtggaaggagtaaagaatttgaagttagatattttagggtttaaatttaggttttgatattttattagttgtgtgatttaggtaaaattttttaaattttttgatttttgatttttgattttttaattttaatagtatttattttataggattgtgaagaaattttatagataatgtatataaagtttttagtatggaatttggtttataaggagttttaagaattggtagtttttttacgtttttgattttatttttagtgtataagatttttttattttaatttatttattaataaatttttagattttttgggggtaggatttaggttttgtttttatttttgcgttttttttttttgagatgttaggtataaagtaggtttgaaataaatgataatagtttatattttttgagaattttttaggcgtaaatatttagttaggtattttatatatattattttgtcgaaattttttaattattttgtaatataggtatattttggatagatgaagaaattgaagttgaaatatgtaaaggaatttgataattgtttgaagatgaaattaggatttgaatttagattttttttaaggtattgcgttgttgtgaatagtgaatttagttttaaaattttatgtgaaggagggtatattttgttaatgaattaggggttttagtgttgtatatattgttggaagtggaaagattgtgttttataattggatgagttggggatgtttagtattattttttagatgaggaagttatgatttgtttgaggttatagagtaggtaagtgaggaagtttttgttttaggtaattttagatagttttggaaaaatttttaaattaaagtaaatttttattttagttggtgtatttttttttgaaaaattttatagattttttgtgtttaaagttttgttaattagaatataaattgtttgatagatattttttgaaggtatatattttttgtttcgggttttttagtatattatttgtttatacgaattttaaattatagagaaattagattagagttatgggaaataagggagaaaaatttttgttttattttttttgtgttttttttattttataataaatatgtattattttggtgattggagaaaaaaaagttgttttttaaaaagagaaataaggtattgttttaaggaagttttgttagtggtaatttttttattggaatattgttggaagatgggt

SEQ ID NO: 101 - DNA, 12405 bp, Artificial Sequence
  chemically treated genomic DNA (Homo sapiens)
  unsure (7895)
tttttttaaaagtttatataaagtttatttaaaaatttttttttaaaaatttaaagtttatgtattttaaaaatattaaatatagtagtagttagtttggagtgataagacgatttatgtagattttttaaggagagatttttttgtggtagagtagtgattgggaattgaaatatgcggtttttggagggagcgttttgcgtttttaaagtaagttatttatttttttatatttaatttttttattgatttggtagtttttatagatttattgaaaatatatagtggttatttttaggaattattttttgtttgtttttattttaagtaattttttatttttttattttttataatattttgtttattttaggtattattttattttttaaattttattttataaagtgttggttataattttagagttttagatatgtatgtaattttttgttattgtttattattttttaataataagtggaaattaagatttttttgtttttttaggttattttatatatttgatatgaaattttttgtagattattgttatttgaattgtttttttaatgtagttatataatttggaaatttttggttgtgtattaaatttatttaaagttatttgaaattatataagtttatttaaaaatgttttattataaatgtatttatgaatatgtagttaatgttaaattttattttgattatttattagttttgtggatttgtttttagtataatagggagaatattaaagttgttatgagtattaaattagataatgtttttgtaagattttattatataattattttgttattggtttataaaaggttttttttaattgtggattgaaataaaatattttgtattaatatttaaagatataaattatttttaatagtgtttaaaattaagtaataattagtttaaattttattatgaaatagattaatataaagtattatgtggtttagttgaaagtaagtttttttagtttttattttaatttttattaaaataagtttattgtattttaaggtggggtaataaaagtaaaattttattttaaaaaaaaaaaaaaaaagttagtttgttattattaataaataagtaaaattttgttggatttttttaaatatttaattattagattatgataaaattgtgtatattttaaattgattttgaatttttataaaaatggtatttgtgaaattttataaatgttagatattataagtttaatgagttgtggattaagaaattattttgttttgaaatatttaagtttttttttttagttttgaattagttaaggagttgtatttttaaaatgtatttaaaaaaagaaaatttaattaggggtatataaataatattataattgaaaatagtatttatttaattaattagcgtaaattgaatttaatgaaggattattgttatgtatttattatttttataggttaatgaaatatagtttagtttaattggatttttttttttttttttttttttaggatagatttttattttgttatttaggttggattgtagtggtaggatgataggttattatatttttgattttttgggtttaagtgatttttttattttagtttttttagtggttgggattataagtgtgtattattacgtttagttaatttttgtagtttttgtagaaatggggttttgttatgttgtttaggttggttttgagtttttgggtttaggtaattttttttttttagttttttaaagtgttaggattatagataggcgtgagtgtttagttaggcgtgagtatttagttagttttgatttttgttggaaataatttttaagtttttgttagaaatggtataaagaattgatgtaggaatttatagttttttgagagttattttttttatagttaaaaggatatagaaataaaagttaaattataaaattgattaatattatgtttttaaatattatttgtattataatttttaaaaaattatgttttttagtttttttaaaaaatagaatttttaaaaatatttagtaatatttaaaaaatttttgtattattaatttttgttttttgtcgatttttaggaaaaatatatattgtattattttttattgtgttatttggcgttttttaaagaatgattatgttgtgtatgagaattatttgaattgtgaaaaatgtggatttataggttatatttttatattaaatgttaatttgatttttggggtttggatttaagtatttagatttttaataaatattgtagatgatttttttttttaaggtttgggaattattggtataagcgatttttagttttttagatagatataagattttgaatgttaattaaaatggttgttaatttgtgaataatttttaattgaattttaggtaatttaaagagataaaaaatttattgtgaaaaatataaataatagtgtaaaataaattgttaattgattttttagaattattaataatataattgttttgtagaaaattttttaaagttgaaatttaaaaaatattgtttttaaaaattattaagatagttattataaaatatgattatatgttatgggatgaattatatttttttaatatttgtatgttgaaattttaattttcgggtttttgggaggtgattaggtttagatgaaatcgtgaagattgagtttttagatggaattagtgtttttataagaaatttgagagtttatgttgtttttgttttgtttgtttttttttttttttttgttatttgatataatgagaaagttataatttgatagttaagaagggggtttttattataatttggttatggtagttttttgatcgtcgatttgtagtttttagaattgtgagaaaattaattttcgttaagttatttagtttatggtatttttttaaattaagatattatagaagtgtaagttttaaaaatattaatatatttagtgttattaatttttgtttttgtatatataatataatgttttgttataaagttaaaaataaattagaatttttttaatttagtatgttttaagaaatattatttgataataattaataaaataaatttgtaaaatttgttaatgatgtgttttatgttaaattaaataaagatagttttttttggataggttgttggaaaatggttgtattaattgaattttttatgttttattttagatttttaattttaagttttgtttatagatttgattaaaataaaggttattatgaataggttattaataaaggttataaagttttgtgtttatgatgtgttataaatggtgtgtttagttttattagttaatgttgttgtatttgatgtcgttttagtgattttttttgttagtttattgttatttaaaattaagtaaaattttttttgtatgaaatttttttgattaattattgttatatagaatttttatttatttaattttttttttttttatttgagatagagttttgttttgttgtttaggttgaagtgtagtggtggtatttcggtttattgtaatattgtaacgtttgttttttgggtttaagagatttttttgttttaggttttggagtagttgggattataggcgggtattattatttttcgttaatttttgtatttttagtagagacggggttttattatgttggttaggttggtttcgaatttttgattttaaatgatttgtttgtttcggttttttaaagtgttgggattataggcgtaagttatcgcgtttggttttattcgtttaatttttattgtttattatatttaaagtgttgagtgtgataataagttatttaaaatttagtttggatttttaagagtttgtaatataatgaggaaaaaattttaacgatttttttttatttagatttttataatgttatttgttattaatagtttggaatattattgaagtttaagggtttgtggttatttaatattttaaatataatataatttggtttaaataagatattaagaattttggttaagaattttggttaaatataggagatttggaatttaacggtatgtttttggtaatttataatttttttttttatacgtttttttatgtagaaagtaaaggttttggaaaggattgatgaaaattaattttaaaattttacgatgtttttttttgtatttcgaatttaaaagggtgagttatgaagtaaaattttgtatttggtttaagttattgaaatatttgtaaacgatgttagagttcgaaaagagtaaagatagtagaaatcgtttagagaaagtaatttattgttgaagttttgtaaatttgagtagttaattaattttatcgtttataaacgtttggtcgttaggtattgtgattttttgtttagataaaagttttttttttttttgttttttttttttttttttttttgttttgtcgcgtgagattattatttttcgggttagttcgcgaacgttagggaggcgagtgtgaaatatacgcgttaatattttttttttttttcgtgcgttttttttttttatagaaaaatgtgtttttaggtaacggcgggcggcggcgttattttttgttatttaaatttaggtttttatttttcgtagtttttttttttcgtttttattttttttttttcggtcgtgggttttatttacgttttttcgggtttggggagggggcggaggttcggcgtgataagcggtttagattttcgtgggcgtcgtatatttgttgtttgtagtagttagcgattcgtattatcgttttcggcgggcggggaagcggtcgtagcggagtcgattcggtaggtggtcgcgggcggggtcggcgagcgaaagtgcgcgggggttcgattatcgcggggtcgggacgcgatggcggcggtagagttcgcgagttcgggttagtaggcgtcggtagggtaggggtagggttagcggtcgtcgtcgtagttttcgtaggcgtaagtttcgtagtcgttttcgtcgtcgtagttcgggggcgtcgggggcggtagtagtaggtacgagaagagtttggggttgtttattattaagttcgtgtcgttgttgtaggaggttaaggacggcgttttggattttaaagcggtgagtttcggaggcggggacgggggcggatttcggaattcgtggttttcggggaagtttagtttttcgtcgcgtgggtttagcggcgtggtgtagacgcgttttgcggggattcgggatcgggtaattcgaggattatgtggtttgcgttcgggtcgtggacgtcgggatgggggagggacgagggattaggatggtatcgagcggacgcgtaattaatggggttcggcgttacgttgggttttcgataaagagtttaggatttcgagcgcgttcgcgtggtttttgttttcgggcgtagggatttgagggtaatcgagtgtttgttgttttgcgtttatttgtggtagaggtttacggggtaacgggcgttttgttcggagatatcgtggatatcgattttgttgttaagaatggatggttttaataggcgattttagttggaattatgtttttgtagtttaaataaaaaggaggaaaaataaaatttagtttgttatttttattagatgaaagaaaaaaaaaaaagagtatttttttttacgttttttttcgataaaatagtattaaattttttttgtgtattttttttattattttgatagttaggaggggtatttgatttgtgattttatttggtatgtgttatgggtttttaaaagtgagatttgttgttatacgaaaaggggatattttataatttttatttaaagaggtggaagtgtttagtaaattttttttttgcgtcgttttttatagcgtttagattttttaaataggagtaggtattaaaagttgttttgttatatagaatgatttaatcgatttaggaaggatttggaagaatttaatagcgtttaggataatgagaatgtggttatttcgcgcgaagtttaagaattaaagttttagaaataaataaataaaaaatattaattgtttaataattattgtaaattttttttgattttttaaatgtggttttatttggaggattggttttagtttttaggggagtgtttggattattttatttggtttgagagtgttattgtatttttaaggttttgtataaagtagtggtagttttttgaatgtaaggattaagatttgtaggggttaatttttttgttagaagtttttttttagtgtagtttaaggggaagtagatttttttagtgtttttttttttttttggatgtagttggtgtttaattagtgattgttgaattgaattatttaaattgtttaattttatataattgaggtatgttgtatatattttgtattttggtaagtaatttttattattttttttttgatatgttatttttggaattttttttttatttttggaaattttttgtttttttttttttattatagttttttttttttttttttttttgaaagtgatttatggtatgtgtagtatttaaattgtagtgaattaaaatggattttgtttaaagaattttataggaagttatgaagttattagagaaagttaggaatgttataaagtataggtggtaaattgttgtttaaaatttagaaatttagttgtagtttgtgattttggtgtaagaaaattagggaagtttggggttttttaggtaaaattgaattttgacggttggattttgagggttttttttttagtttgttttaggatatggtggaattttgtttttttttgatttgaaattttttagtttttttttgttttatttgtggttatataattgttttatagaagttatagaggtagtgagtaggatgtaaagtttggtattttatgataataattgttttatttattttggaatttttttaaaaatttaaaggtttttataataatattgttttattatattaatgattttatatttttagaaaagagtttgaatgtttttagtttttatatatatgtatgaaaaatatatgttttatgtattttacgtatattttttatttatttatatatatttatatatgtaaaaatttttttttttttttttttgagacggagttttgttttgtcgtttaggttggagtgtagtggcgcgatttgggtttattgtaagtttcgtttttcgggtttacgttatttttttgtgttagtttttcgagtagttcggattataggcgttcgttagcgtatttagttaatttttttgtaattttagtagagatagggttttattgtgttagttaggatggtttcgattttttgattttgtgatttacgcgtttcggttttttaaagtgttgggattataggcgtgagttatcgcgttcggttaaaaattttatattgaaatttttttaatgatattttttattatatattatagtaaaagatcgttaaagttttttttttttgagattgagttttgttttgttatttaggttggagtgtagtggtagatttttgtttattgtaatttttatttttcgggtttaagcgatttttttgttttagttttttaagtagttgggattataggtgttcgttattatgttcgatttatttttgtatgtttagtagagaaggggttttattatgttggttaggttggtgtcgaattgttaattttaaatgatttgtttgttttagttttttagagtgttgggattataggcgtgagttattatatttagtttattaagatatgtttgataatatatattaaagatggatttatattgataattataaatttnttttaatttgaaattataaagatatatttttttttgtatttttattttggtgggggtatattttagtataatttttttgaaattttttagttttttaaagtaaatgtgattaagaaatatatatatttatttaatagttatagtggtaagtatgggttgggaatggtgatttgttttgttttttatttattttttgtttgtatttaggtaattgtttagggttggaggaaaatgtaaaataatgttgataggttttattttaaatttatgattattaattataaaggggttagtagtgttgtttagcgttttttttatgttatttattgttttgtttttttatatgaatattttgtatttttttttttttttttaattattaatagtttttttttttttttttcgattttagtgttgatgagagaataaaaattaattagaaggaaatgtttaatttttttttttatttggtttattaatgtatttatatttgtatttaggtattttgttggattttagttattaatatgttttgttattatttaaggatagtttttatttattgaatttatattttgttttttttatttattgttatttttagtagttatttttttttttttttgtattgttaatgatttttttttttttattagattatttttattagtatatttatatgttgaaatagtttttatttttaaaaggaaaaaaaaaaattttttggagattttatagttttttaaaaatattgttttatttttttttatttttttgtagtagaattttttaagagttgtttattttagttttttttttatttttttttgaaatttttttattaagatttttagttttatttttttgttaaaatagttttgattaaagttatttatgatttttttaaaggtaaattattgattagtttttattaatttgttttgatagtaatatttgatatggttatatttttttatattttttttttttggattttaagattttatattttttgatttttttttgattttagtggtaggttgtttttttattttttggattttaaatttttttagagttggtttttaatttttttttatatgtttattttttatgttaaattagtggattttattttgtggtataaattgtttattcgttgaagattattgaatttatatttttagtttggattttttttttaagtatatattttcgtgtttagtggttttgttttttttttgtggatgttagaaggtttaaggttagtttttttatttttagtgttttaaattggttttttttgtagtatattttatttgtaattgtttttattaaaaattgaagttatttttgatttttttttagggatttgttgtttgttatatttttaaaatatatttagaatgttaatattttttattatttttatagttatttttttatttaagttattattattttttgtatggattattgttatcgttattttgttggtttttttttttgtttttattttttttttttatttttttttttattattttgttatattggtttgtttgtttttttttgaagaagttaagtattttttatattttagaattttcgtgtttgttgttttttttgtttagaatgttttattattaaatatttataggggttttttattttatttaaatgtttagatgttattttgttagagagttttttttttgaaaattttatttgatatagtattttttttttgtttgtattttttttaaatataattatttgtatattattaattttttttttttttttgagggtagggattttgttttgttatatttatatttttaagatttagaattaagtttggaatattttggtgttaaatgaatggaggaaggtagtggtgatagtggtggtggtggtggtggtggagatttatggtattattttgttagatattaaagttttaaattagtttttaaagaatttatatataatttttttaaatattatataaaataaggtaaatttgtatatatataaattttaattaattttaaatatagttttatttacgattcgttttaatttgtatttgatgatgaggttgattagttaatatttaagtaattattatatagtagatattgcggtaagattatttagtttaatttttataatattttttttagtatatgttatattattttatgaaaaaggaaatgaggtttagtgagtttacgatgaggttagttgaagataggaagtggtagttttgggattggattttagtgtgtttagttttagaattttttaagaatgatgggattggttgggtgttatggtttatatttgtaattttagtattttgggaggtcgaggtgggtggattatttggggttaggagtttaagattagtttggttaatatggtgaaatttcgtttttattaaaaatataaaaattagttagtcgtggtggtatatatttgtagttttagttatttgggaggttgaggtaggagaattagttgaatttaggtggtggaggttgtagtgagttaagattatattattgtattttagtttcggtaagagagggagattttgttttaaaaaaaaaaaagaatgatgggattttttaaaataaaatttttttggagatttttttatatatgatttgtatatgttagttatttatatgtttatatatttaaatagtaaagtatttgagaaataatgtttagttttagaaattaggggttaaatgttgtgattgttaagtagtaataaatataaatgataaataagatatttttttaaaattttgagttaaaaattaaattttatggtattttgtttaatgatttaagttagattttgtggtttggtttatataaatatgttttgatattaaaattagagtgttgttgttatggttgtgaatgtttttttgtgtgagtatatagatattagtaatatagagttatggtttggagttttttgagttatttttttagagagaggaaagtgagaaatgaaattttagttttagatttgtatcgttaattttgtagtcgtgtattgttttttataaaaatagtttcgaagttaagagtaaaaattttgtgaaggtcgataaaataagaagggaattgttaagtataagggaagaaggtattaatgaaataaattatggttagttttgttgttaattttttggttttttagaagggatagtgttaagttagagttggggaataaagagttttatttttttgttttttttttttttgttatattttgtttatttttttggtttattgaggtatgaattttttttttgaggaagatttgaatgatgggatagtagtaatttgggggttttggtggtatatataaaaaaatgtgtttgagagaattgatattttttttaagattttaaatgtttgtatagtgaatatagttgttagtggtattttttttggggggaaggtaggtttagattgtaaatattgtgttgagttaggtttttatagaattaagaaagtagtgatgttttttgggagagttgttagtaattatgcgaagttgggagagttgttagtaattatgtgaagttaaattttgtttatttagatattttagataatgtgttgaaaattgttagtagagatataaatatttgtaattattatggattttaaaatgtggttttatatttaaaataggttattgtttaatttattttgaaaatttttttgaggttttttttgtttttttgggaatatatattaaaaatgtgaattggaattaattagaggaattgtttgttgaatttataatatgatagtatatattgttttgttgattttatttaatgtgaatgtagttattaagtttttgtataatagttgttagtgtaattttgagttattgattttgattttttgttgattttatgttttgtgttaggatggtatgatttatttttttgttttcgttattaatttaaaaatgtagatatttattttaaggtattataagtgtgtatatagtttagaatttttaagtgttttaattattaaaataaattgttgagatgtaattttttaaaattttaaaaaataagtaatgtatttttagatgagattgtttatgaatagagaaataagataggaggtgatatggataggtaattagtagtttttttttaggattagtttataaggtgatataaagtatttttattgtgtttttttatttttgtaggttttgtgttatgattttaatttttttttttgttttaatatttgttagtttttaaatggaataatttttttggtatttgtagtgtttgggagatgttttgaatatgtttagttattgtttttaagtaattgagtgggttaaatttgagattggatttgttgtggatttaataattaattttttttggttttaaaatatgatttgttttttattttattgttttcgttgttttttttgaatagg

SEQ ID NO: 102 - DNA, 12405 bp, Artificial Sequence
  chemically treated genomic DNA (Homo sapiens)
  unsure (4511)
tttgtttaggaaagataacgagaatagtgaaataaagggtaagttatattttaaagttaaaaagggttgattattaaatttataataagtttaattttaaatttgatttatttagttgtttggggataatagttgagtatgtttaaagtattttttaaatattgtaaatattaaagaaattattttatttaaaagttagtagatgttggaatagaaaaagaaattaaggttatgatataaagtttgtaaaaataaaagaatataataagaatattttgtgttattttatggattaattttgaggaggagttattaattgtttatttatgttattttttattttatttttttgtttataaatagttttatttaaagatgtattatttattttttaaaattttaaagaattatattttagtaatttattttggtaattaagatatttggaaattttgaattatatgtatatttataatattttgaaataaatatttatatttttaaattaataacgaaaatagaggaatgaattatgttattttaatataaagtataaaattagtaagaaattagaattaatagtttaagattgtattagtaattattatataaaaatttggtagttgtatttatattagataagattaataaaataatatatgttattatgttatgaatttaataaataatttttttgattagttttaatttatatttttgatgtgtgtttttaaaagaataaagagaattttaaagaagtttttagagtggattagataatagtttattttgaatgtggagttatattttaagatttatggtagttataaatatttgtgtttttattgataatttttagtatattatttaaaatatttaaatgaataggatttagttttatataattgttaatagtttttttagtttcgtataattgttaatagtttttttagagagtattattatttttttgattttgtgaaaatttagtttagtatagtgtttgtaatttggatttgttttttttttagagaaggtgttattgatagttatatttattgtataggtatttgggattttaagagaaatgttagtttttttagatatatttttttgtatgtgttattaaaatttttaggttattgttgttttattatttaggttttttttaagaaggggatttatgttttagtggattaggagaataagtaggatgtggtagaagaaggaaaagtaggagagtggggttttttgttttttaattttaatttggtattgttttttttagagaattagaaaattaatagtaggattagttatggtttgttttattgatattttttttttttgtatttagtaattttttttttgttttatcgatttttatagaatttttatttttgatttcgaggttgtttttatgaagagtaatatacgattgtaaagttaacggtataaatttgaagttgaggttttattttttatttttttttttttagagaagtaatttagagaattttaagttatggttttgtgttattggtatttatgtatttatatagaaaagtatttatagttatagtaatagtattttggttttggtattagaatatgtttgtatgaattagattataagatttagtttaggttattaggtaaagtgttatgagatttaatttttagtttaaagttttaaaaaggtgttttgtttattatttatatttattattgtttaataattataatatttaatttttagtttttaaaattaaatattattttttaaatattttattatttaagtatgtaaatatataaatgattaatatgtatagattatatgtaaaagaatttttaggagggttttattttagaaagttttattatttttttttttttttgagatagagttttttttttttgtcgaagttggagtgtagtggtgtgattttggtttattgtaatttttattatttgggtttaattgatttttttgttttagttttttaagtagttgggattataggtgtgtattattacgattggttaatttttgtatttttagtagagacgaggttttattatgttggttaggttggttttgagtttttgattttagatgatttatttatttcgattttttaaagtgttgagattataagtgtgagttatggtatttagttagttttattatttttaagaagttttgaagttaaatatattgagatttagttttagggttgttattttttatttttagttggttttatcgtaagtttattaagttttatttttttttttataaaatggtataatatatattgaaaggagtattgtgggaattaaattggataattttatcgtaatgtttattgtatagtgattatttaaatgttggttagttagttttattattaaatataggttgaaacggatcgtgggtaagattgtgtttaagattggttaaagtttgtgtgtatatagatttattttgttttatatagtgtttgaaaaagttgtgtgtgaattttttaaaaattaatttggggttttaatatttaatagaataatattatgaatttttattattattattattattattattattattatttttttttatttatttaatattaaaatgttttaggtttggttttgggttttaaagatatagatgtgatagaataaagtttttgtttttaaagaagagagggaagttaataatatataaataattatgtttggagagaatgtaggtaagaggaaggtgttatattaaataggatttttagggaaagagttttttgataaggtgatatttgaatatttgaatggagtaggagatttttgtgaatgtttggtggtagagtattttgggtagaggaagtagtaagtacgaaggttttgaagtgtgaggggtgtttagtttttttaaggagaggtaggtaggttagtgtggtagaataatgagagggaaaatggaaaaaggagataaagataggaaaggagattaataagatggcgatggtaataatttatgtaggagatggtagtggtttggatggaggggtagttatgaagatggtgaaaaatgttaatattttggatatattttgaaggtatggtaagtagtaggtttttagagaggaattagaaatgattttagtttttgataagagtaattataaataaggtatattatagaaggaattagtttggagtattggaaataaagaaattggttttgaattttttgatatttatagggagaaagtaagattattggatacgagagtgtgtgtttaggggagagatttaagttagagatataaatttagtagtttttagcgaatagatagtttatattataagatggaatttattagtttgatataggaggtgagtatataagggaaggttaagaattaattttggggaagtttaaggtttaggaaatgagggagtaatttgttattgaagttagaagaaaattagaaagtgtggggttttggaatttaagggaagagagtgtaagaaagtgtgattatattaagtattgttgttagagtaagttagtgagaattgattagtgatttgtttttggaaagattatgggtgattttgattagagttgttttggtagagaggtggggttgaaagttttaatggagaaattttaagaaagaatggaaagaaagttagaatagataatttttgaagagttttgttgtaaagaggtaagaagaaatggggtaatatttttagggaattgtggggtttttaggaagtttttttttttttttttaaagatgggagttattttaatatgtgagtatgttgataggaatgatttggtaaagaaagaggaattattaataatgtagaagagagaagggatgattgttagaggtggtaataagtagggaaggtaggatgtgaatttaataagtgaggattgtttttagataataatagggtatattaataattgaagtttagtagagtatttgggtatagatataggtatattagtagattaggtagggagaaaggttagatatttttttttggttgatttttatttttttattagtattgggatcggggagaaaggaaaggagttattaatggttgagaggagagaagaaagtataaaatatttatataaaaaagtaagataataggtagtatggaaggaacgttggatagtattattggtttttttgtagttggtgattatgaatttaaagtgagatttattagtattattttgtatttttttttagttttggatagttgtttgggtatagataaggggtaggtggagagtaaagtaagttattatttttaatttatgtttgttattgtaattgttgaataagtatatatattttttaattatatttattttaaaaggttaaaaagttttaaaaaaattatgttgaaatatgtttttattaaagtaagaatataagagaaaatgtgtttttataattttaaattaaagnaaatttataattgttagtgtgagtttatttttaatatgtattattaaatatgttttaatgggttgggtatggtggtttacgtttgtaattttagtattttgggaggttgaggtaagtagattatttgaggttggtagttcgatattagtttggttaatatggtgaaattttttttttattaaatatataaaaatgagtcgggtatggtggcgggtatttgtaattttagttatttgggaggttgaggtagaagaatcgtttgaattcgggaggtggaggttgtagtgagtagagatttgttattgtattttagtttgggtgatagagtaagatttagttttaaaaaaaaaaggttttaacgattttttattatggtgtataataagaaatattattggaaagattttaatgtaagatttttggtcgggcgcggtggtttacgtttgtaattttagtattttgggaggtcgaggcgcgtggattataaggttaggagatcgagattattttagttaatatagtgaaattttgtttttattaaaattataaaaaaattagttgggtgcgttggcgggcgtttgtagttcgagttattcgggaggttgatataggagaatggcgtgaattcgggaggcggagtttgtagtgagtttagatcgcgttattgtattttagtttgggcgatagagtaagatttcgttttaaaaaagaaaaaaaaaagatttttatatatataagtatatataaataaatgaaaaatatacgtaaaatatataaaatatatgttttttatatatatatatgaaaattaaagatatttaaatttttttttaggagtatgaagttattaatataatgagatagtgttattgtagaaatttttgaatttttaggagagttttagaatgaataaagtaattattgttatgaaatattaaattttatattttatttattgtttttgtgatttttgtagggtaattatatagttatagatgaaataggaggaagttaaagaattttaagttaagaaagggtaaagttttattatattttgaggtaagttgagggagaagtttttaaagtttagtcgttagagtttagttttatttggaaaattttaaatttttttgatttttttatattaaagttataggttatagttgaatttttagattttgaatagtagtttgttatttgtgttttgtaatatttttggttttttttgataattttatgattttttgtgaaattttttaaatagaatttattttaatttattataatttaaatattatatatgttataaattatttttagggagagaaaggaagaaggggttgtggtggaaaaaagagaataaggaatttttagaggtgggaaaaaaattttaggaataatatattaaaaagaaaatagtagaaattatttattaaaatgtaaaatatgtgtagtatgttttagttgtatgaagttgaataatttaggtaatttagtttaataattattgattgaatattaattatatttagggaaaggagagggtattgaaaagatttatttttttttgggttatattggaggagggtttttagtagaagagttggtttttgtaagttttggtttttatatttagggagttgttattgttttatgtagagttttgaggatgtagtgatatttttaagttaggtaaggtggtttaggtatttttttgggagttggggttaattttttaagtaaggttatatttagggagttaaaggggatttgtagtgattattgggtagttagtgttttttgtttgtttgtttttaaaattttagtttttaaatttcgcgcggagtgattatatttttattattttgagcgttgttgaatttttttaaattttttttagatcggttaagttattttgtatgatagaatagtttttgatgtttgtttttgtttgaaaaatttgaacgttgtaaaggacgacgtagggagagagtttattgagtatttttatttttttgggtgaaagttgtaaaatatttttttttcgtgtgatagtagattttatttttggaaatttatgatatatgttaaatgaagttataaattaaatattttttttaattattagggtgatgaaagaagtgtataaggaagatttaatattattttatcggggaggggcgtggaaagaagtattttttttttttttttttttatttggtagagatggtagattgggttttgtttttttttttttttatttaaattataggaatatggttttaattggaatcgtttattaaaattatttatttttaatagtaaaatcgatatttacggtgttttcgggtaaagcgttcgttatttcgtgagtttttgttataggtggacgtagagtaatagatattcggttatttttaggtttttgcgttcggagatagaagttacgcgggcgcgttcgaggttttgggttttttgtcgagagtttagcgtggcgtcgggttttattggttacgcgttcgttcggtgttattttggtttttcgttttttttttatttcggcgtttacgattcgggcgtaggttatatggttttcggattgttcggtttcgggttttcgtaaggcgcgtttatattacgtcgttagatttacgcggcgaggggttgggttttttcgggggttacgggtttcgaagttcgttttcgttttcgttttcggagtttatcgttttgagatttagaacgtcgtttttggttttttgtagtagcgatacgaatttggtagtgagtagttttaggtttttttcgtgtttgttgttgtcgttttcggcgttttcgagttgcggcggcgggggcggttgcggggtttgcgtttgcggaggttgcggcggcggtcgttggttttgtttttgttttgtcggcgtttgttggttcgagttcgcgggttttgtcgtcgttatcgcgtttcggtttcgcggtggtcgggttttcgcgtattttcgttcgtcggtttcgttcgcggttatttgtcgggtcggtttcgttgcggtcgttttttcgttcgtcgagagcggtagtgcgggtcgttggttgttgtaaataataggtgtgcggcgtttacgggagtttgggtcgtttgttacgtcgggttttcgttttttttttaagttcggggaagcgtgaatgaggtttacgatcgaggggggaggggtggaaacgaggagaaggggttgcgaggggtggggatttgagtttaaatggtaggaagtgacgtcgtcgttcgtcgttgtttagaaatatatttttttgtaggaaggaggagcgtacgaggaggaggaggggtgttggcgcgtgtgttttatattcgtttttttggcgttcgcgagttgattcgaggagtggtaattttacgcggtaaagtagggaggaagaaaaaaaggagataaaagaaaaaaagatttttatttgggtagaaagttataatgtttagcggttaaacgtttgtgagcggtgaagttggttgattgtttaagtttgtagagttttagtagtaggttattttttttggacggtttttgttatttttgtttttttcgagttttagtatcgtttgtaaatattttaatgatttggattaagtgtagagttttattttatagtttatttttttagattcggagtatagaaaaaggtatcgtggagttttagggttggtttttattaattttttttaaggtttttattttttatatggagaaacgtgtagagggagaggttgtgaattgttaaagatatgtcgttagattttagattttttgtgtttgattaaagtttttgattaaagtttttaatattttatttgaattaaattatattgtatttggaatattgggtagttataggtttttggattttagtgatattttaaattattgatggtaaatgatattatggagatttgagtaaaagaaagtcgttgggattttttttttattatattataaatttttgagaatttagattaaattttaaatgatttgttgttatatttaatattttgaatatagtagataataaagattaggcgaatgagattaggcgcggtggtttacgtttgtaattttagtattttgggaggtcgaggtaggtagattatttgagattaggagttcgagattaatttggttaatatggtaaaatttcgtttttattaaaaatataaaaattagcggggggtggtggtgttcgtttatagttttagttattttagagtttgaggtaggagaattttttaaatttaggaggtagacgttgtagtgttgtagtgagtcgagatgttattattgtattttagtttgggtaataaagtaagattttgttttaaataaaaaaaaaaaagattaggtgaatgaaaattttatatggtaataattaattaagaagattttatgtaagaaagattttgtttaattttaagtaataataaattaataaaaaaggttattgaagcgatattaaatataatagtattaattagtaaagttgaatatattatttataatatattataggtatagaattttataatttttattaataatttatttataataatttttattttaattaaatttataaataaaatttaaaattgaaaatttgaagtaaaatatgaaaaatttagttgatataattattttttaataatttatttaagaaaggttatttttatttgatttgatatgggatatattattgataagttttgtaaatttattttattgattattgttaagtagtattttttagaatatattgaattaggaagattttaatttgtttttaattttataatagaatattgtgttatatgtgtagggataggaattaataatattaaatgtattaatatttttaaaatttatatttttatggtgttttagtttgagaaagtattataaattgggtgatttaacggaaattaatttttttatagttttggaggttgtaagtcgacgattaggaggttgttatggttaggttgtggtgagggttttttttttggttgttagattgtggtttttttattgtgttaaatggtagagagagagagaaagatagatagaatagagatagtataagtttttagattttttataagggtattaattttatttgagggtttaatttttacgattttatttaaatttaattattttttaaaggttcgagggttagggttttaatatataaatgttggggagatatagtttattttatggtatgtaattatattttatagtagttattttggtaatttttaaaaataatattttttaaattttagttttaaaaggttttttataaagtaattatattattagtgattttaaaaggttaattaataatttattttgtattgttatttgtgttttttataatgaattttttatttttttagattgtttggggtttaattagaaattatttataaattagtagttattttaattagtatttaaaattttatgtttgtttgaagagttaaaaatcgtttatattagtggtttttagattttaggggaaaaaattatttataatgtttgttaaaaatttagatgtttggatttaaattttagggattaaattagtatttgatatgagaatatgatttgtgagtttatattttttatagtttagataatttttatgtataatatagttattttttgagaaacgttaaatagtataatgaaaaataatgtaatatatattttttttaaaaatcgataaaaaatagagattgataatgtaaaagttttttaaatattgttaaatgtttttaaaaattttattttttaaaaaaattaagaaatatgattttttaaaagttatgatataaataatgtttaagaatatgatattgattagttttgtaatttaatttttatttttgtatttttttgattataaaggagataatttttaaaaggttgtaaatttttatattagttttttgtgttatttttgataaaggtttaaaaattatttttaataaaagttaaagttggttgagtgtttacgtttggttgggtatttacgtttgtttgtaattttagtattttggagggttgagagaagaggattgtttgaatttaggaatttaggattagtttggataatatggtaaaattttatttttataaaaattataaaaattagttgggcgtggtagtgtatatttgtagttttagttattagagaggttgaggtgagaggattatttgagtttaagaggttaaggatgtagtgatttgttattttgttattgtaatttagtttgagtgatagagtgagaatttattttaaaaaaaaaaaaaaaaaaaaaaatttaattgaattaaattatattttattgatttataagggtaataaatgtataatagtaattttttattaaatttaatttacgttgattagttgggtagatattatttttaattataatattgtttatatgtttttggttaaattttttttttttaaatgtattttggaagtgtagttttttagttagtttaggattaagaaggaaggtttaaatattttaaaatagaatgattttttagtttatagtttattaaatttatagtatttaatatttgtggaattttataaatgttatttttatagagatttaggattaatttaaaatatgtatagttttgttataatttggtagttaaatatttaagaaaatttaataaaattttatttgtttattgatgatgatagattgattttttttttttttttttgaaatggaattttgtttttgttgttttattttggaatgtaatgggtttattttaatgagaattaaaataaaaattgaaagaatttgtttttaattgagttatatggtattttatgttgatttattttatgatgaggtttggattaattattatttaattttaaatattgttaaagataatttatatttttagatgttaatgtagaatgttttattttaatttataattaagaggaattttttataagttagtaataggataattgtgtaatagaattttatagagatattatttaatttaatgtttatggtagttttagtgttttttttgttatattggaaatagatttataaagttaatgaatgattaaggtggaatttagtattaattgtatatttataaatatatttgtggtaaaatatttttaaatggatttatatgattttaaatgattttaaataaatttggtatatagttaaaagtttttaagttatataattgtattgaagaagtaatttaaataataatggtttataggaagttttatattaagtgtataaaatggtttgaaaaaatagaaagattttaatttttatttattattgaaaaataataaatagtaataaaaaattgtatatatgtttaaagttttgggattgtgattaatattttatagaatgaggtttaaaaaatgaaatagtatttaaagtagataaaatgttataagagatagaaaaatgagagattatttaaggtgggagtaaataggaaatagtttttggaggtggttattatgtgtttttaatgggtttgtaagggttattaaattaataaggaaattaaatataaaagaataaataatttattttaaagacgtaaagcgttttttttaggagtcgtatgttttaatttttagttattattttattataaggaaatttttttttaaaaaatttgtatgggtcgttttgttattttaaattaattgttattgtatttgatatttttgaaatgtataagttttaaatttttaaaaaaaaatttttaaataaattttgtataaatttttaaaaaag

SEQ ID NO: 103 - DNA, 6412 bp, Artificial Sequence
  chemically treated genomic DNA (Homo sapiens)
ttttttataatattgttttgttaaattcgaagcgtttgaatattgtttgtatttttttgtttttatgtttttaggtttttgttgttttttttttgttatacgtttatttttttttatatttggtaaaatatttatattttaaagggtatttaaagtcgtttaaaagttattgtttttgtgatattgggcgaattataataaaattattttatataatgttgatttgtataaatttaaattatatgaatgtttttttgaagagataaagttatattatttaacggtaagtgtatagttaataatatagttttttaaattttgtttaagtatagtaggtttttaacgttgtttggttgaacgttatttcgttataatggtgatgagaaaaaaaatcgattttaggttatggttattgtttgtgagtagtttgtatattttttttatgtttgcgtgggtttttttcgggtattttggtttttttttataatttatagttgtgttcgttaggttgtgtttaagttgtgtatatatttaaatatttttagtatgcgtgagtgtgggtgtgagtgtgagtgtattttaggatagaagggtgttttgtttagggttatttttttttttgagttttgaatttcggttatttgtaattttgaaatggaaaaattggttatatgattttatttgtttttattaattttttttaaatgtatgtttagtttatatttattttaatgtttaatattagaagtgttttggtttttatttggaagtttggtgatgtttttgtgatcggagatatgtataggaatttaatttttgtttgtattaagtagtttatggtgaaattgttttttttatatatgttatttcgtttaaagttataatttttaagaatatatttttgatattaaggatttattgtatttattattttgttgattagtaatttttatattaataattatttaggtatataattttagagttatttgatttaggtttatgaattgttttatatagatatttgagttatgttatgaatagtcgcgaattttaatattttattttaattttatgaattattttatggaagaggataatgtatatttttttttttgtttaatatgggattatttaaattttaaatagtagagatatttaaatataaggatatttatatttttgtgatataattgaatttttttatttggttattgtatgtgttttaaacgggaaatgagtggatattatttttttttttttattttttttttagttttgatgttataggaagttagtttgttagttttttgttatttgatagttttttgattaaaaagattttttagtgaggattagtattttattttagataggagtcgtgaattttttttttaaagatatatatattttttaaaagggtttagaatattttttgtaaaattgtttttgttatatgagtatttattagagttattataagaaaagttaaggaaataaatttattttttttgtaatagaaaaaatatatattttaaaatgggttaagaatttgaatattagtaagattatagattagggaaaaaagtaaataatattttaattgaaaatttgatttgaaaaataaaagtttatttattggtttttttatttttttttttattttttttttattgttggaattttgtgaaatatatagatgatggaggagtatttgtgtcgatattttgaattttaatttttaataattaggtagatggttggtttgtggtaaagtttattattgtatagattgtaatttgtatttagttataaaatataagttatttttttaggacgattttaggatttttttagataggaaatattattgtaattgaaaaacgatttaatttttagttaagagtttataatatttaggtattttcgtgtttttatgaattgtttttttttttttcgagtttttattggttatagttttagattttttattaaatttaattcggtttgagcggtaggtaatgtttttgttgggtgcggattgtaggtttattattggagggcgtttggacgtttttaaatagttttgaagcgtttggaaatttcgtttgaggattggaaagcgtaggagggtgaacgtgagatttgattttattgggttaataagtaaaaaggagtgtaggtaggtgtgggagtaaaagtaaattgtttttttttttttggggatttgttttttttattaaggtagaaaattttttagggaatatgagaaaaaatatcgttgttttcgagttcgcggattttttaagggcgggtttcgggggtttgtggtttcgtagagtaggcgtcgggtttattttttgggcgttggacgatagtggggacgcgtttcgaggcgttgggatagtttcgttgttaggagatcgttttttagtggcggttgaagattaggtttgtaatttgtttttgaagtttaggatcgaggggttttttttaataataaaggaattgtttttttttttatagttttcgttttcggtttttattttttttcgtatcgggttcgataaaggcgtttattttttggggagtgggtagtaaattatttttaaggttgaaatggaagaggtgtgaggttatttttgaagggttcgtttgtcgtatttattttttttttgtggaaggttcgcgttgaattgtaattattttaaattgtgatttgtttgatttttaaaaacgtgtttttagagtattattttaaagaaaatttgttttttgtttaagaatttttaaattttaagtgggaagaggagggttgaaaggtataggaggggtgtttagatttttagataatttagcgttaggtagcgtgcggcgtggagagcgggtggaatggataggaacgcgtattttttgaggtttcgttttagtttattcgttatttgcggggtattagagatagatgtcggttttttagttaaagggtgggtataggtttttttaaaatcgaaagattttatttttaggtaaaaagatgttaaattattttttagtttagacggaatttagtatttaaagggttatacgtggttgtcgggtttcggcgtaggagagggcgtttcggtatttttagtaatttaattagttaggtttttagaaggtggggcgggggagggggtaggaggcgtggggaagggagattaggaaaacgtttttttttcgtggagtaaattaattcggttggagtaaagagagaggaaaaatttttaatttgtaagtaaatagtaggtcgttttttgattggttgttttagttatttttttatcgcgtttttattttttttaagtaaattgtttggaaggaggaaaaaaaaaaaaaaaaaaaaaaagatagtttatatgattcgggtcgtagcggtagtagcgttggttgggcgcgggttggcggtatttttttttgtttcgttcggagtttatattcgcgttcgcgtcgttcgttcgtttcgcgtttcgcgtaatacgttcgggcggagttttattttttcgtttacgtttacgtttacgcgtgcggtttcgcgttttgttgaggttgttgttattgggtcgtcgtcgttgtcggttttttacgtaagttattaacgagggggcgtgttcgaggagatttttttttttataaagtattttttttttcgtttttttttttttttttttttttgtaaaattgatttttataaaattttttttattttttgttagtcgttttaattttttttgggttgttcgtgttgttgttgttgtatttaagtttatttattttttcgtttgggtaggggttttaggattcggtttgtggtttttatttttgttgttgttgtgtttaaggagggaaagaggagtagttgcgggaggatcgggaaggttttttgatgtagttatcggggaggtgttattcgttcgtgcgtttttttttttttttttttttttattttaaattgattgatgtatttttataagttgttaggtttggattcgttggagtcgtagggatatttttgagagtttatttcgggtttttggtatcgcgtgtgggggtttagtttttttttcggaaggcgatcggagattgatatcggtttatttaggagttggagggatttatttgaaagtgattgttttttttttcgttttttagtcgaatagttgggttggcgtcgttttgtaggtttaggaattttagttttgttaggtcggttggttttaatttttgttttttatttattgtggtgtatttatatttagttaaggaaagtacgcgcgagaaattttcgaggttcggttagttttcggggtgttttttttcgttatcgtcgcgtttcgattttgttgggggatttgtcggaagacgcgaagagttaaatttttttttgaggttttcgaggtaagatcgtttcgaaagtcggcgtagttgtcgtttaattagttttaggatatcgataaggttgggttgcggtttcggatttttatttttttcggcgtatcgttcggtatcgtagtatttacgatttttttgagatttttgggggtcgtttcgttaaggtatagaggaggttgaggaaaggggtttttagattttcgggattataagcgcgaagttttttattagtacgtcgttttttttttgtagttttttatcggtcgttaaagtaatttggagcgaagcgtggcgtagtgcgagggtttcgggcggtggcggagtcgtgcgtagtttgttgcgtcgacgttgagtcgggtttcggcgggtcggtgtatgttttttcgcggttgcggcgcgtaattttcggtgattgtgtagcgcgcgtcgtcgtttgtttcgattcgcgttgtagtcgttcggttcggcgcgtatttttttttttcggggtgatcggtttgtcgtcgtcgttcgagatatagtttggtattttttttttcgttttcgtcgtcgttattatatatacgtacgtttttttttattttgtgatttttttttttttttgaattttttagtgggggtgcgagtttgtttttattattttttattttatcgttttttttttttttcgtttttttatttttttttagtttggtgggcgttttttttttttttcgtttttttttatttttatttatttatatttatttggcgttcgttttttttttgtttttttgtttgttttttttttttcggattttcgtttttttttcggagtggcgcgtcgggggtttcgtcgttggttaggcgtgatgttgtacgtggagatgttgacgttggtgtttttggtgttttggatgtgtgtgtttagttaggattcgggttttaaggtcgtcgtcgatcgttacgttgtttattggaatagtagtaattttaggtaagtcgataataggcggagagttagggttattcgggtttcggggttttgcggaaggagcggcggcggggatcggcgcgtattaatcgttggcggcgcgtattttcggagtttgcgtcgttcgggcgttgatggtttgaggcgtcggcgggaagcgttcgcgtcgcgtttttttttgttaagtcgtcgcggaaaggttaggtatttttgggagttttcggggttgtttagattaattgtttttgcggggcgtcgggagattcggaaaagggcgggagtcggggagtagggatttttttgttttttagtttcggtatttggttggtattcggttttcggcgcggggagtttttagtgtgcgtagtcgggagtttttttttggagcgtgggttcgtagggattgcggagagaattcgttaaatattttttaaagtttttttttttttttttttttaattttaattttttttttttttttttcggtgcgcgtagagagagcgtacgggttgggggaagtgaggggggttgggaagcggaagttttaggtttttatttttttttttaattgcgaggaaattattcggtttttgagttagtttgggttcggcgcgtttggtagtggagaggatttttttattttttttatttttttatttattttagtgggtttaaggtgttagaaagtttgatttaatgtcgggttacgttatgtgtgtagaataagttgttagagttggtcgagttaggaggtgggagtttttcgttcgcggtttggcgatgtgttgtcggaggaacgcgcgcgattatttggaatcgatttgtaggcgtttcgaagttcgtcgggtatgcgggagattagaggtgggcgtcgggggcggttttagtgcgcgtgttggatatcggttagtcgtagacgtttcgtgttttcggattttggaagtggagtggggaggttatttagagtgttcggcggggtttttcgggtttggagtagtttcgaatttt

SEQ ID NO: 104 - DNA, 6412 bp, Artificial Sequence
  chemically treated genomic DNA (Homo sapiens)
aaggttcggaattgttttagattcggaggatttcgtcgggtattttggataatttttttattttatttttagggttcgaaaatacgggacgtttgcgattggtcggtgtttagtacgcgtattaggatcgttttcggcgtttatttttagtttttcgtatattcggcgggtttcgggacgtttataaatcggttttaggtaatcgcgcgcgttttttcggtagtatatcgttaggtcgcgggcgaagggtttttattttttggttcggttaattttggtagtttgttttgtatatatgacgtaattcggtattagattaaattttttggtattttgaatttattggggtgggtggagggatggagaagatgggagaattttttttattgttaggcgcgtcgggtttagattgatttaggggtcgaatgattttttcgtagttgaagaggaaaataaaaatttaaagttttcgttttttagttttttttattttttttagttcgtgcgttttttttgcgcgtatcgggaaaagagaagggaaaattaaaattaaaaaaaaaaaaaaaaaaaaattttgggggatgtttggcgggtttttttcgtagtttttgcggatttacgttttaggaaggagttttcggttgcgtatattgggggtttttcgcgtcgggaatcggatgttagttagatgtcggggttgggaagtagagaagtttttatttttcggttttcgttttttttcgagtttttcggcgtttcgtagaagtagttggtttaggtagtttcggggatttttaggggtatttggttttttcgcggcggtttaataaagaggggcgcgacgcgagcgtttttcgtcgacgttttaagttattagcgttcgggcgacgtaggtttcgagggtgcgcgtcgttagcggttggtgcgcgtcgattttcgtcgtcgtttttttcgtagggtttcgaggttcgggtagttttggtttttcgtttgttatcggtttatttggggttgttgttgttttagtagatagcgtagcggtcggcgacggttttggagttcgggttttggttgaatatatatatttagagtattagaaatattagcgttaatatttttacgtgtaatattacgtttggttagcggcggagttttcgacgcgttatttcggggagagagcggggattcggagggagggaggtaggtaaagggatagagagagagcgggcgttaaataaatatgaataaataaaaatgaaagggggcgagaaaggaaagaggcgtttattaagttggggaggggtaggagagcgagaagaaaagaaggcggtgggatggggggtgataaagataaattcgtatttttattggagggtttaggaggaaaaaggaattataagatggagagaagcgtgcgtgtgtgtggtggcggcggcgagggcgggggaagaggtgttaagttgtgtttcgggcggcggcggtaggtcggttatttcgggagagggaggtgcgcgtcgggtcgggcggttgtagcgcgggtcggggtaggcggcggcgcgcgttgtatagttatcgggagttgcgcgtcgtagtcgcggggagatatatatcggttcgtcggggttcggtttagcgtcggcgtagtaggttacgtacggtttcgttatcgttcggggttttcgtattgcgttacgtttcgttttaagttattttggcggtcggtgggaaattgtaggagaagggcgacgtgttgatagagggtttcgcgtttgtggtttcgggagtttgagaatttttttttttagttttttttgtgttttagcggggcgatttttagaaattttagaggagtcgtaagtgttgcggtatcgggcggtgcgtcgagaagggtggggattcggagtcgtaatttagttttgtcggtgttttggaattggttaagcggtagttgcgtcggttttcgaagcggttttgtttcgaaaattttaaagaaaagtttggtttttcgcgtttttcggtaggttttttagtagagtcggaacgcggcggtagcggaagagggtatttcgggggttggtcgagtttcggggatttttcgcgcgtgttttttttggttgggtgtgggtgtattatagtgaatgaagagtagaggttaagattagtcggtttggtagagttgggatttttaaatttgtaagacgacgttaatttaattgttcggttggagagcgggaggggaaataattatttttaaatggatttttttaatttttggatgggtcgatgttagttttcgatcgtttttcgagagggagattgagtttttatacgcggtgttaagagttcggggtgagtttttagaagtgtttttgcgattttagcgggtttaagtttagtaatttgtagagatgtattaattagtttgaaatgggaaaagaggaaaaaaaaaaagcgtacgagcgagtggtattttttcgatgattatattagaaaattttttcgattttttcgtagttgtttttttttttttttttaggtatagtagtaatagaggtgaaaattataaatcgaattttaaaatttttatttaggcgggaaaataaataaatttgagtgtagtagtagtagtacgagtagtttaggaggaattgaaacgattggtaagaagtggaaagggttttgtaaaagttagttttgtaaaagagggggaaaaaaagagagcgagagaaaaaatgttttatgggaaaaaaaattttttcgggtacgttttttcgttaatgatttgcgtggaaagtcgatagcggcggcgatttagtggtagtagttttagtagagcgcgaggtcgtacgcgtgaacgtggacgtgggcggggggatggggtttcgttcgggcgtgttgcgcgggacgcgggacgggcgggcggcgcgagcgcgggtgtgagtttcggacgaagtagggggaggtgtcgttagttcgcgtttagttagcgttgttgtcgttgcggttcgggttatgtggattgttttttttttttttttttttttttttttttttttaagtagtttatttgggaagggtgggagcgcggtggggggatagttggagtaattagttagggaacggtttattgtttgtttatagattgggggttttttttttttttttattttaatcggattggtttgttttacgagaaagaggcgtttttttaattttttttttttacgttttttattttttttttcgttttattttttagaaatttgattaattgaattattgggagtgtcgaggcgtttttttttgcgtcggagttcggtagttacgtgtaattttttgggtgttgaatttcgtttgggttaaggaatgatttgatatttttttatttgggagtagggtttttcgattttaaaggaatttgtgtttattttttggttggagagtcggtatttgtttttggtgtttcgtaggtgacggatgggttggaacggagttttagggagtgcgcgtttttgtttattttattcgttttttacgtcgtacgttgtttggcgttgggttatttggaagtttgagtattttttttgtgttttttagtttttttttttttatttgggatttaaagatttttgggtaggaagtaagttttttttaaagtgatgttttgaaaatacgtttttaaaaattaggtaaattatagtttaaagtgattataatttagcgcgaattttttatagagaggaaatgaatgcggtagacgagttttttagaaataattttatattttttttattttaattttgagggtgatttgttgtttattttttaaagaataaacgtttttatcgaattcggtgcggaaagaaatgagggtcgggggcgggggttgtgggaagaaaagtagtttttttattgttggaaaaggtttttcggttttggattttaagggtaggttgtaagtttggtttttagtcgttattgaagagcgattttttggtagcgagattgttttagcgtttcgggacgcgtttttattgtcgtttagcgtttaggaagtgagttcgacgtttgttttgcggggttataggttttcgagattcgtttttaaggggttcgcgggttcgggagtagcggtatttttttttatgttttttagggagttttttgttttagtgggaagggtagatttttaggagaaaaaaggtagtttatttttgtttttatatttgtttgtatttttttttatttattagtttaataaaattaaattttacgtttatttttttgcgttttttagtttttagacgggatttttaggcgttttagagttgtttagaagcgtttagacgttttttagtggtgggtttgtaattcgtatttagtaggggtattgtttgtcgtttaggtcgggttgaatttgatgggaaatttagggttatgattaataaagattcgagaggaaaagaaatagtttataggggtacggaggtatttggatgttatgggtttttggttaaaagttaagtcgttttttaattatagtaatattttttatttgaaaagattttgaaatcgttttaggaaagtaatttatattttgtgattagatataaattgtaatttgtataataatggattttattataaattaattatttgtttaattattaaaaattgaaatttagaatgtcgatataaatgtttttttattatttgtatgttttataaagttttagtagtgagaaagaagtggggaaagaagtgagagaattaatggataagtttttattttttaaattaaatttttagttaaaatgttatttgtttttttttttggtttgtaattttgttgatgtttaagtttttggtttattttagggtgtgtgttttttttgttgtaggaaagatggatttgtttttttagttttttttatagtggttttaataggtgtttatatgatagagatagttttgtaggaaatattttggatttttttaagagatatgtgtatttttaaaaagaaaatttacgatttttgtttagggtaaaatgttgatttttattgaagagtttttttagttagggaattattaggtaatagggagttagtaagttggttttttgtggtattaaagttgaaaaaaaggtgaagaaaaagaaatggtatttatttatttttcgtttgaaatatatataataattaaatgggaaaatttaattatattataaaaatatggatgtttttatatttaaatatttttattatttaaagtttgaatagttttatattaaatagaaaaaaaagtatatattgtttttttttataaagtgatttataagattggaataagatgttgaaattcgcggttgtttataatataatttaaatgtttatgtgaaataatttataaatttaaattaaatgattttgggattatgtgtttaagtaattattggtatggaagttattagttagtaggatgatagatatagtaagtttttaatgttagggatatgtttttggaaattgtgattttaagcgaagtggtatatataaggaaaataattttattataggttatttgatataaataagagttaaatttttatgtatattttcggttataaaaatattattaaatttttagataaagattaaaatatttttaatgttaaatattgaaataaatgtgagttagatatatatttgagaaagattaataaaaataagtaagattatgtaattaatttttttattttaggattgtaggtggtcggagtttagggtttaaggaggaaagtaattttggataggatatttttttattttggggtgtatttatatttatatttatatttacgtatattgagaatatttagatatgtgtatagtttagatataatttagcgagtatagttgtgggttgtaggaggaaattagagtattcggagaaaatttacgtagatatgaggagaatgtgtaaattatttatagatagtggttatggtttggaatcgatttttttttttattattattatgacgaagtgacgtttaattaaatagcgttgaggatttgttgtatttgaatagagtttgaagagttatattattaattgtatatttatcgttagataatgtgattttgtttttttaggaaagtatttatgtgatttaaatttatataaattaatattatataaaataattttattataattcgtttagtgttatagaagtaatgatttttaaacgattttaaatgttttttagaatgtaagtattttgttaggtataggaggaggtgaacgtataataaaaagagaatagtaagaatttaaaaatatggggataaaaaaatgtagatagtgtttaaacgtttcgagtttgataagataatgttgtagggag

SEQ ID NO: 105 - DNA, 14542 bp, Artificial Sequence
  chemically treated genomic DNA (Homo sapiens)
ataggtttatttttatttaggttgttttttgttgggttggagagtagaggataggggtattattggaggaaattgagtttagattagtgaaatttagtagggtaggggtttttgaagatgaggtttttgagggtttagggttttagttgttttttagaggtttgtttatttgttatgtatattaagttatgttttggtttttagatgttttattttaggtttttatagggataggggggtaggttatttgtttgtatggagtttgaggttttgggatagatgtttaggagtttagggtaggggtaaggggtatgaggaggagataaagagagaaggagggagggggattagatttatttgagggagagaggggttttttttatttttagtgttattttgttattaatttgatataggttagtatttggtaaattaagatgattttagtgtaaatatttataaattaggtatgtagttggggtagggatagggaagggttggggagagagtttggttgaatttttggtttttgggacgattttttttttttttagttatcgggaattttcgtgggtgtagtgaaaatagatttttagattttattcgtttgaggttagattttatttagttttggggtatgatgtagttacgtggggaaaggaggaagagtgggaagttttaggttttattttaggtttgtttagagattgatttatagatagggtgaattggaaaaaagtaaagtatttattgaagagaaagggtaatttaagattagtatagattttagttggttttagttaggaggtaagtgtgggtagagggaaggatagtagagaagggggtggtgggaataagttggttgagtaaaagagtattttgtagattgaggttggtggagtagaggatgtagttagattgagtttggagttttagtttttttatttttaaaataggtttattaatattaattttagggatgttgtgaagattaaataaatataatagagtattaggtgaaagtatttagttatattgtttggtatatagtaggtgtttaataaatggtagttttttttttttttgtagggaataggtgttagtgtatgtgagatgtgtaggtataggtagtaggttttttaggaggaaaataggaggtatggggtaggttagagatgattgtagataagagagagggttgttagttttattgggttgttttagttggtaatgttttggattttaagttaggatttttgttttttgattttttagtttgtttttttaattgttagttttggttgggtttgttggtttttttaggtttatattttggtatatatttttttttatagttttggtatattagtgtggtttagtttatattttgatttttttattttttggttgggtggttttaggtgagttattttatttttttgtgttttagagtgtaaggtaggtagggagaagttaaggataagggttatagaaatagaaaggtgtgtgtatgtttatatatatgtgtagatgatagtgaatatgagaaattttgggggttagattttaaattttacgaggatagtattcggttttgttattttttgttgaataaatggataggtgagaaagaatgagagtttgtgtgtatatatgtataagtgtgtgagaatatgagaggagataaaaaatgtgtatgtgttatataaagtatgtgtgaataggtgagaacgtgtgtgattggggatgagagtgtttttgtgggaggttttgtagaagagtaagagtttttatttagtaagtattatagtgggttaggtatgatattaagttttttatatgtattgttttatttattcgttattacggttttgtgaatgagggacgatttttaggttatagataagtaattgaggtatatagaggtgaattgatttgtttaaggagatatagtttataagtagggaattttgtggttttgaagtttatatttttttgttgtttatgggtgtgggaagttgagtttagaaggagtagttttgtttttttagggttgtacgatgttcgaggttttttgtagttgttagatgtttttttgtatttttgggtttaggattttttatatataggtattagtgtttggtgttttttgtgggtagggtttgttggagttgttttttgtgttaatagggatggtttcgtttagaggttagtatagaggtattgtttaggaaatgttggtggatttgaaatttgatagttgtgtgtgtgtgtgtgtgtgtgagtacgtgcgtggatgtgtttgtaatgatatagtaatttgggagaaatgggtggggagtgattgttaatggtatagggagggtttggatgagagggtttttattgtttatagattttgatttttttttaggtttttttgggagtaatttttttttatttcgggggtttgaattattatatttgaggtttcgttagggtgggttaggaggtgggaatttggaattattggtttagttatggtagggagtaggtttagttttgtttttgaggtttttgtagttggtgtgggtaggttgaggtagaaaggttgtgttgtgagtagggataagtagtatgtggagtaggtttggatataaagagttttttttttattttttttgttattttgtttatcgggattaggtgttggtatatttaggaattgtttgtttttttatgttttttaagattggtcgtatagttttatttttttattttttatttggttttgggttttttttttgtggggtatcgggtatgttggttgtggggaggaagaattaaggttggttttagggttggtagtggtggttttagatgagaagaattttgggttatggttaggaatatagatgaattttttaggtttggtaattttttgaaggatagtgagggaagagttttggttagttttaggttgttgttgtttatgtacgatttagttttaattaggaatgaattaaagaagtaaagaagtaaggattggttgggaatttgagttagtatggtataggggaatggttataggttttggagatagatgttttaggagttaaattttgtttttattattgattagtttggtgattttagatgagttatttttttttgagttttatttttttttgtaggtaaaatggggatattgaaatttattttaaaaggttatgaaaggaaaagtatttaatttggtttttgataatagtaggtatttagtaagtagtaggttgttttttgtatttaggttttgatgttttagtatgtattttagggattttagttttttagttagattattggtgtgtttttatattttatttattttatttttttttttttatattttaatgtagggtttagttgagagtttagagattttaaatagttttttttttttttatttatttagagttattttatttttaagggttgtttttggaagtgggaagggtttagattttttttatttttttttttatttgggagaaaataaaaagataaaatttgggttatttttatttttatagttataaagattattagaggatttattgagaaacgtagtagtttagttatttattaagcgagatgatggatatgaaattgtgtgaatggtggagtattttgggaatgttgtttatttaattatttttataaagaaaaagtggggagattttgtatttttggtagtttttaagtttattttaaatttagatatttttttagttttttttttttttttttatatagggtgacggtttttgttaaggttacgtttgttttaggttttgtgttatggtaagtttcgggtttattttaggcgttcgtagtgttatggaagtttagtagggggagatattagtacgtgggtacgttttttggggttcgattagcgagagtgggtcggatttggaaggtttgagttatgggatcgagttaagttataagtaaagaggtaaggcggggcgggaagaatgggttagggttgggagataaagatttagatggcgaggtcgggataggttggagttcggttttttcggtttaggatgttcgtttttgtttttttaaaagttttatgttttgtgtttttttttttttgttttcgaggtgtttttttttatcgacgtgtttttttattttcgtttgtttatttcgggattttgttcgcgttttcggataggataagattaaattttggttttagaggttttataaggtttttttagaaagttgagatttcgaaggtttggtttttaggggcgatgaatacgttttttttttttattatattttattttgtttttcgttttatttttaattttaattaagtattggatttttattagttttttttttttattgtttttatttttatgtttttgatttcgggtttaagtgtaagtagatagtgtattttgagggcgagaggaggaaagtttattaaagttttacgtgggattggacgaggagtagataggttgtttttgatacggaggtgggtatagagtaggattttaggggttttgtgtgtaaaaagaaaatggaaatatttttttggggtatttgggatagggttagtgggttggggtgttgattagacgcgtggagaggagagtaggtcggtagtttttgagagtgttaattttttacgggttgagttttttgggaataggattgagagggatttaattttaatcgtacgagtcgtatatttagattggtgttatcgggcgcgcggcgtttttaagagttttttgaaatttcgttttttttttgttttgggggcgtggtatggggtaaggatttcgttattgagtttgttattggttaagagagtagggttggttttgcgttcgtttgagtaagggagtagatagtatagcggtagcggagggagtttatgcgagttggatagtagtgggaggtttgtgaggttcgtattggtcgtagattttcgggttcgatcgttcgggagttaggattcggcgacgcgaggttgtcgggttattcggtcgaggtttcgggggcgtaaattaatgggattggttcgttcggtagtattttttcgtttttttaagtatattgagtagggttcgcgttgaagtagaagttgttcgggggcgcgtagttcggagttttagtgtggttcggaggaacggagttcgtgttagggcggtttagtcgggagttcggggatcgagtttgtgttgtggggaaatttttattttttttaagggatagcgatttcgggacggtcgaggcgtcggggcggttatcgagatttttgcgggaagatttcgtcggggagagggcgcgtagtttcgaagcgtttcgggaagtcgagcggaatcgggcgggattattcgggggcgtagagttttcgtcgcgtttcgtgcggtagcggagagtttaggagaacgagttttcgggggtcgaagtttatgttcgggttgggggcggttgtttagtgagtttttttggtcggtcgggcggagaagagcgatatcgaagtcggcgggaggggagtattttaaggtcggcggttgcggaggatgggcgtttgagcggtttcgagcgtagcgcggtagaggaaggcgaggcgagttttggtgaggaggcgttaagggatttcgaagtgtagtttgttttcgggaagatggttcggtttgggtagcgttggttcggtaagtggtttgtggcgatggtcgtgtgggcgttgtgtcggttcgttatatcgttggttaagaatttggagttcgtattttggagtttttttaattttaagtgagtaatttattttttttggacgttggggtgggaggtatttttttagggtgaggtcgtacgtttcggagtgtatgtggggaggttttcggaggaggagcggcgttttattttgttttcggttttttcgagtgtttttttgcgggcgggcggatggagtagggtgcggcggggtggggtaggggtatttggttgggttgtgatttttcgggttttttattttttgtttttgtacgttttggatgaagtcgaggtggtcgtataggcggagttggggagttcgggcgttcgagagcgtatcggagaattgagtggaggcgagaacgtagtttttttcggggtttttgggaacgtggtgattttcgtcgagagtcgttttaggagcgagtttgattcgggcgagggacgaggttagaatacgggtttttcgtttgcgtagttgtggagggaatatagagcgggattcggcgtttggggtgggtggtagcgttaatatttttattcgggttttttttatttttattttttttttttttttgtttttttttttggttttttgttttgttgtttttttttgtttttcgttttttttttttttttgtcggagcggtagaaaggcgggcgttgtttttaggtttataaaggtagcgggtggagaggggcggagtgggagagtggtcgttgggtagtgggggttcgaattagtgttcgttaggggtttaatggagtcggtaatagagttttaagggttcgttagggcggagagtggcggtcgagttgttgagggaggtgggtggagaaggagcgatttttgtttaggtaggtttttttggttttcgagtttgttttttagattgggaagttgtgtttagttttttttaaggggttggggcggggagtgggtagttatataaaggatatttttttttttttttttttttttttttttgtataattattttattattattatatatataatttttttaaataatacgtatattttttagggcggtggtttagtggtttttgggtttttagtgggaagtcgttggggttgttgtagtgatttttggatttttttttttggtatttaggatttaggttggaattaagggttaaaattgtttttttttttaattttttggaggttttagtaatgtgcgaataattttatttagtaggaaattggggagttttgatttgttttattcgtgattattgatttttgtattttaaatttttttttgtttatttttgttgttttacgtcgttttttttttagtttcgttttgtttcgggtaattttttaggtttttgtttattttggttttttgggttttagggacgtttgattttttagttttggagtaggagaaggtagttttagttttttttttttcgattaaggtagagttttattattggttggtgggatggttaaattagggttggggtggagggttttttttgggtataaggaaagggattggtaagaattttttttttatttagaagttaaacggggtataatatttttttaatagtaggggtttaaaatgttttgggagttttgggttgtttgagtttaggggggaacgttgtgaagtgtttagtggttgtgaagtgtttagtggttgtgaagtgtttagttattttggtaagggtggaggttggaaatgttttgttttgagttaggagagttgaaattcgtttggggtagtttattataggggtttatgggagtgatttaattgttttttcgggtttttaattagagatagtatgtagttttatagttggaaaggagtttttttgtagagttgggggtgttggaagaaatacgatttgtttgtgtttttttttttttgtgtttagagattttagtgttttggattggtttataggttttggggggtggtattttttttgatttttttttttatttattttaagttgagggtaggtattgtggggtgaggatggggggtggttgaagattttttagaaattgttcgaattttattttgtaattgggtagattttgggaaggattagagattgattttggtgtattttttttttatttaggtttaggggtttggaatgtagttattgtttatatgtgttggttcggggtggtgggggtaaatggataggaaggaggtattgtttttagttttttttgagttttgggggttgtttttgttatcgcgtttaatttttaggttgttatagttttttaaataaatagtttttttttgtttttttttttttttgttttttgttcgagttttttttttaggttcgtgttagttcgtttttttatatttttcgcgagtagcgtttattttttttttttagttaggttcgtttgttttgttttgtttttatatttttttttatttttagttattttttgttttttttttttaagtttttttgtttttcgtatatgttcgtgtttttttttttaggtttatttttttttttttttttttttttttttttttggtttttggtttttttttttagttttgttagaagttggtaattttttttttaaaaaagaaaattttttagtgtttataaattttgtttaattgttttttttttgggaaaaaaaaaattaaaataaaagaagtggtggggttgggggttcgtttttaggttttaaggtgcgtgcggttcggttttagttttgattgagaggggaagcgggaatggttggtttaagatttttaagttttttttttaaattggtgttggggttttttgggatgttagtttttgagtggtaggagtttttgtttttttggttttttttgttagatttgttttatgagcgtaaggtggggggatgggtttggttttgttagagttttttttaggaatttttgtgtgtgcgtgtgtgtgtgtgtgtgtgtgtgtgtgtgtttgagttggggggttgttatttaaatggttttaggcgatttttttcgtagtttttttttttgggaatttggggtagtcggtaggttttatatttgagtttttagttaagtttagttgttgtagtttagttttttagtttcgttttgatttttttttgttttttatttaggtttttttatttttagggagttagaatgtgtttgagattatattataaatattttttataagggggtgggggtgggggggtttagtttggtatttaggatttttgattttagtatgggtgggggtagttgtagattttaatttatgtttgtttgttttaagttaaagtgttggttttagttttatatagttgttttagtttatagttttggggaggttagtttagggggttttttttcggggtggttagggatttgattttttttattttgtggttgattggttataggtgggagtttgagagtgatgggaatttagtagtttttaaagttttttgtttttttgtttttttttttttatatagggtagttaggtaagggtaagaaggatttgtgaggttggggtggggattgaattaagggttttttttttttttttgggttttttgttgttttattcgtttaggtgaatggggatgcgtgggttttggatattatggtgtattattgttttttggggttagggattaaaggagatagagtgggttagttaggaggttgttagttgttatgggaatattaggtttgggggagagtttattttgtgattattagaggagttgagatacgggggtgtttattagttatattttgggttttttatttcgtagattatagtagttttttttgggcgtgttttacgattattgttttgggttagggtgttagtagttaggaatgtaagtttttttagttttttatttttaaataatgttgtgtttggtatgttaattaataggtaggcggtattttgttatttataatgtatttttatatatgattttatcgaatgtttttaataattttgggaagtaggtattggttttattttttagataagaaggtatatgttcggataagggaagtgatttgtttaaggttagttaatgatttgtttatgggggtagagttgtgttgtgtgttatttatttttgttgttttgaaatgtaggagagataggaatttaaggtggggtttgggaagaggttttggttttttgtttttgagttttttttttatttcgtaggtgtgtaagtatttgtttttgtgatttaggttttgtttgtgtggggtgagtagtgttttaatttttttatttgatttttttaggtttattttttagggttgattgtttgggtgatttgaattaaaggtagttaatttattgtttggtatattttttgcggagttttgagtggtatttttggtttttttttgagttaagaatttttttttttagggattttatagaaagtagatatcgatatcgaggagggggggtattaaatttataatggatacgagttttagttaggtggggtagagggaagggtatagtttagtgtagatggggagggtgattttttttaggatttttttggtttttttgtttttgatagagttgtgtgtgttaggatttagttgttgtttttgtttatttacgtttgggcgggtattgttgggatatgttaggtttgtttttgttagtttcgggggttgggtggagttgggggagttaaagaggagtttttaatttgggggttttttattttagttgggatgagaatagatttgagttttggtttggggtttgttttttattggttttgttattttgggaggtgtaggtgtagtggtcgtggggttattgaatcgaggttgaggttagaggtttttattagatttgggtttgtatggtttagaattaggttttttttttggttattttttgattataagttgttagagtttgagagtagggtgatagggaaagaagtatagatttggtgggatgtgggtagttttttgggtaagatttttttagttgtaagttttttttgttttttgtaaattgtatttatatgggtggagaagggtttattcggagaaaataaggagggggttgttggttagttggtttttggttagtttagggttttggaggttattgtttttaatttttttaggttttttatattttaggattttttgtggtagtgatggtatcgtggtgtttttaagttaggtagaaaggttgaaggtagaatttgggttagggtagagggggaagagttggaatagtttaggtcgttttttttaagtttttttattttttggggtggcgttttggggttttagggttatttgaggttggagagggaaggttttaggggttattatggtgatttgttttaggttttttgttgagttatgttaatttttttattttttagaaaagggttttgtttgggggtggttttagatagaaaagtttggtttggttttagggtggggggaagtaaggtggaggataaagagttttatttcgggatattttttttttttttttttttatttttatttttaatttggtaagaggggagaattgtagggtttttttttaaagtatgattagtgttttatttagttttggtttttatttttattggttatatatttattttttatggttcgttattatttttttgagtttttgataggttaagacgaggtttgtttagtggtcgggaagatgttaaggttattagtatgggggattagggttagggaaggcgggttttattaggtttcgtttttttttgtattttaggggaaggtgagtttttttttgttagttgttatgtaaatgaattaatgaatatttatgaagtttgtttattgaggttgaagagattttgaggggttttgggggtaatagtttttttttttttttttttttttattatgtagatatttgtttttttaatgtttttggttttaaggtagaattttaattagttagaagttttgttttaattttagggttttggaatttgggtggtaatgggagattgtatttggggtagataggattttttggtgagtaagttagaatcgagtggttagaaagttgagttggtttgttttttttttcgtgttttttatgtagttgtatatatatgtgttgttaagatgtaatagtataaggatttaggtaatgttttagggttttttagatttatcgggttattgttttgggtaggtttagatttttttttttaatgggaatatttatttgattatttatttttttatatgaagggtttggattttaaggtttttgttggttttaagatgtgagtagttgtttaattttgttatttggatggaatcgttgtgagtattggaaagggaaaaaatgtttggagaattttagaggttttggggaaatttgttggttttgtatggtgtatgggataggggtattttatttgaaatgtttatttaggtttttattttatgtttattttttttttgggttttttatagttaggtattagtggggaggttattttattttggtttttatttttttgtatattaagatggtagtttttaatttggtggagttttattcgatatggaggaaaggttgttttttttcgtttattttatttatgtggttagttttttttttcgtttatttgggtattattttttttttttagatgaggatataggtttggtattgtaaaggtatttgtttagagtttttagtaggtcggtattgtttgtagtatttttggtgtaatgggtttttaggaaatggaattattttttttttagatgattgtggtagtttgtgaattggtgtatgatattgttagttttattttttttaagtattgtttgaagttttttattgttttttttgttttgagagtttgtttttaatgggatgaaatttattttgtttgttgtgatttttgaagttttttagtttggttttaggtgaattttttatttttttttttgtttttttttttttatttttagttaagttggattaattattggtttgggttttgtgttgtagttattgttgtttattgttttagtgtgttgattttttattttttatttaagatttatttttattttgttttttttgtggatatatttttgattattttggttagatgagttattttttttttttttttgtttttagtttttgttgtttgaattattatttttatatatatttatagatagtttggtgttgtttattattcgagtatgggttatttatttttttgatttaaattggatagtaaagtttttgacgatggagttatattttttttttttgttttttttttaaaatatgagagtgagtttataggtatttagtgttagtatttgattttttgttttttgggagattgtttttaagaggtagttaaatatgttgaacgtttattgtgtgttaggtgttttttatgtgttgttttgtttttttattataatattggaaggtaggggtttttgttatttttattttataagagaagaaattgaagtttagaataggtagtttatttaaggttatagagttagtaagggtttagttttggaatttgattttaaagtttgtgtttttttttttatatggttttgttttgtttttagtattagtttatttagttttagaaatggttaatggagtattattttttttttgtgtgtttaggtaaggatagagttttatggataggtggttttgggttgttgattttttttgttgttttttagtgtttggttttttggattagaatatgaatttggtttaaaaggtatttgtttatttttttttaggagttggagtaggagtaatatagaggtgataggttaggatatagatgaggttttattttttatgatttgttgtttttggttgagttttttttttttttttttgttttttttaagaatgagatgaattaagtttaggaatttaggtttttgtattttgagggtgggatgaattgttagtaggataataggtagtgggagtgagtagagttgtatttggttagagattgtggttattatttttttgttttaggcgatgtttgtttttatttttttattatgattaagattagtaaggatgggggagaagatatgggttttagatagattgagtttttttagtttttggttgggagttgcggggagtggtgattaagatatgtgtgggtttgttgtgtgtgtgtgtatgtgtgtgtgtgtgtgtgtgtgtgtgtgtgtgtgtgtgtgtgcgcgcgcgcgcgcgtacgtgtgtatgggtataggagaggtagtagtagcggttatgaaggaatttttgttgggggtgggggtatataagattgttatttttaggtagtatgggtttgatattttggtatttagtttattggttacgttagttttttgcggaaatgttatattaggataaagggtttttttagttaggtagtgttttattttgtcgagtagttagagtttggtagttttgtttatgggttattttttttatatttttttggtagtgtggttttttttttttatttttagtttgaggatggaggaagggtagaaggtttgtttttgttatttttatttagtaggtttagttcggtttttgttcgtttttttggttttggaatggtttggggttatttttaattttgaggttgattatttttttttttttgggtagg

SEQ ID NO: 106 - DNA, 14542 bp, Artificial Sequence
  chemically treated genomic DNA (Homo sapiens)
tttgtttagaaggaagaagatggttagttttagggttgggggtggttttaggttattttagaattagggaagcggataagagtcgggttgggtttattgggtggagatggtaagagtaagttttttgttttttttttatttttaggttgggggtggggagagagaattatattattaggagagtgtggaaggggtggtttatgggtaaggttgttaggttttgattgttcggtagggtggagtattgtttggttgggggagttttttgttttaatgtggtattttcgtagggggttgacgtggttaatgggttgggtattaaggtgttaggtttatgttatttggaggtggtagttttatatatttttatttttaataaagatttttttatgatcgttgttattattttttttatatttatatatacgtgcgcgcgcgcgcgcgtatatatatatatatatatatatatatatatatatatatatatatatatatatatagtaagtttatatatgttttagttattatttttcgtagtttttagttaaaggttgggggagtttaatttgtttgggatttatgtttttttttttatttttattaattttggttatgatggaaagataggaataggtatcgtttggagtaaagggatgatggttatagtttttggttaggtgtagttttgtttatttttattgtttattgttttattggtaatttattttatttttaaaatgtaagagtttgaatttttaaatttgatttattttatttttaaaaagaatagaggagaagagaaggggtttaattagagataatagattatagaagatagggttttatttgtattttaatttgttatttttatgttgtttttattttagtttttgagaggagatggataaatgttttttgagttaggtttatattttaatttagaaggttaggtattgggggatagtagggagggttagtagtttaggattatttatttataggattttgtttttgtttaagtatatagaaagaaaatggtgttttattggttatttttgagattggatgggttggtgttgagagtaaggtagaattatgtaggagaaagaatatagattttagaattagattttaaagttaggtttttattaattttgtgattttggatgagttgtttgttttgagttttagtttttttttttgtaaagtgggggtggtaagagtttttattttttaatattgtggtggggagataaggtagtatatggagaatatttagtatataataggcgtttaatatgtttgattgttttttagaagtagttttttaagaggtaggaggttagatattaatattaagtatttatgagtttatttttatattttggaggggaaataggaagagaagatatggttttatcgttaaggattttattgtttagtttgggttagaaaagtaaataatttatattcgagtgatagataatattaggttatttgtaggtatgtgtgaggatgatgatttaagtagtaagggttggaggtagggagaagaaagagatagtttatttgattaggatggttagagatgtatttataggaaaggtaggatgaaagtgggttttaggtgaggaataagaagttaatatattgagatagtagatagtagtggttataatataaagtttaggttagtgattggtttagtttggttgggagtgagaagagagaaatagaagaagaggtgaaaagtttatttggggttagattgaaaggttttaagggttatagtaagtagggtgggttttattttattggagataggtttttagagtaggaaggataatggaaggttttaggtagtgtttaaagagaatgaagttgatagtgttatgtattagtttataggttattataattatttgagaaaagagtggttttattttttgagggtttattatattaaaggtattataagtaatatcggtttattgggaattttgggtaaatgtttttgtaatgttaaatttgtgtttttatttgagggagggaaatgatatttaagtaggcgaagagggaaattgattatatggatgaagtggacgaagaaaagtagttttttttttatgtcgagtgaggttttattaaattgggagttgttattttgatgtgtaggagggtaaaagttagaatgagatggtttttttattggtatttaattatagagggtttagaaaggaagtaggtatgggatggaagtttggataaatattttagatggaatatttttgttttatgtattatataaagttaataagtttttttaaagtttttagaattttttaggtattttttttttttttagtgtttataacggttttatttagatggtaggattagataattgtttatattttagagttagtaggaattttagagtttaggttttttatgtgagggaatgaatgattagatgaatgtttttattgaaaagaggggtttaaatttatttaggataataattcgatgggtttaagaggttttaaaatattatttgaatttttgtattgttgtattttaataatatatatatatgtagttatatagagggtacggaaagggagataggttagtttagttttttaattattcggttttggtttatttattagggagttttgtttattttaagtgtagttttttattgttatttaggttttagagttttggaattggaatagggtttttagttaattggggttttattttgaagttagaggtattgaggaaatagatgtttatatgatggaggaggggggagaagagagaattattgtttttaaaattttttagagtttttttaattttagtgaatagattttataaatatttattagtttatttgtatggtagttggtagagggaaatttatttttttttgaagtgtagaagggagcggagtttgatgagattcgttttttttgattttgattttttatattggtaattttagtattttttcgattattgggtaaatttcgttttgatttgttagaagtttaagagagtggtaacgggttataagggatgggtgtatagttagtgagagtgaaggttaaagttaggtagaatattagttatattttaaagggggattttatagttttttttttttattagattaggagtaggagtaagggaagaggaggaagagatatttcgaagtgaaattttttattttttattttatttttttttattttaggattaagttaagtttttttgtttggggttatttttagataaagtttttttttgaaaaataaagggattgatatggtttagtaggaagtttgaagtaggttattatggtaatttttgaggttttttttttttagttttagatagttttgggattttagggcgttattttagggagtaaaaggatttgggggaggcggtttaagttattttagtttttttttttttattttaatttaagttttatttttagtttttttatttagtttagaagtattacgatgttattattgttataaagaattttgggatatgaaaagtttgaaggggttggggatagtagtttttaaggttttggattggttagaaattaattaattaatagttttttttttgtttttttcggataagtttttttttatttatgtgaatataatttatagggggtagggagagtttgtagttaggagggttttgtttagaaagttgtttatattttattaggtttatatttttttttttgttattttgtttttaggttttagtaatttgtggttagagaatgattaaagggggagtttggttttaggttatgtaagtttaagtttggtagaagtttttagttttaatttcgatttagtgattttacgattattgtatttgtattttttagggtggtaagattaatggaggatagattttaagttagagtttaagtttgtttttattttagttagggtggggagtttttaaattaaaggtttttttttaatttttttagttttatttagttttcgaggttggtaggagtaggtttggtatgttttagtagtgttcgtttaggcgtgggtgggtaggaatagtagttgggttttggtatatatagttttgttagaggtagggaagttaggagagttttggaggaagttattttttttatttatattgaattatgtttttttttttgttttatttggttaaggttcgtgtttattatgaatttaatatttttttttttcgatgtcgatgtttgttttttgtggggtttttgagaagagagatttttagtttagagaggaattaaaggtgttatttagagtttcgtagggagtgtgttaggtagtgagttggttgtttttagtttaggttatttaagtagttagttttggaaggtaggtttagaaaagttaaatgaggaagttggagtattgtttattttatatagatagggtttgagttatagggatagatgtttgtatatttgcgaggtaagaggggaatttaggggtagggagttagggtttttttttaaattttattttgaatttttgttttttttatattttaaggtagtaggaatgaatggtatataatatagttttgtttttataggtaagttattgattggttttagataagttattttttttgttcgggtatatgtttttttatttggaaaatgggattaatatttattttttagggttgttgggagtattcgatgagattatatatgagaatgtattgtaagtagtaaggtgtcgtttgtttattagttagtatgttaaatatagtattatttagaagtaaaaagttgaaggagtttatatttttggttgttagtattttgatttaaaataatgatcgtgaaatacgtttaagaggggttgttatggtttgcggggtaaggaatttagaatgtggttggtgagtattttcgtattttagtttttttaatagttatagagtggatttttttttaaatttggtgtttttatggtaattagtagttttttggttggtttattttattttttttagtttttaattttagaaaatagtgatgtattatagtatttagggtttacgtatttttatttatttgagcggatgagataatagagagtttaagggaagaaagggaatttttgatttagtttttattttagttttataggttttttttgtttttgtttggttgttttatgtgggagaggggaggtaggggaataggggattttaggagttgttggatttttattatttttaggtttttatttgtggttaattagttataaagtagaagaggttaggtttttaattatttcggaaaagggttttttgagttggtttttttaggattgtgagttagaatagttgtgtggggttggggttaatattttggtttggagtaggtaagtatgggttggggtttgtagttgtttttatttatgttggagttaagggttttggatgttaagttgaatttttttatttttatttttttgtagggaatgtttgtaatgtgattttaggtatattttgattttttggaggtgggggaatttgagtggggggtaggaaggggttaggacgggattgagagattgaattgtagtagttggatttggttgaggatttaagtgtgaggtttgtcggttgttttaagtttttaggggaagaggttgcgggaggggtcgtttaggattatttagataatagttttttaatttagatatatatatatatatatatatatatatacgtatatatagaggtttttaaaaaaaattttagtaggattaaatttatttttttattttgcgtttatggggtaaatttgataggaggggttaaggaggtagaagtttttgttatttagggattagtattttagaaggttttagtattaatttgggaaagaggtttgggagttttgggttagttattttcgtttttttttttagttagggttggggtcgggtcgtacgtattttggaatttggaagcggatttttagttttattattttttttattttgatttttttttttttaagaaggaagtaattaagtagggtttataggtattgggagatttttttttttgggaggggggttgttagtttttgatagggttgaggagagagattaaaagttaggagaggaagaggggaaggaagagagaaaatgagtttgagagggagagtacgggtatgtgcgagaaataaaaggatttgagaaaaagaggtagagagtgattaagagtgagagggagtgtgagagtaaggtagagtaggcgagtttagttggagaggggaagtgagcgttgttcgcggagggtatgagagggcgaattgatacgggtttgagaggagaattcgggtaggaggtagagagggagggagatagagagggattgtttatttgaaaggttgtggtagtttgagggttgggcgcggtggtagaagtagtttttaaagtttaaggagagttgagggtagtgttttttttttgtttatttgtttttattatttcgagttaatatatgtagatagtggttgtattttagatttttgagtttggatggaaggagggtgtattaggattagtttttgattttttttaggatttatttaattatagaatggaattcggatagtttttagagagtttttagttattttttatttttattttataatgtttgtttttagtttgaggtagatgaggaggggggttagagaggatattattttttaaaatttgtaagttagtttagagtattaaagtttttgagtataaaaagggggaagtatagatagatcgtgttttttttagtatttttaattttgtaggagggtttttttttagttgtggagttgtatgttatttttggttagagattcgagagagtaattaggttatttttatgagtttttatgatgggttattttaggcggattttaatttttttggtttaagatagaatatttttagtttttatttttattagggtaattgagtattttataattattgagtattttataattattgagtattttataacgtttttttttgggtttaagtagtttagagtttttagagtattttgagtttttgttgttaggagagtgttgtatttcgtttggtttttgggtaggaaagaaatttttgttaatttttttttttgtatttagggagagttttttattttaattttggtttagttattttattaattagtaataggattttattttaatcgaggagaagaaaattaaagttgtttttttttattttagggttgagagattaaacgtttttgggatttaagaggttaaggtaggtaggagtttgggaagttattcggggtagggcggggttgggggggaggcggcgtggggtagtaagagtggataggaagaaatttgagatataggaattagtgattacggatggagtaggttaaagttttttagttttttgttaagtggggttgttcgtatattgttgggatttttagaaaattgagaggaagggtaattttgatttttggttttaatttgagttttggatgttaaaagagaaggtttagaggttattataatagttttagcgattttttattaaaagtttagaaattattgagttatcgttttgaaaggtgtgcgtgttgtttggaggggttgtgtgtgtggtggtggtggggtagttgtgtagaggaaggagaagaaagaaaagaaaggatgttttttatatagttgtttatttttcgttttaattttttggggaaaattaagtatagttttttaatttgggggatagattcgggggttaaggggatttgtttgggtaggaatcgttttttttttatttattttttttaatagttcggtcgttatttttcgttttggcgggtttttgaagttttgttatcggttttattggatttttgacgggtattggttcgaatttttattatttaacgattatttttttatttcgtttttttttattcgttgtttttgtgagtttgggagtagcgttcgtttttttatcgtttcggtagggagaaaggaggggcggggggtaaaaagagatagtaaagtaaaaagttagggaggaaaatagggaagaaagagaaatgaaaatgggagaagttcgagtggggatgttggcgttgttatttattttaagcgtcgggtttcgttttgtgttttttttatagttacgtaaacgaggaattcgtgttttggtttcgtttttcgttcgagttaagttcgtttttggagcggttttcggcgaaaattattacgtttttaggggtttcggagggagttgcgttttcgtttttatttagtttttcggtgcgttttcgggcgttcggattttttagtttcgtttgtgcgattatttcgattttatttaagacgtgtagaggtagggggtgggaagttcggggggttataatttagttaagtgtttttattttatttcgtcgtattttgttttattcgttcgttcgtaggaaaatattcgaaaaagtcggagataaaatgaggcgtcgtttttttttcgaagatttttttatatgtatttcggggcgtgcggttttattttgaaggagtgttttttattttagcgtttagaggagataagttatttatttggggttgagggagttttaggatacgggttttaggtttttggttagcggtgtggcgagtcggtatagcgtttatacgattatcgttataagttatttgtcgagttaacgttgtttaggtcgagttattttttcgggggtagattgtatttcgggattttttggcgtttttttattaaagttcgtttcgtttttttttgtcgcgttgcgttcggagtcgtttaggcgtttatttttcgtagtcgtcggttttgaagtgtttttttttcgtcggtttcggtgtcgttttttttcgttcggtcggttaggaggatttattgggtagtcgtttttaattcgggtatgggtttcggttttcgagggttcgtttttttgggtttttcgttgtcgtacgaggcgcgacgggggttttgcgttttcgggtgatttcgttcgatttcgttcgatttttcgagacgtttcggggttgcgcgtttttttttcgacggggttttttcgtagaggtttcggtgatcgtttcgacgtttcgatcgtttcgggatcgttgttttttggaagaagtgggggtttttttatagtataagttcggttttcgggttttcgattgggtcgttttggtacgggtttcgttttttcgggttatattgggatttcgggttacgcgttttcggatagtttttattttagcgcgggttttgtttagtgtatttagaagagcggggagatgttgtcgagcgagttagttttattagtttgcgttttcgaagtttcggtcgggtagttcggtagtttcgcgtcgtcgagttttggttttcgggcgatcgagttcgagggtttgcggttagtgcgagttttataaattttttattgttgtttagttcgtatagatttttttcgttgtcgttgtgttgtttatttttttgtttaggcgaacgtaaggttaattttgtttttttagttaatagtaagtttagtggcggggtttttgttttatattacgtttttagagtaggaagggggcggggttttagggagtttttaaggacgtcgcgcgttcgatggtattaatttgagtgtgcggttcgtgcggttagggttgggttttttttagttttgtttttagagagtttaattcgtgggaagttggtatttttaagagttgtcggtttgtttttttttttacgcgtttggttaatattttagtttattgattttgttttaagtattttaggaaagtatttttattttttttttatatataggatttttgaagttttgttttgtgtttattttcgtgttaaggatagtttgtttgtttttcgtttagttttacgtaaggttttagtgggttttttttttttcgtttttaaaatgtattgtttgtttgtatttggattcggagttaggaatataaaagtgagaatagtgggagggggaaattggtgagggtttagtatttgattggggttagaggtggggcggggagtagggtggggtgtggtggggagagaaggcgtgtttatcgtttttggggattaggttttcggaattttagttttttgggggagttttgtgggatttttggagttaagatttagttttgttttgttcgaaggcgcgggtaaggtttcgggataggtaagcggggatgagagggtacgtcgataaagaaagatatttcgagggtaaagaggaaaaagtatagggtatgagatttttgaaaaagtaaaagcgggtattttggatcggagaagtcggattttagtttgtttcggtttcgttatttgggtttttgttttttagttttggtttatttttttcgtttcgttttgtttttttgtttataatttggttcgattttatagtttagattttttaggttcgatttattttcgttggtcggattttagaggacgtatttacgtgttaatgtttttttttgttggatttttatagtattgcgggcgtttgggataaattcggagtttgttatagtataagatttgggataggcgtagttttggtaaaaatcgttattttgtatggggaggaagggaaagaattagaaggatatttgagtttggggtaggtttagggattgttaagaatataaggtttttttattttttttttatggagataattagatgagtaatatttttaaagtgttttattatttatatagttttatgtttattatttcgtttaataggtgattgagttattgcgttttttagtggattttttgatgatttttgtggttgtagaggtgggaatagtttagattttgtttttttatttttttttaaatagaggagaaaatagggaaaatttgggttttttttatttttaggggtagtttttgagggtgaagtggttttgggtaggtagggaaagaaggagttgtttggggtttttgagtttttagttggattttgtattggggtgtaaggaaggagagatgagatgaatagggtgtagggatatattagtagtttagttgggagattgggatttttggagtgtatgttaggatattaaaatttgaatatagaaagtagtttgttgtttattgagtgtttattattgttaagaattaagttagatgtttttttttttataattttttgaaatgagttttagtatttttattttatttataggggaaagtaaggtttagagagaagtgatttatttgagattattaagttgattagtggtgaaagtaggatttgatttttgggatatttgtttttaaagtttgtggttatttttttgtattatattggtttaaatttttagttaatttttgtttttttgtttttttggtttatttttggttaaggttgggtcgtgtatggatagtagtagtttggggttggttaggattttttttttattgttttttaagaggttgttaggtttggaaagtttatttatatttttggttatagtttagagttttttttatttaagattattattgttaattttagagttagttttgattttttttttttatagttagtatgttcggtgttttataggaggagagtttaaggttaggtgggggatggggagatgaggttatgcggttagttttgggaaatatgggaagataagtagtttttgagtgtgttagtatttaatttcggtgggtagggtggtagaggaaatgagaagaagattttttatgtttagatttgttttatatgttatttatttttgtttatagtatagtttttttgttttaatttgtttatattagttataggggttttaggagtagagttgagtttattttttgttatggttaggttagtgattttaggtttttattttttgatttattttggcggggttttagatgtaatgatttaggttttcgaggtagggaaaaattatttttaagggagtttgagaggaagttaggatttgtgagtaatgggggtttttttatttaagttttttttatattattggtagttattttttatttattttttttaggttattgtgttattataaatatatttacgtacgtgtttatatatatatatatatatataattattaggttttaagtttattagtattttttgagtagtgtttttgtgttgatttttgagcggggttatttttgttgatataaagagtagttttaataagttttgtttataaggaatattaaatattgatatttgtatgtgggggattttggatttagagatgtaggagaatatttggtagttgtaggaagtttcgggtatcgtgtagttttgggagagtagagttgttttttttgagtttagttttttatatttatgagtagtagggaggtataaattttagagttatagagttttttgtttatgaattgtgtttttttgggtaagttagtttatttttgtgtgttttagttatttgtttgtaatttagaggtcgttttttatttatagagtcgtggtgacgggtgaatgagataatgtatgtgaagggtttagtattatgtttggtttattgtggtatttattaaatggaaatttttatttttttgtagagttttttatagagatatttttatttttagttatatacgtttttatttgtttatatatgttttgtgtggtatatgtatattttttatttttttttatatttttatatatttgtatatatatgtatataaatttttatttttttttatttatttatttatttagtagaaggtggtaggatcgggtattgttttcgtggaatttaaaatttagtttttagagttttttatgtttattattatttatatatgtgtatgaatatgtatatatttttttatttttgtggtttttgtttttgatttttttttgtttgttttgtattttgagatatagagaggtgaaataatttatttaaggttatttagttaggaagtggaaaagttaggatgtaaattaggttatattgatatattaaggttgtggaaaggagtgtgtgttaaggtgtgggtttgggaaagttagtaggtttagttagagttaatagttagaaaagtagattgaagagttagggagtaaggattttaatttgaggtttaaggtattgttaattgggataatttagtggggttagtaatttttttttttgtttgtagttatttttagtttgttttatgttttttattttttttttagaagatttattatttgtatttgtatattttatatatattggtatttattttttataaggagagggagagttattatttattaaatatttattgtatgttaggtagtgtggttgggtgtttttatttggtgttttattatgtttgtttaatttttataatatttttgaggttgatattgatagatttgttttagagatgagaaaattaaggttttaggtttaatttggttgtattttttgttttattaattttagtttgtaaagtgtttttttgtttagttagtttatttttattatttttttttttgttgtttttttttttgtttatatttgttttttagttgagattagttggggtttatgttgattttgggttgttttttttttttaatgaatattttgtttttttttaatttattttatttgtaggttagtttttgggtaagtttggggtgggatttgagattttttatttttttttttttttttacgtggttgtattatattttagggttaggtgagatttagttttaggcgggtaagatttggaagtttgtttttattgtatttacgagagttttcggtggttggggaagaagggggtcgttttaaaggttaaaggtttagttagattttttttttagtttttttttgtttttgttttagttgtatgtttggtttatgggtatttgtattgagattattttgatttgttagatgttagtttgtgttaggttgatggtagaatggtattagggatgggaggagttttttttttttttagatgggtttggtttttttttttttttttttttttattttttttttatattttttatttttattttggatttttagatatttgttttaaagttttaagttttatgtaggtaaatgatttgtttttttgtttttgtaagagtttgaaatagggtatttgagagttagagtatggtttggtgtgtataataggtggataagtttttgaagggtagttgggattttgggtttttagaggttttatttttagaaatttttgttttgttgggttttattgatttaggtttagttttttttagtagtgtttttgttttttgttttttagtttagtaggaggtagtttaggtaagggtaagtttgt

SEQ ID NO: 107 - DNA, 6129 bp, Artificial Sequence
  chemically treated genomic DNA (Homo sapiens)
aggtttattagggttagaataaaatgggtttgtttattatttggatgatttttattttttaggtttttattttggattaaagaagtgataagtagaataaggagttaataaaataatatattattgtagttggttttaagtgttgttgaagttgttaagtagtataaagaggatgtaaaaaatgattttatggatttaaaagaggagattcgttacgattgttgttagaagttttttttatgtttattaagagtagtatttaatttttaaatttttatgtatgtttgtattaaattagtttgaaaaaatattttgttgatagaggttaaatattagaattaattatgtaattaagagagcgtatagttagttagttattatttgtttttttgtatttattatattttttaatttagtttggaatgatgagtggagtttggttttttatatttggtttgtaaataaagagatgaagttttatgttaggtgtgtatgtttgttggagttattcgtatttttatgtgtgttgtttttatattaataatgttgttaacgaaatgagaggttgagttttagattaaaatggatattagtggaaaatacggtaatttttttttataaggaatatgtgatagtttataaggtatgagttttttttaaattttttagagagaagaatgatttttttttgattaagagtttaatgtagtattttttttgttaaataaatagattttaatataaaatgttttagtgttttaataatttgaattttagaagtagatgggagaagggtgtttagtaaagttgattttaagaaagggttttatttttttttgttagattttttttttaaggataaatgggggaaaatgtgatttgttagagagtgttgaaagtattagtgatttgtatgaaataaatagtatataatgttaggaaataaagggtatgattttgcgagaggtttataagttatatagagaatgtatggtttggataatatttagttaatatatattaaatttatttttttgtaatgttatttagataattttttgtttttgtagaagttttgttatatatattttttgaaatatgttttagaaatgatggaatattatataaggaatatataagaaataattataagttttaaagtttaaaatatgtttaggaatttaaaggggtaggaatataattatttgtattttttttgttggaggtggggaattgtatttttttaaagttgcgattatttatttgttattttattttatatttatttagttttgtgttaatttttataattatggtattttttgaaatttttaaatttttatttatttgatttattagaatttttttttttttttttttttttgagattgagttttattttgtcgtttaggttggagtgtagtggcgtgaattcggttttattgtaagtttcgttatttgggtttacgttatttttttgttttagtttttcgagtagttgggattataggcgttcgatatacgttcggataattttttatatttttagtagagattgggttttatcgtgttagtgaggatggttttaatttttttatttcgtgattcgtttatttcggttttttaaagtgatgggattataggcgtgagttattgcgttcggtttttaaaatttaagtttagaatatagtgaagtaattttttttgttgaaataaaattttatttgatgagggtttaaatatatttgttaaaagtatagatttttcgaaatatattgattatgatttaaagtgtggtaaagaaaaaaattaattaagtttttttaataattgtaaaatgaagtttaaatattaagagatacgatattgatgtgattggtttttggtttggtatgttttggaaattttattttgttttgtgtatgttagtatgatttatttttttgttggtatgttatataatagtagatataaatggttttgaggtgatgtttttaattattaaaattattattaaatagtagaatgttgatattttcgaagtgagtattgttgatgttttttatattgtttatattgaatttttgttgattgaaattaagttgtatatttttttatattatagatgttttgtgtgtgtgtaggatttttttttagttaaatacgtattttgttttgaaaaggaagcgattttaaagtgtatatttatatttgttttaaggtaaaacgttttggatgtgagattttttgatttattgaaaatgttatttttggaagttggtttatttttagataatgtaaattttttgtattttttttagtttatttggagaggaggatgtagtgagttaagaggttataatttaaattttataatataagtttgttaaaaggtattgagtatttagtgtttttttaaaagattattaagttaattttatatttaattttaatgagttttttaaatggtattttagtatattaaaaattagtttttttttatttttgttaaggtaggagttatagtgtttgttgttttttgggttgttggtgttttttgggaattcgttgtttaaatcgttatatcgtggtggagtttttttaaaataaattttatatatatatgtgtgtgtgtgtatatatatatgtgtatatatatacgtatatatgtgtgtgtatatatatacgtatatatgtgtatatatgtataaatatgtgtatatgtgtgtatacgtatatgtgtgtatatatatatttagtttgaaggtttatttaaaatgaaaataaattatgaaatttttttgtttttaaagatttgtttggaagagtaagtgtatttagtattttgtatgttttaatgtgttttttattttaaattagtttttataagtttttattattttaattgagatgtatacgttaagttagattaatgttttaaaaacggatatttaaaagtaacgtattataaaaatttttagaaattgttataaagaagagtgaaagaaaataaggtgttttattatatgtatttttaaatttagcgtagtggatattttgttttaaaaatatataatttgtagaattattgtttagtttgtgtttgaaatataaattttggggtggacggtattaaattgaaaaaaaacgtgggtatatagtatattttaattttttatattgaatcgtatatttgtattgtgttttatttttatcgtgttttttttattgttggatatataaaaagattttttttggaattgtgatttgattagatgttgtagtatgttggattcgggtcggtggatcgtagagcgttcgagatgcggagaagtaaagttggtcgttagtgggcgttgtggtttcgtggaagttacggacgagcgttagtatcggcgttcgatcgggaaagtagcgaggagtttttgttagttttgttttggggttttgtagacgtcgagtgagaagtatatgttttgatttttttattttatattttttaaatttttggttattttgggaagcgcgcgtgttttttagaggttagtgagacggttttcgcgtcgtgtttgtgtcggcgatacgcggggaaagttttaggggcgttattttttcggggggttaggagggaagggagacgttcgtagagaaggcgggaggcgacgatgtttaggttttgattagagttgtaaatttcggcgtcgcgtcgtaggaatcgttttgtaattttcggttttattgattgaaattgagtcgtaggcgattggtattaaaattaagtgagaagttttcgtcgagaggcgtcgggagaagcgcgtagaagtcgggagttttaagggtgcgcgcggagtgtaagttttgtacgcggggtagcgtcgtatttgcggagaagggacgtcgagcggagtttgttgtttttcgtattgttcgagggaaagtcgcgttttttgatttcgtcgagggggaaggcgttttcgggcgcggagataggtggttcgttattcggtcgtcgttgtttttacgtttgtatcgcgtttagaaggtttttcgtcgtttcgggggcgttttgtgtacgcgttgagcgttttttttgttcggaatttgtttcgttttcgtcgttcgcgggagttaggggcggggtttatttgttagttcgagtttcgtttcgcggtatttaatgtcgggaggggatggcggacggacggatcggtcgtttaattagcgtacggtcgcggagtcgcgggttaatgggtttcgcgcggcggggcggggtttcgcgtttaacgcgttttgatagcgcggcggtcgcgttgatttttttcggcggggatcgcggcgtcggtcggagcgaggagttgcgtacgtagcgggtttcggcgtttttttcgtatataaaggttcgcgcgcgttcggagttcgcggcggggatcgagtttttttttttttgttttgggggtcgggagtcgcgcggattgagaaggtttttgcgcgttcggaggcgttttatttcgtttcgtgtttcgggatatggaatcgcgtcgacgcggcgttcgcgcgttcgggtcgttgttcgttgtattggatttatagttataggcggtttcgttcggggcgtagcgttcgtcgttcgcgtcggtcgttttcgtttcgggtttttgtgttttagttcgtattcgtttcgcgtttattcgttagtcgcggtcggttcggtattttggagtcgtacgggagtcggtcgttcgagttgcgttcggcgcggcgtttcggaatttcgagttcgtcgcgtcgtcgcgtttcgcgcgtgcgttttcgtttcgcgttttgagggtttcggagagcgagcgtatttggttcggcgatcgttggagttgcgtagcgcgtttcggagttgtttgcgggcgtacgtcgtttttttcgttagtttgtttcggaggattgggggttttagtttgcgtttcgttagtttttttttggttcggagtgcgcggagttgggagtggtttcgttatggttgtgagaagggatttcgtgtggaagtattgttggggtgttttgatggttttatgtagaattgcgatttttaaatcgatagttttagagtttatttattggaatttttcgaattttaagtaagtggcgttcgcgatttttttatgttttcgtttcggggttcgtcgcgtcgttcgggcgggaggaggggttagttcgcggggtttcggagtttgtttttggaatttcgggtttttcgttttttatttttaattttcgttttatttaatttaggtggagatttttcgttgggttttttaatcgaggttcgttggaacggacggttttttcgttttttttttttcgaacgtttttaggcgttaaaagttattatcggttcgggtgttaagttcgggaaggtgttcgatggcgatatttgatttttttttgttttcgaggacgaaggatatggttataatttaggttggtcggtacgcggggattggtgggttttggagagaggcggagatgttgtattcgcggggagcgcgggcggcgtggttcggggttcgcgggcgggcgatcggggtggtaggacgttggtagcgaagcgcgttttggagaggggagtttggagtcgttacgttgttcgtagagttttggagtcggggcgttttggtatcgcgtcgttagttcgagggtgcgcggggagttcgtttgtttcgtaggagaattcgggcgtcgagttttttttttcgcgtcggggagacgggttttaggtttttttttgagggttcgtcgtatttcggtttttcgtttcgtttataagtcggtagtttcggagtatgcggtttcgatggtcgatttgattgtaatgtattttttataaaagtttagggttttgtttagtcgatattgtttttgaagttttttttttcgggattttggtaggaatgggatttttaggattagatttgtttttatcggattttatagtcgggagcgagttaggttttgtggagagtaatttttagtttgggttattagagtgtatttagaatttagaaaattttatttatttttaaatttgtgtggttataattcgtagttatttgggtatttagtattgtgtattttttt

SEQ ID NO: 108 - DNA, 6129 bp, Artificial Sequence
  chemically treated genomic DNA (Homo sapiens)
aaggggatatatagtattgaatatttagatgattacgagttatgattatatagatttagggatggatgggattttttaaattttgaatgtattttggtggtttaaattgaaagttattttttataaggtttggttcgttttcggttgtagagttcggtaagagtaaatttgattttaaggattttatttttattagggtttcgagggagaaggttttaggagtagtgtcgattgggtagggttttaagtttttataggaagtgtattataattaggtcggttatcgagatcgtatatttcggggttatcggtttatgaacgaagcgggaggtcgaggtgcggcgggtttttagggagaagtttaaggttcgttttttcggcgcggaggaaagggttcgacgttcgagtttttttgcgaagtaggcgagtttttcgcgtattttcgggttggcggcgcggtgttaaggcgtttcggttttagggttttgcgggtagcgtagcgattttaggtttttttttttagaacgcgtttcgttgttagcgttttgttatttcggtcgttcgttcgcgggtttcggattacgtcgttcgcgtttttcgcgaatgtagtattttcgtttttttttagagtttattagttttcgcgtgtcggttagtttagattgtggttatgtttttcgttttcgaaaataggagagggttaggtatcgttatcggatattttttcggatttgatattcgagtcgatagtagtttttagcgtttgggagcgttcgggggaggaaaggcggagagatcgttcgttttagcgggtttcggttggaaagtttagcgaggagtttttatttaagttaaatggggcgggggttgggggtgggggacggggaattcgaggttttagaaataggtttcgaggtttcgcggattgattttttttttcgttcggacggcgcggcggatttcggggcggggatatagggggatcgcggacgttatttatttggagttcgaggaattttaatagataggttttaaaattatcgatttggaaatcgtagttttgtataaaattattaaaatattttagtagtatttttatacggagtttttttttatagttatggcgaagttatttttagtttcgcgtatttcgggttaagaagggattgacgggacgtaggttgggatttttaatttttcggggtagattggcggggaagacggcgtgcgttcgtaggtagtttcgaggcgcgttgcgtagttttagcggtcgtcgggttaggtgcgttcgtttttcggggtttttagggcgcggggcgggagcgtacgcgcggggcgcggcggcgcggcggattcggggtttcggggcgtcgcgtcggacgtagttcggacggtcgattttcgtgcggttttagggtgtcgggtcggtcgcggttggcgggtgggcgcggggcgggtgcgggttgggatataaagattcggagcggagacgatcggcgcgggcggcgggcgttgcgtttcgagcggggtcgtttgtgattatagatttagtgtagcgggtagcggttcgagcgcgcgggcgtcgcgtcggcgcggttttatgtttcggagtacggagcggagtagggcgttttcgggcgcgtaggagtttttttagttcgcgcggttttcggtttttagggtaggaaagagggagttcggttttcgtcgcgggtttcggacgcgcgcgggtttttgtgtgcggggagggcgtcgggattcgttgcgtgcgtagtttttcgtttcggtcggcgtcgcggttttcgtcgaggagagttagcgcggtcgtcgcgttgttagagcgcgttaaacgcggggtttcgtttcgtcgcgcgaagtttattggttcgcggtttcgcggtcgtgcgttggttggacggtcggttcgttcgttcgttattttttttcgatattgggtgtcgcgaggcggggttcgggttgataggtgagtttcgtttttggttttcgcgggcggcgggagcggagtagatttcgggtaggagaagcgtttagcgcgtgtatagggcgttttcggggcggcgagaggttttttgggcgcggtgtagacgtggaaatagcgacggtcgagtagcgggttatttgttttcgcgttcgggggcgttttttttttcggcggaattagagggcgcggttttttttcgagtagtgcggaaggtagtaggtttcgttcggcgtttttttttcgtagatgcggcgttgtttcgcgtgtaagatttgtatttcgcgcgtatttttagagttttcggtttttgcgcgtttttttcgacgtttttcggcgagggttttttatttgattttggtattaatcgtttacggtttagttttagttagtggggtcgggaattgtaagacgatttttgcgacgcggcgtcggaatttgtagttttaattagggtttgagtatcgtcgtttttcgttttttttgcgggcgtttttttttttttttggtttttcgggaaggtggcgtttttggagtttttttcgcgtgtcgtcggtataggtacgacgcggggatcgttttattagtttttaggagatacgcgcgttttttaaagtgattagagatttagagggtgtgagatggaaaagttaaggtatgtgttttttattcggcgtttgtaagattttagagtagagttggtaggaatttttcgttattttttcggtcgagcgtcggtgttgacgttcgttcgtgatttttacggagttatagcgtttattagcggttagttttgttttttcgtatttcgagcgttttgcggtttatcgattcggatttagtatattgtagtatttaattaagttatagttttaaggaaaatttttttatatgtttaatagtaggaagaatacggtagaaataaggtatagtgtaaatgtacgatttagtatgaaaaattaaaatatattgtatgtttacgtttttttttaatttaatgtcgtttattttaggatttatgttttaaatataaattgggtagtaattttataaattatgtatttttaaaataaagtatttattacgttaaatttaaaaatgtatatggtaaaatattttgtttttttttatttttttttgtaataatttttgaagatttttatggtacgttgtttttaagtattcgtttttgaaatattagtttaatttaacgtatatattttagttggagtggtaaaagtttgtgaagattagtttaagatagaaaatatattaaggtatataaagtattgaatatatttatttttttaaatagatttttgagagtagaaaagttttataatttatttttattttaaataagtttttaaattaaatatatatatatatatatatacgtatatatatatatatatatatttatatatatatatatatatgtacgtatatatatatatatatatatatacgtatatatatatatatatatatatgtatatatatatatatatatataaaatttattttaaaaaggttttattacggtatgacgatttgaatagcggatttttaggaagtattaataatttaggaagtagtaggtattatgatttttattttgataagggtgagaaagggttagtttttagtatgttaaaatattatttaaggaatttattgaaattgaatataaagttagtttaatgattttttaaaagaatattgggtatttagtattttttgataaatttatattgtgaaatttaaattgtgattttttagtttattatatttttttttttaagtaaattagaggaaatataggaaatttgtattgtttgaaaataagttagtttttaaaaataatatttttagtaaattagaaagttttatatttaaagcgttttattttgggataaatgtaaatatatattttaaaatcgttttttttttaaaataaagtgcgtatttgattgaaaaggaattttatatatatataaaatatttatagtgtgagagaatatatagtttagttttagttaatagagatttaatgtagataatgtgaaaagtattagtagtatttatttcgaagatgttaatattttattatttaatggtaattttggtaattaaaagtattattttaaagttatttgtatttattattgtataatatgttagtaaaaaagtaggttatattggtatgtataaggtaaagtagaatttttaaagtatgttaaattaagaattaattatattagtgtcgtattttttggtatttggattttattttataattattgggaaaatttggttaatttttttttttattatattttgaattatgattaatgtatttcgagaaatttatatttttagtagatgtatttaaatttttattaaatgagattttattttagtagaggaagttattttattgtgttttagatttaagttttgaaggtcgggcgtagtggtttacgtttgtaattttattattttgggaggtcgaggtgggcgggttacgaggtaaggagattgagattatttttattaatacggtgaaatttagtttttattaaaaatataaaaaattattcgggcgtgtgtcgggcgtttgtagttttagttattcgggaggttgagataggagaatggcgtgaatttaggtggcggagtttgtagtgaagtcgagtttacgttattgtattttagtttgggcggtagagtgagatttagttttaaaaaaaaaaaaaaaaaaaaaagttttgataagttaaataaataaggatttgggaattttaaaggatattatagttataaaagttaatataaagttgaataaatgtaaaatgagatgataaatagataatcgtagttttaaaaaagtgtaattttttatttttaataaaaaaaatgtaagtaattatgtttttatttttttgaatttttaggtatgttttgggttttagaatttatggttgttttttatatattttttatatagtattttattatttttaggatatattttaaaagatatatgtaatagaatttttataaaaataaaaggttatttaaataatattatagaaaaataaatttggtatgtgttgattaagtgttgtttaagttatatattttttatgtagtttgtaagtttttcgtaaaattatattttttgttttttggtattgtatgttgtttattttatataagttattgatgtttttagtattttttagtaaattatatttttttttatttatttttgagggaaagatttgataggagaaaataaaatttttttttaaaattaattttgttaaatattttttttttatttgtttttgaaatttagattgttaaaatattgaaatattttatattagagtttatttgtttggtaggaaaaatattatattaggtttttggttaaaagagaattatttttttttttgggaagtttagaggaaatttatattttatagattgttatatattttttatggaagaaaattatcgtattttttattagtatttattttaatttgaagtttaattttttatttcgttgatagtattattaatgtaaaaatagtatatatggaaatacgaatggttttaataagtatgtatatttggtatgaaattttatttttttatttgtaaattaagtgtggaggattaaattttatttattattttaagttggattaagaggtgtgatggatataaaggagtagataatggttagttagttgtgcgtttttttgattgtatgattaattttaatatttaatttttattaataggatgtttttttagattgatttgatatagatatatatgaaaatttaaaagttaaatattatttttaataaatataaggaaaatttttgataataatcgtaacggatttttttttttgggtttataaaattattttttgtattttttttatattatttaatagttttaatagtatttaaaattagttgtaataatgtattattttgttaattttttattttatttgttatttttttaatttaaagtgaaaatttagaaaatgagaattatttaaatggtaaataaatttattttattttaattttaataagttt

SEQ ID NO: 109 - DNA, 6167 bp, Artificial Sequence
  chemically treated genomic DNA (Homo sapiens)
tattatgatttgaaattattttttttatttgtataattgtttatttttgtttattttattaaatggtattttttatgagagtaaagttttattgtagaatttttaagatttagtattgtatttaatatatatagtgggtaataaatttttttaaaagaatgaatgttttatttaattttattttttgttattttttaagaggaaatttttttattttagtttatttcgtttttttttagttttattttttttagatagattatatatgggcgtttttggttaatttatttttaagtttggtttgaaatagttttttatttttttattataaagtttgggtttttttacgtttttttttttttaaaatttttttattgtttttgatcgttttttagttttttggaatttttttttttttttattttttatgttttttagtgttattgagttttgttggttaatagggttgttttttttttattttttatttttttgtaatatagaatttaggtttttttttatttagttgtaagatttttagaggtaaaggtttatgttatggattttatttttaaattttgattgtagttagtttttagggaagtttttattgttgttgataatgggtgtttaattggttaggttgtgagtgagagaaattaattgaggatgttttattttatttaataaaaaaggaatttattggtttgtataattaaaaagtttaggttgagtttagggattttttgtacgtttgttttttttttttgtatgttttttttttttgattttttttgtattggttttatttttaggtaggttttttaggtttgtgggcgaaacggtttttaggtttatattttattggtttagtattattagggaaagggaattttttttttttaagagttttggaaaaagtgatttttattggtttggtttgggttatgtgtttattttgatttaattattatagttagggaaatgaattatttttaggttaggttatttttgggtggatggttaggtttagggaatatatttatttatagatgtagagtaggggttatttgtttttaattatatggattagggtggttttttaaaggaaattgttggttggggaatagtaataaaaagaaaggggaattgatgttggttatgtaaaataaaagatgtagacgtagattatgagaattttttatgttgagttttagtaagaatttgataaatacgttaggtgagttgtataggataattatcggggaattggtttgttttggttggggtagaggatgtttttttttagtttgggcggttttttagtgatagtataagaattttaggtcgatattttggtttagtgttgttattcgtaagttcgggaagattgtgatgtagttggtttagggtaaaagttgttttttttagatttttataggcgattttgttgtatagttaaggttgaaaaatgttgttttagtaaacgttttattgtagtaagatgggtttagattaatttttagggattacgttttttgtgataggattggtatgtttttttttatttgtatagttttttagaaaagggttattggagtttttttggaggttgaggatgggtgggtgaattgtggatgattttatggatttaaagtttttgaaaagaataatagttattgtttgttgaatgttaattgtaaggtaggtattgtgtgttgggatttgatatatggtagttcgtataagttttagtttttataataatatttttatgtgggtattattattattatttatttatttgagatagagtttcgttttgtcgtttaggtttgagtgtagtgttgtgatttcggtttattgtaagttttatttttcgggtttacgttatttttttgttttagttttcggagtagttgggattataggtggttattattacgttcggttaatttttttgtatttttagtagagatggggttttatcgtgttagttaggatggtttcgattttttgattttatgattcgtttgtttcggttttttaaagtgttgggattataggtatgagttattgtgttcggttttatgtgggtattattaatattagttttattttatagttgaagaaagtgagatataaaaagtatggttggttgggtacggtggtttacgtttgtaatattagtattttgggaggttaaggtaggtggattatttgagattaggagtttaagattaggttagttaatatggtgaaatttggtttttattaaaaatataaaaattagttaggtgtggtggggtgtatttgtggttttagttattagggaggttgaggtaggaaaatagtttgaatttaggaggcggaggtcgtagtgagttaaaattgttttattgtattttagtttgggtgatatagggagattttgttttaaaaaaagtaaaaataaataagtaaataaaaagtttggttggttgggtgttgtggtttatatttggaattttagtattttgggaggtcgaagtgggtgaatcgtttgagtttaagagtttaagattagtttgggtaatatagcgaaatttttttttacgaaaatataaaaaaaaaaaaaaaaaaaaaaaaagtaaaagttaggcgtggtggtaggtatttgtagtttaagttattcgagaggaggaggttggaggattatttgagtttgggaggcggaggttgtagtgagttcgcgttattgtattttaatttgggtgttagcgtgagatttcgttttagaaagaataaaaatattaaaaaaaaaatttggttaaggtattttattagggagtggtaaaatggatatttagatataaggttatttgcgttgtaatagtttggtttttttgtttttgcggtaggagttttttgagaggcgtattatttttgttttaatggataattcggtagatagtgggagtgagttttttatttttttagcggatttgagacggtaggtttcgagacgagggagttttggtttattaagttggtttttataagaaaatatgtttggaggggggatagttatagagggattaagtttaagaaagttatatttttatttatttaatttttttgatttcgatttttagaggttgttggggtttatagaggtttttatttttttttttttttttcggtgtcgttaagtattttttttttttatattttttttttgttttttttttaaatttagaaaaaatagtattttttttggatttagagttagagtaggaggagtttttttttttcggaatttttgttttttttggggtgagtaattgattgcgtcgtgggggcggggagggtttttttgttcgcgttcggttttagggagatttgcgggaatcgttttttttcgttattatttattttttgtttttttttttttttcgttttggttaggttcggggtgaggagtgttatttcggagtttgggcgtttcggtagtgacggttttttagggattgtagggggagttcgggttgtagcgtttgtttagttcgtgtttattgcgtcgaaggttttttcggtttggtttcgcgtttagcgtcgtattcgggaggaggagcgaggaggcggcggaagagttcgcgcggtcggagttcggggttgggagtggagagggaatttttagggggtagtatcgagtcgttaagtcggtttttttttcgcgtttagttcggggtttttagatagtttatagggaagtttttttttcggattttcgtagtgtgggtcggttttttatttggattggataaaggggggaaagtgattttttattataaggattattattttttggtgagaataagaattaggttttttttggggtaattagtttttttatttcggttttttaaaggtgggttttttgtcggcggggattagggaatagtttttcggtttcgggggagtataggggattttaggtattagtagttttattttatcgataggtggtagaggtaaggtagtttattgttatatagtgttttaagaattaagtggtcgtgattttttatttttaattttttagcgatattcggaaagatatcgtgttatagatcgaggttcggggttaaggttaaggtttcgttttttttgggcggtttttgtttaggcgggtttagtcgtttttttttcgtattttcggttcgtttttacggtttttgaggtgggcgggcgggttttggatgatagcgatagaatttcggttcgattcgttttcgttttcgttttgggtttgggtttttttagtttagtttacgtttaggagtcgtttgagtagtcgcgcgtttagcgttatacgttacgagtttttttcgtttgggcgttttcggatttcgcgagcgttcgggttttcggtttggaattagggaggagggagggagcgagggagtaattagttgcgattcggaaatgttatataaggagtaggaaggatttttcgtcggaataatttttatttgggtagtattttatttggagtggttcgatatggttcggtcgttttcggttttgggaggagggaagaaggcggagggaggggtaacgcgggaatttcggagttgcgcgggtttcggaggtttcggcggcggttagagttttaggttttttcgaagtttgggcgtttgggatgcgggcgcgggcgcgggttttagggtgtaggatggaggtgtcgggcgttgtcggatggggggttttacgttatttcgggttttttcggtcggttttgttatattagggttttttgttttttatatatggttatgtacgttacgacggaggcggattcgtgtcgttttagattttttaaatagaggcggattcggggagtcgcgagagattttagcgcgtagaatttggggagtcgtcgtcgttattcgtcgtcgtagttagttttcgtcgtcgtaggatcggtttttgttttagttttcgtagtcgcggcgcgtttacgttcgttcgcgtttagggcgagtcggggtcgtcgtttgtacgttttttagtgtttttcgcgtttcgtatgtaattcggttaggttttcgtaattgtgttttttgtagttttagtttcgggttgtattttttcgtttcgatattagttttttagtttgttcgtttaggatggtcgcggttaaggtcgagatgtagttgatgttttcgttgtagatttttgattcgttcggattttttttttattcgtttattatggataattattttaagttggaggagatgatgttgttgagtaacggggttttttagtttttcggcgtcgtcggggttttagagggtagcggtagtaatagtagtagtagtagtagcgggggcggtggaggcggcgggggcggtagtaatagtagtagtagtagtagtatttttaatttttaggcggatacgggcgagtagttttacgagtatttgatcgtaggtaagtagtggtttacgtcgagggggaattttttcgttattattttggcgttttgttttttatcgtaggagtgtttttggattttagaatgagagtcgggttttttttttatttttcgtatttttagagttatgtgttagagggatgttaaggaattttatatagtttattttttgtttttatttttagcggagcgtagaggatcgagtttttgttttggatggagagttttggagttgcgtgggtgggtggagggggagggtttgttttgatgagcggggttgcgttttttatttttagtaagatttgttttgttttgtttgtcgtttgtttttaaggaaggatcgtgatttttggtcgtggatgtttcggtagttcgggtttgggggcgcgtattagtcgcggttatgggggtgttggcgggaatttttcgttcgtatagtcgtcgttgcggagcgttgcgagttgtagtggagggggatttttcgtatttgcgttagttgttgttgaaatgggttttgttattggtgcgggtttaggaatattgtaatgtgttgttattaattattaattatttcgggagttaatggtagtcggttcggttttttgtttggtagttcgggtcgttttcgttttttagtgattgttttttagtaattaggtttttcgttttttttttttttgttaga

SEQ ID NO: 110 - DNA, 6167 bp, Artificial Sequence
  chemically treated genomic DNA (Homo sapiens)
tttggtaggagagagagaagcgggaggtttggttattggaaagtaattattggaggacgaggacgattcgagttgttaggtaagagatcgggtcggttattattgattttcgaggtagttaataattgatagtagtatattgtaatgtttttggattcgtattagtggtagagtttattttaataatagttgacgtaaatacggagaatttttttttattgtagttcgtagcgtttcgtagcggcggttgtgcgggcgagggattttcgttagtatttttatggtcgcggttagtgcgcgtttttaaattcgggttgtcgggatatttacggttaaggattacggtttttttttggggataggcggtaagtaaggtaaggtaagttttattggaggtggggggcgtagtttcgtttattaaaataagttttttttttttatttatttacgtagttttagagttttttatttaaaataaaagttcggttttttgcgtttcgttagggatgagggtagggggtgggttgtgtggggttttttggtatttttttaatatatgattttggggatgcgaggaatgaaagggaaattcggtttttattttaagatttaggagtatttttgcggtgaaggataggacgttaggatggtggcgaaagggttttttttcggcgtaggttattgtttatttgcggttaggtgttcgtagggttgttcgttcgtgttcgtttgagggttgaaggtgttgttgttgttgttgttgttgttgtcgttttcgtcgtttttatcgttttcgttgttgttgttgttgttgttgttgtcgttgttttttggggtttcggcggcgtcgaggaattggggagtttcgttgtttagtagtattattttttttagtttagggtagttgtttatggtgggcgagtgaggaaaggattcgaacgggttagagatttgtagcggggatattagttgtatttcggttttggtcgcggttattttggacgagtaggttggagagttggtgtcggggcggggggatgtagttcggggttggagttgtaggggatatagttgcgggggtttggtcgggttatatgcggggcgcggggaatattgagaagcgtgtaggcggcgatttcgattcgttttgggcgcgggcgggcgtggacgcgtcgcggttgcggaggttggggtaggggtcggttttgcggcggcggaagttggttgcggcggcggatggcggcggcggttttttaagttttgcgcgttgggatttttcgcgatttttcggattcgtttttatttgaagggtttggaacggtacgggttcgttttcgtcgtgacgtatatggttatatatgggaagtaggaagttttaatatggtaggatcggtcgggaggattcggagtgacgtgaagttttttattcgatagcgttcggtatttttattttgtattttagggttcgcgttcgcgttcgtattttaggcgtttaggtttcggggaagtttagagttttagtcgtcgtcggggttttcgggattcgcgtagtttcggagttttcgcgttgttttttttttcgtttttttttttttttttagagtcggaagcggtcgggttatatcgggttattttaaataaggtgttgtttaaataagggttgtttcggcgggggattttttttgttttttatatggtattttcgggtcgtagttggttgttttttcgtttttttttttttttttggttttaagtcgggagttcgagcgttcgcgggattcggggacgtttaggcggggagggttcgtggcgtgtggcgttgggcgcgcggttgtttaggcggtttttaggcgtgaattaggttggggaagtttagatttagagcgggggcgagggcgagtcgggtcggggttttatcgttgttatttagggttcgttcgtttattttagggatcgtgagagcgaatcgggagtgcgggggaggagcggttgggttcgtttgggtaggggtcgtttaggagaggcggggttttgattttgatttcgggtttcgatttatggtacggtgttttttcgggtgtcgttgggaaattgaggataggaagttacggttatttggtttttgggatattgtatagtagtgagttgttttgtttttgttatttgtcggtgggatggggttgttggtgtttggggttttttgtgttttttcggaatcgaaaggttgttttttagttttcgtcggtaaagagtttatttttgggggatcgaagtggggaagttgattgttttaagagaggtttgatttttgtttttattaggagataatggtttttgtggtgaggggttatttttttttttttatttagtttaggtggagggtcggtttatattgcgggaattcgaaagaggggtttttttatgggttatttggggatttcgggttgggcgcgaagagaggatcggtttggcggttcggtgttgttttttggaggttttttttttatttttagtttcggatttcggtcgcgcgggttttttcgtcgttttttcgttttttttttcggatgcggcgttgggcgcggagttaggtcgggggagttttcgacgtagtgagtacgaattgagtaggcgttgtagttcgggttttttttgtagtttttggggagtcgttattgtcgaggcgtttagatttcgggataatattttttatttcgagtttggttaaggcgagggggagaaggaagtagggggtgggtggtggcgagggagaacgattttcgtaggtttttttggggtcgaacgcgaatagggaagtttttttcgtttttacgacgtagttagttgtttattttaaagggaatagggatttcgggaagggaaggttttttttgttttagttttgaatttagaggaggtgttgttttttttggatttaaaaagaaagtagaaagagaatgtggggaaggagggtgtttgacgatatcgagagggaagggaggaggtgagggtttttgtgaattttaatagtttttggaggtcggggttagggggattaggtgggtgagggtgtaatttttttggatttaatttttttgtggttgttttttttttaaatatgtttttttataaaaattaatttaatgaattaggattttttcgtttcggagtttgtcgttttaagttcgttggggaggtggggggtttatttttattgtttatcgagttgtttattggggtaggagtgatgcgttttttagaggatttttgtcgtaagggtaggaaggttaggttgttgtagcgtagatggttttgtgtttgaatgtttattttgttattttttggtagggtattttagttaaattttttttttaatgtttttattttttttgagacggggttttacgttggtatttaggttggagtgtagtggcgcgagtttattgtaattttcgttttttaggtttaagtgattttttagtttttttttttcgagtagtttggattataggtgtttgttattacgtttggtttttattttttttttttttttttttttttttgtattttcgtagagaggggtttcgttgtgttgtttaggttggttttgaatttttgagtttaagcgatttatttatttcggttttttaaagtgttgggattttaggtgtgagttatagtatttagttagttaagttttttgtttatttgtttgtttttgttttttttaagatagagtttttttgtgttatttaggttggagtgtaatggggtaattttggtttattgcgattttcgttttttgggtttaagttatttttttgttttagtttttttagtagttgggattataggtgtattttattatatttggttaatttttgtatttttagtagagattaggttttattatgttggttagtttgattttgaatttttgattttaggtgatttatttgttttggttttttaaagtgttggtattataggcgtgagttatcgtgtttagttagttatgttttttgtgttttattttttttaattgtaaaatggggttaatgttaataatatttatatggggtcgggtatagtggtttatgtttgtaattttagtattttgggaggtcgaggtaggcggattatgagattaggagatcgagattattttggttaatacggtgaaattttatttttattaaaaatataaaaaaattagtcgggcgtggtggtggttatttgtagttttagttatttcggaggttgaggtaggagagtggcgtgaattcgggaggtggagtttgtagtgagtcgagattataatattgtatttaagtttgggcgatagagcgagattttgttttaaataaataaataatagtaataatatttatatgggagtattgttgtgaggattgaaatttatgcgggttgttatatgttaagttttaatatatagtatttgttttgtaattggtatttaataaatagtggttattgttttttttagaggttttggatttatagagttatttatagtttatttatttatttttagtttttaagaaaattttagtgatttttttttggaaagttgtgtagatggggaaaaatatattaattttattataggggacgtaatttttaagagttgatttgaatttattttgttgtagtagagcgtttattagagtagtattttttaattttgattgtgtagtagaatcgtttgtggaagtttgaaaaagatagtttttattttggattagttgtattataattttttcgagtttgcgagtggtagtattgagttaaggtatcggtttgggatttttgtgttgttattggagagtcgtttagattgggagagaatattttttgttttagttagggtaaattagtttttcgatgattattttgtgtaatttatttaacgtatttgttaggtttttgttgaagtttagtatgggaaatttttatagtttacgtttatattttttgttttgtatgattaatattaatttttttttttttttattattattttttagttagtagttttttttggggagttattttaatttatgtggttgggggtagatagtttttattttatatttataagtaggtatgttttttgggtttggttatttatttaggggtggtttagtttaggagtggtttatttttttagttgtagtgattgagttaggatgggtatatgatttaaattaggttaatgagaattattttttttagaatttttgggaaagggaaattttttttttttgatggtattaagttaataggatgtaagtttggaggtcgtttcgtttataggtttggagagtttgtttgagaatgaagttaatgtaggggaagttagagagaagagatatatagaagagagagataaacgtatagaaggtttttggatttagtttgagttttttagttatgtaggttaatgaattttttttttattgaataaaataaaatatttttagttagttttttttatttataatttaattagttgaatatttattattaataataataaaaatttttttgaggattaattgtagttaaggtttgggaataagatttatggtataggtttttgtttttaaggattttatagttgggtagaagagagtttggattttatgttataagagaataaagaatagaaaggaagtagttttgttagttagtaaaatttagtgatattaagggatataggagataagagaagggagagattttaggaggttgggagacggttagggataatgaagagattttggaggagaaggaacgtgagaaggtttaaattttgtggtggggaagtgagaagttgttttaggttaggtttgggggtgggttggttaggagcgtttatgtgtggtttgtttggggaaaatgaggttggaaggggacgaaatgggttagagtagagagatttttttttgggaagtagtagaaggtaaagttaaataaaatatttatttttttgaaaaggtttattgtttattgtgtgtattgggtgtagtgttgagttttagagattttgtagtgaggttttgtttttatggaaaatattatttagtgggatagatagaaataaatagttatgtaaataaaaaggataattttagattatggtg

SEQ ID NO: 111 - DNA, 9830 bp, Artificial Sequence
  chemically treated genomic DNA (Homo sapiens)
tgtgtatggtggtgtgtgtttgtaattttagtaattagggaagttgaggtaggagaattttttgaattcgggaggtggaggttgtagtgagtcgaggttgcgttattgtattttagtttcggtgatagagtaagatttcgtttaaaaaaaaaggaaatgaatggaggaaattaatttagaatgttattattaaatgtgagtatttaaggttaagtatagtggtttacgtttgtaattttagtattttaggaggtcgaggagggcggattatgaggttaggagtttaagattagtttgattaatatggtgaaattttgtttttattaaaaatataaaaattagttaggtgtggtggcgtgtatttgtaattttagatatttaggaggttgaggtaggagaattatttgaattcgggaggtggaggttgtagtgagttgagattgcgttattgtattttagtttgggggatagagtaagattttgttttaaaaaaaaaaaaaaaaaaaaaattagtatttattgagtagaatgtgtggggaattgttttatttgttgttggatttatattttgtttttgagggatttatagtttagttgagaagatagtttagaggttttgaaaaataaaaaagagtttagttggttgagagtagggtgttggtaggtatgtagtatggaggtttttggggttttagggggggtttgatttttgggggttttatttaagaggtagtaattagattgattttaaagattttagttgcggagagttggtatattttaggacggggtattgttttttaggtttagtggaatttagaggtaatggttgaggtaggtatttatgagagtgcgcgttggatttagtttgtttgggttagaatgttagttttaaattttatttttaaatttgtttttttgtaaaatgtgggtaggagtagtggttatttttttgaaggtgttatgagaattaagtggattagtatagataagtgtttagaattgggttcggtatatagtagtgttttataagtattggttatagtttttttttttgtttttttttttttaaaaaaattttgttttgaaatagggttttatttggttgtttaggttggagtgtagtggtgtaattacggtttattgtagttttgattttttaggtttaagtaattttttttttttagtcgttcgagtagttgaggttacgggtgtttattattatgtttagttaattttttttttttttttttttgtagagatggggttttattgtattgtttaggtcgtattattttttttttgatgtttttggttaaaggtaggtatagattaaaggtggggtaagtgaggttatggttttagtatttatttttgttatttttttgtttttagtatttagttttagttaagttttagtaaaggtgggtttttaagtaggttggtgggtcggaggtagggattggtaggagaggtagttatatataaatatatatttattcgggttttatttgtttgtataggagttttgtttgttgtagtggcgttgaggttttgagggttttttggggtttttatggggtaattttatttttattagggttgattatgttattataaatatcgcgttttggtgtcgttttataagatttattgaagaatttttttttttagtatttagttatttagagcgggaaagattttgagtcggataggaaaagagggaagggtgtgttattaaatgggtgattaaaagttagggaaaagttaggtggaatatttttttgttattatttgatatattatttttttttataggtttttgtttacgttatatgttgtagatgagtaatattttgttttatgtttttagtttttaatttgtgtatatattgttgggtatacgttttatagttattagggtttgtttgtatttttgtcgtgtgtgtgtttggatttaattttttgaggttatatatggaaatttatatttgttattagaaggattaattaatattatatatagagatttttacgtaatatagaattcgtaatattgttatttatttattagtttatttatttagcggaggtttgttgaatatttagtatgtattaggtattgtttgttttttttttttgtttttggttttcgttttgttatttaggttggagtgtagtgtcgcggtttcggtttattgtaatttttattttttgggtttaagcgatttttttgtttttaattcgagtagttgggattacgggtatgcgttattacgttcggttaatttttgtatttttagtagagacggggttttattatgatgataagtttggttttaaatttttgattttaagtgatttatttgtttcggttttttaaagtgttgggattataggcgtgagttatcgcgtttggtttaggtattgtttgttttttataaatatttttgtttttttgtagtgtgttttttagtgatatatttgatagatggagtttgtaagtggtatgtaatatatatgtataagtagtggtttttatataatttatatggagttttatatacgttagtgtttttagtttagaggttttaatataatatgtaaaatatttatttaaattacgtattatatatatgtttatatttatttatatattttatgtgtttgtttatagagttttgggtataatatatgttttgttttttacggatgtggttttttgttgttgaatcgtatgtaatttagtaatagttgagattttatgcgtgttttttgtagttttggtttttgtggtttatatgtatgattttatttgatttttatagtaatttttttaaataggttttatatttttttaggagtaaattgaggtttagaaaagtgaaataatttgtttagaaatttatgggttgattttatatttattgtgaagtatggtatatttataaatatatgtatatataaatttatatttatatgtatttatatataaattttttatatttatatgtatatttatatatatatttagatatatttatataatttataaaaatatatatagatatatatttatatttaaatttttttatgtttatgtatatatatttatatatatatatattaatatttttttttttttttttttgagatagagttttgttggtttaagttggagtgtagtgagtggcgtaatttcggtttattgtaatttttgtttttggggtttaagtgatttttttgttttagtttttttagtagatgggattataggtgagtggtattacgtttagttaatttttttgtatttttaggagagacggggttttattatgttggttaggtatgtttggagtttttgattttaaatgatttgtttgtttcggttttttaaagtgttggaattataggtttgagttattttgtttagttatatataatatttatgtttatatatatatttatatatagttatatatatattaatatttttatgtttatatatacgaatgtatatttaataaaattttatatttttatatatatgtatttatttttataggtatttgtatatttataggtttttagaggattaaggttttttttttatttttttggttaaaggttttaattatttttaacgtttgtaattaattttttttttttttttgtaggagagatgtttggattcgttttttaagagtaggtattaaggcgagaggttaagatgtttatattcggtagagaagatttacgtatttgggtagtaggtttcgggtattaaagcgaggatggggttagagaggaagaggtaggtaaagggagtttggggttttttaggaaattaggtttgttatagttgttttttttggattggttaaatggtgattggttaataggtagtcgtgggtggttgggtaggcgggttagagtaaatttttcgtttgttttatttatattagtcgtttttgttaggaagggagatgagtttatgtttgaggaagttttgtgaagaggttttattaaggggtaggtggtaggtaggtgttttttaaattgttaaataaaatttattaatttatgttagggtcgggggttaggggtgttttttgtttttttttttaaaaagaagtagtggtttaagtagagattattaggatttaaattttgtttttattattcgtgagttgtgtattttttgggtatgttgtttttgtttttggagttttagtttttttttttgtaatatggggatgatgatttttgttttttagatgagaattattaataaataagatagtgtatgtttgatttatttttagaggaaatgaatttatttttagattatagtaggtttataggtttttgaatagagatattttttttgattattagtagtttgatatattttttaagggttttaggaaggagggtatttaggtttatttttgggttatttttttaggtttgttgtttaggaggtaattgtttattggatttttaatttattttagtttagatttttaggttagcgttgagtttagtcgtattgagtttagttttagaggtgaagggtagaatgggtatggtttagcgtaaaattattaaacgtttttatcgaggatattaggtttagagatttttgggggttaattcgtaggggcgttggcgttttgagacgtttaaattttggaaggtttgcggggagttcgcgagtttagagggttttaaggtttttttttaaattttttcggattttttttttttttttttcgggtgttagttcggtttttttaaagatatttttgagggcgggcgttggtgacgttacgtagggtatgaatgaataggagtcggtttttatttaatttttattaaggattcggggtaggaggggtagaagttgcgcgtaggtcggcgggcgggagcggatatcgaggtcggcgtgtaggcgtgcgggtgtgcgggagtcgggttcggggggatcggatcgagagcgagaagcgcggtatggagttttaggtagttcgcgtttgtttcgttttgttgtggggttgtgcgttggtcgcggtcgcggcggcgtagggtaaggaaggtgagtgcgcgcggcgtttggatttttggttttcgggttttagtgttttttagagttcggcgttttttgacgcgcgtaattttggaatttatttggtgtcgtttagtttcggcgaattggagttcggagggcgtacgggttgcgatcgaggcgagttttggtttttattcggggttataggggtttcggagaataagcggttttagtttggtcgtacgggtttcggaggttgcggagaagaggacgcggcgtaggttacgcggttgtagtttaggcggcgatttcgggaacgcgtttcggcggggggcgtggggagttttttagagaagggggtgtttgggtagtttttcgcgggtttagttttttagtgatttgaatttattaattcgtttgtcgaggttttgcggagaaggtatattgtgtaggtttcgtattttggggagggggttcgggcgggcgggagttttttgtcgaagtttttgttttttgagattttttttacgtttttttttatttttagtttcgggggagagcgtggagataggttcgggttaatttttgtttatatattttttttttttttttttaagtcgtattttcgggttttcggggtaggttaggggtcgcgagtgcggacggggtttttaggtcgagtcgcgtcgagtgaggggtcgtagattttgtttatggcgtagcgggtgcgtggtgggggtgttgttttttcgttagggttagggcgaggatgggggtttttgttttggtcgaagatttttttgtttatttagtttaggttagttttaatttttaatagtgagggtaaggtttttttttttgtttgggtagagcgaggttttcgtaggttttataagggggaagtcgggaggaaatttgggtcggtgagaagttttttttttttttttttttttttttttttttgagacggagtttcgtatttgttgtttagattggagtgtaatggcgtaatttcggtttattgtaatttttgtttttcgggtttaagttatttttttgttttaagtttttttagtagttgggattataggtgttcgttattaggcgcgtttaatttttgtattttttagtggagacgaggttttattatgttggttaggttgattttgaatttttgattttaggtgatttattcgtcgcggttttttaaagtgttgcgattataggtatgagttattattttcggtttgtttttttttttttttgttttttaaattgggtttggaggttttgttgttttgtgttgggaggaaaagaggtcggatttggagtcgttgggtagtggtaggtgttgggggtggtattttgttttagtttttggagtgatagggttcgggttggggttttaatcgggatttttggttgtaggagtttatggtaaggatttttgttatttttaatattcgttttattaacgtttggttttttttttttttgggggattgtggttggagagaaggggagagatagttggaattattataggttttttttttcggttgtttatgggggggtgggggattaggcgggtgttttgttgttgtagtttttaagttggtttggaagtttggagttgttttgtttttgttttttgtgtttatttttttttagtttgtgtgattaaattttatttttatattttatgggatgtagggggaaaggtttgtgtattgtattggggtgggggtatatttttgtttcgattttgagttttcgtgaaagagtttttagagaagtgtgtttaggtgggggtgggtatgatggtttagttggtagttgttggttttagtttttgggaattaggttgtatgtggtgggtttgtttgggggtggtttagggggtaggtaggaggatataggtgttttttttatttatttttaggttgttttagattttttttttgtttttttatttttaggttatatttggttgtttacgtggtttttgttaggttattaatagttattgaatttgtttttatttttataaatggggaaattgagggaggttcgagtttttgttaattagggttttttggatagaggattagatttgagtatttcgttttttggttgttagagttaaggttttgtttgttttgtggttggtgttatggtagatttttttgggaagtaggtatagttgggtaggggtttgggcgggtggtagggggtgttgagttggggtgttgttgatgggaagagggttggagagtgttaggaagtttttggtttttggttttatcggggttaagtttgttttttgttttttttttttttttttttatgttttttttagagtttttatttttttgttttttttagggattagttagttttggttagagaggaatgggggaagcggggagggaattatagtttcggaggttgcggagaaggatcggagatcgggagtgggtggtagttttgtatttgtggaagaagttgtggagtaatgtggatttataaagatggtatttacggtggaatttatggtaaagaaggaggtgttttttgttttttttttttttttttagaaatgggaaggtaaggggatagagagtttatggataagttttgtttagtttaagtttttttaggaagtcgtttgggttagtcgaggggtttttaggtttttattttttttagagaagcgggagtttttgtttttggaagaatttggggaaagagtcgcgttcgcgttagggcggagggatttagcgttgggcgttttttgtttttggtggttggttcgagggaatttttttgggaggggtttcggggttggaaatttttgtaggggggggtttttttttgtgtgagggttttttttttttttcgattgagttttgtgttatttttagagttaggtttaggttggaaagggagggttttttatgttaggttaattttttagaagtttggtagcggtgagtttttttatttgggtatagattttagttttttgttaatttaagggggggttgtaggattgtgaggaatttttgtttttttatttatttagttgaaattaggagtttttagatttttttttgtgtagttggaatattttatttgttagtggggttagtgagttttaaagtttcggttttgggtatgtttgaataaatttttgtttttgtttatttcgttgtttttagttatttttttttatttttatagtttttgttatggggtcggtgttatattggatttttttttgtttgtttgggttgtttgattttttttagagaggtttggtttcggttagtagtgggggtggtagtattttacgttttagtttgggggtttttagtttaggtaggagggttatgttattttaggaggcggtttttaagattatttttagagtttagtttttatttttataaattaggttatttttgtttttagtttgtttggagttttgtttattttttgagttttttttcggttttggttttgaggaatggggtttttgaggtagattttttatgttttagggtttaaaggaagtattgatttggtttttttatttttattttagggttttattttttgaatttattttgtataggttttatgtttcggttttttttatttttttattttttagggagggtagtatttattggtagttatttggattttatttggaaatagagtggggatagtatttagggttttaggttttgtttatggtttttgagtttggtagagaatttggggtggattagtgggaggtgtttaatggtaggattaggtttagggaagatttcgggagtgtattttttcgttaggttttagttgtttttttgggaataggatggttttgatatttggtttttgggtttagaatgttttttataagggtttttatttttgattttttaggaatttttggtatttttggtagggtagtggttaggatgtgaggggtaggggtggtgggagtgatttttttagggaggggattttattagttgtgtgtatttttgggttttttttaggggttttatgggtttagggttttattttgtttgttttgtggtttttgtggtgagaagatcggtttttagatattttttttttttttttattttggagttgtttttatttgtttatagtattttttttttggagtatcgtaagatgtacgtgtatatataggtgtatatgtgtgtgttatatgatttgagtggggttggtgtgttttttgttggggggaatgtggtagaagtagatattagtgtttttaaggtttatatgtacgtgaagtgttgttaaagggttttgtttaaggaagtagagggggcggtgtggtgttatttaatattttgtttagtttagttttttgtttagttgttgtttttttgtcgggttgagttttttggtttgttttgtttagttggggattaacggagggggataggatggttggaattttggtttgggagattggaggtttagttttgattttagtttgttgtgtgtttttagttgggttttattttttttttgggtttgttttttttatgagtcgagggatgatttttttggatatggtgattttgtgtggtggggtttttttcgttttgtttgagagttggggtttttggagggatttttattttttttgttatggtttgatttttgaagatatttttaggtttattttttttttttttttttttttagt

SEQ ID NO: 112 - DNA, 9830 bp, Artificial Sequence
  chemically treated genomic DNA (Homo sapiens)
attgaaagggagaagggagagggggtgagtttgggggtgtttttaggagttagattatggtaggaaaggtgaggatttttttaggaattttaatttttagatagagcgagagggattttattatatagggttattatatttaagaaaattatttttcgatttatgagggaaataggtttagaaaaaggatggaatttagttgaaggtatatagtaggttggggttaggattgggtttttagttttttaggttaggattttagttattttgttttttttcgttagtttttagttgggtagagtaggttagggagtttagttcggtaggagaatagtagttgggtagagagttgggttgagtagggtattaagtgatattatatcgttttttttgtttttttgaataaggttttttggtagtattttacgtgtatgtgggttttagggatattggtgtttgtttttgttatattttttttagtaggaaatatattaattttatttaggttatgtagtatatatatatgtatttatatgtatacgtgtattttgcggtattttaagaagagagtgttgtgaataggtgggaatagttttagggtggaggagggaagagggtatttggaaatcgatttttttattataaaagttatagagtaggtaggataaagttttggatttatagggtttttaagaggggtttaaagatatatatagttggtgaggttttttttttgggaaagttatttttattatttttgttttttatattttgattattgttttgttaggggtgttagaggtttttgggggattaggaataaaagtttttgtaggggatattttaggtttagagattaggtgttaggattattttgtttttagagaggtaattggagtttggcggagggatatattttcggggttttttttagatttagttttgttattgggtattttttattgatttattttaggttttttgttaggtttagaggttatagataaaatttaagattttaggtattgtttttattttatttttaagtaaagtttaggtagttgttaataagtgttattttttttagagggtaaggagataggagaaatcggggtatagaatttatgtaagatggatttagagggtaaagttttaaggtgggggtaaagaaattaagttaatgttttttttgggttttggagtatgagggatttgttttagaagttttattttttaaggttaggatcggagaaggatttaaagggtggatagagttttaggtaggttgggagtagggatggtttggtttgtggagatgggagttgggttttgagggtggttttgaagatcgttttttgaagtgatatggtttttttatttgggttgaaggtttttaggttggggcgtgaaatgttgttatttttattattgatcggggttaaatttttttaggaagggttaggtagtttagataggtaagaggaaatttaatgtgatatcggttttatgatagaggttgtggggataggggagggtggttgggggtagcggggtgggtaggggtagggatttgtttagatatgtttagggtcggggttttgaaatttattaattttattagtaaatggaatgttttagttatataggaaggaatttggaggtttttgattttagttgggtgggtagaaggataaaggttttttatagttttgtagtttttttttagattgataggaggttgaggtttgtgtttaagtgagagggtttatcgttattaggtttttgaagggttaatttggtatggagggttttttttttttagtttaggtttggttttagaagtagtatagggtttaatcggagaagaaaagaagtttttatataggaaggagtttttttttgtaggggtttttaatttcggagttttttttagggaaattttttcgaattaattattaggaataggaggcgtttagcgttgggttttttcgttttgacgcgggcgcggttttttttttaggtttttttagggatagaggttttcgtttttttggaaagggtgggagtttgggagtttttcggttgatttagacggttttttggagaggtttaggttaagtagggtttatttatgagttttttatttttttatttttttatttttggggggaaaaaaaaaaagtaaaaaatatttttttttttgttatgagttttatcgtaagtgttatttttgtgggtttatattgttttatagttttttttataaatgtaggattgttatttattttcggttttcggttttttttcgtagttttcgaggttgtggtttttttttcgttttttttatttttttttaattaagattagttaatttttaaaggaagtagggaggtggggattttggggaaaatatgaaagaaaagggaaaggggatagagggtagatttggtttcggtagaattagaaattaaggattttttggtattttttagttttttttttattagtagtattttagtttagtattttttgttattcgtttaggtttttgtttagttatgtttgttttttaggaaaatttattatgatattaattataaagtaggtagggttttggttttggtagttaagaagcgggatgtttaggtttggttttttgtttagaaggttttggttggtaagggttcgggttttttttagtttttttatttgtaaaaatgagggtagatttagtggttgttgatgatttaataggagttacgtgggtaattaagtatagtttaggggtgagggggtaagaaagaagtttgaagtagtttgggggtaggtgaaaaaggtatttgtgtttttttgtttgttttttaagttatttttaggtagatttattatatatagtttgatttttaggaattgaaattagtagttgttagttaggttattatgtttatttttatttaggtatatttttttagggatttttttacggggatttagagtcgaagtaaaaatgtatttttattttagtgtaatatataagtttttttttttgtattttatggggtgtgggggtggggtttaattatataggttggggagaggtggatataggggataaggataaggtagttttaggtttttaggttagtttggggattgtagtagtaaagtattcgtttaattttttatttttttatgggtagtcgaggagaaaggtttatagtgattttagttgtttttttttttttttttaattatagttttttaggaagggggaggattaaacgttggtggggcggatattgagggtggtagaaatttttgttatgagtttttgtaattagaagtttcggttgagattttaattcgggttttgttattttagagattgagataggatgttatttttaatatttgttattgtttaacggttttagattcggttttttttttttttaatatagaatagtaaaatttttaaatttagtttgggaggtagaaaaagaaggaaataggtcgggggtggtggtttatgtttgtaatcgtagtattttgggaggtcgcggcgggtggattatttgaggttaggagtttagaattagtttggttaatatggtgaaatttcgtttttattaaaagatgtaaaaattagacgcgtttggtggcgggtatttgtaattttagttattagggaggtttgagataggagaatagtttgaattcgggaggtagaggttgtagtgagtcgagattgcgttattgtattttagtttgggtaataagtgcgaaatttcgttttaaaaaaaaaaaaaaaaaaaaaaaggaaggaaattttttatcggtttaagttttttttcggttttttttttgtggagtttgcggaaatttcgttttgtttaggtaggaggggaagttttgtttttattgttggaaattgaagttggtttgggttgggtggataggaaggttttcggttagggtaggagtttttattttcgttttgattttagcggagggataatatttttattacgtattcgttgcgttatgagtaaagtttgcggttttttattcggcgcggttcgatttgggaatttcgttcgtattcgcggtttttaatttgtttcgggagttcgggagtgcggtttgggaaggagggaaaggagtgtgtgagtagggattggttcgaatttatttttacgttttttttcgggattggaggtgaaggggggcgtggagaaaattttagggaataggggtttcgatagggggttttcgttcgttcgagttttttttttaaaatgcgaggtttgtatagtatgtttttttcgtaaaatttcggtaagcgggttagtgaatttaggttattaagaagttgagttcgcggaaagttgtttaaatatttttttttttaggggattttttacgtttttcgtcgggacgcgttttcgaagtcgtcgtttggattgtaatcgcgtggtttgcgtcgcgttttttttttcgtagttttcgaggttcgtgcgattaagttgaaatcgtttatttttcggagtttttatgatttcgggtgggggttagggttcgtttcgatcgtagttcgtgcgtttttcggattttagttcgtcgggattgggcgatattaggtaggttttaaagttgcgcgcgttaaggagcgtcgggttttagggggtattggggttcgggggttaggggtttagacgtcgcgcgtatttattttttttgttttgcgtcgtcgcggtcgcggttagcgtatagttttatagtagggcgaagtaggcgcgggttgtttggagttttatgtcgcgtttttcgttttcggttcgattttttcgagttcggttttcgtatattcgtacgtttgtacgtcggtttcggtgttcgttttcgttcgtcggtttgcgcgtaatttttgttttttttgtttcgagtttttaatggaagttgggtgagaatcgatttttgtttatttatgttttgcgtgacgttattaacgttcgtttttaggaatgtttttaaaggggtcgggttggtattcggaggagagggaggggaagttcggaggggtttggaggaggattttggggttttttggattcgcgggtttttcgtaggttttttaaagtttgagcgttttaaagcgttagcgtttttacggattagtttttagggatttttgagtttggtattttcggtggaaacgtttaatggttttgcgttgagttatatttattttgttttttatttttgagattgagtttaatgcgattgagtttaacgttggtttgaaggtttgagttgaaatggattgggggtttaataagtagttgttttttaagtagtaggtttgagagagtggtttagaaatagatttggatgtttttttttttaaaatttttgaagagtatattaagttgttgatggttaaaaagagtatttttgtttagaagtttataagtttattatgatttgagaataggtttattttttttgggaatggattagatatgtattattttatttattaataatttttatttgggaggtaggggttattatttttatgttatagaagaggagattgaggttttaagagtagaaataatatgtttaaagggtgtatagtttacgggtagtagaagtaggatttgaattttggtggtttttgtttgaattattgtttttttttggggaagggggtaaggggtatttttggttttcgattttggtatgggttgataggttttgtttgatagtttggaggatatttgtttattatttgttttttgataaggtttttttataaaatttttttagatatgagtttatttttttttttgatagaagcggttagtgtgagtgaaataaacgggaaatttgttttggttcgtttgtttagttatttacggttgtttgttggttaattattatttgattagtttaggaagagtaattgtggtaggtttgattttttgggaggttttagattttttttgtttatttttttttttttgattttattttcgttttgatgttcgggatttgttatttaggtacgtgggttttttttgtcggatgtggatattttggtttttcgttttggtgtttatttttgggaagcgggtttagatattttttttgtaggaagagaggaagggttaattataggcgttggggataattaaagtttttgattaagaggatgggaggagagttttggttttttgagagtttgtgagtgtgtaagtgtttgtgagaataagtgtatgtgtatgagggtgtgagattttgttgaatgtgtattcgtgtgtatagatatgagagtgttgatgtatgtatgattgtgtgtgagtgtgtgtatggatataagtgttgtatgtgattgggtagggtggtttaggtttgtaattttagtattttgggaggtcgaggtaggtagattatttgaggttaggagttttagatatgtttggttaatatggtgaaatttcgttttttttaaaaatataaaaaaattagttgggcgtggtgttatttatttgtaattttatttattaaggaggttaaggtaggagaattatttgaattttagaggtagagattgtagtgagtcgagattgcgttatttattgtattttagtttgggttagtaagattttgttttaaaaaaaaaaagaaaaaagtgttggtatatgtgtgtataagtgtgtgtgtatgggtatgagaggatttgggtatgagtgtgtgtttgtgtgtgtttttgtggattgtgtggatgtgtttagatgtgtgtatgagtgtgtatgtgggtgtgagagatttgtgtatgagtgtatgtgagtgtggatttgtgtatgtatgtatttgtgagtgtgttatattttatagtagatgtggagttagtttatgagtttttgaataagttattttatttttttgagttttagtttgtttttggaaagatgtaaagtttatttaggagagttattgtaaagattaaataaagttatgtatgtaaattataggggttaggattatagaaagtacgtatgaaattttagttgttattgggttatatgcggtttagtaataggaagttatattcgtggagagtagggtatgtgttgtgtttagggttttgtggataggtatatggggtgtgtggatgagtgtgagtatgtgtgtagtacgtggtttggataagtgttttgtatgttgtattggagtttttgggttagggatattggcgtgtgtaagattttatgtgagttgtgtggaagttattgtttgtatatgtgtgttatatgttatttgtaggttttatttgttagatgtgttattagaggatatattgtaggaggatagggatgtttgtagaaaatagatagtgtttgggttaggcgcggtggtttacgtttgtaattttagtattttgggaggtcgaggtagatagattatttgaggttaggagtttgagattaagtttgttattatggtgaaatttcgtttttattaaaaatataaaaattagtcgggcgtggtggcgtatgttcgtaattttagttgttcgagttggaggtaggaaagtcgtttgaatttaggaggtggaggttgtagtgagtcgagatcgcggtattgtattttagtttgggtgatagagcgagagttaaaaataaaaaaagaaaatagatagtgtttgatatatattagatatttagtaagttttcgttgaatgaatgaattaatgagtgaatgatagtgttgcgagttttgtgttgcgtgaaagtttttgtgtgtagtgttggttggtttttttggtggtaagtgtgggtttttatgtgtggttttaaaaggttgaatttaagtatatatacggtaggggtgtaggtaggttttgatggttgtggggcgtgtgtttagtagtatgtgtataagttgggggttgagagtatagggtagggtgttgtttatttgtagtatgtgacgtgaatagaggtttatggaaaggagtggtatgttaggtggtggtaagagggtgttttatttggtttttttttggtttttagttatttatttaatgatatatttttttttttttttttgttcgatttagagtttttttcgttttaggtgattgggtgttaaggaggaaagttttttagtgagttttataaagcggtattaaaacgcggtatttatagtgatataattagttttaatggagatggaattattttataaaggttttaaggagtttttagggttttagcgttattgtagtagataaggtttttgtataggtaggtggagttcgagtgagtgtgtgtttgtgtgtgattgttttttttgttaatttttgttttcggtttattagtttgtttaggggtttatttttgttaggatttagttggggttgggtattgggggtaaggagatgataaaggtgaatgttgaagttatggttttatttattttatttttgatttgtgtttgtttttggttaagagtattagaaaaaaaataatgcggtttgggtaatatagtgagattttatttttataaaagaaaaaagaaaaaaaattagttgggtatggtggtgagtattcgtggttttagttattcgggcggttgaggaaggaggattgtttgagtttaggaggttaaggttgtaatgagtcgtgattgtattattgtattttagtttaggtaattaagtgagattttgttttaaaataaaatttttttaaaaaaagaaaagtaaagaaaaaaattgtagttaatatttatgaagtattattatgtgtcgggtttagttttaggtatttatttgtattgatttatttagtttttatgatatttttagggaggtggttattgtttttgtttatattttgtagaagagtaaatttggaagtaaaatttggagttggtattttggtttagataggttagatttagcgcgtatttttatgggtatttgttttaattattgtttttgaattttattgaatttggagagtagtgtttcgttttggaatgtgttaatttttcgtagttgggatttttaaggttagtttaattattattttttgggtgaaatttttagggattaggttttttttagagttttaggggtttttatgttatatgtttattagtattttgtttttaattaattgaatttttttttgttttttaaagtttttgaattatttttttaattagattgtaaattttttagaggtagggtatgaatttagtaataggtagaatagttttttatatattttgtttaatagatgttaattttttttttttttttttttttgagatagagttttgttttgttttttaggttggagtgtagtggcgtaattttagtttattgtaatttttatttttcgggtttaagtgatttttttgttttagttttttgagtatttgggattataggtgtacgttattatatttggttaatttttgtatttttagtagagatagggttttattatgttggttaggttggttttgaatttttgattttatgattcgtttttttcggttttttaaagtgttgggattataggcgtaagttattgtgtttggttttagatgtttatatttgatggtgatattttaaattagttttttttatttattttttttttttttagacggagttttgttttgttatcgaggttggaatgtagtggcgtaatttcggtttattgtaatttttatttttcgggtttaagggatttttttgttttagtttttttagttgttgggattataggtatatattattatgtata

SEQ ID NO: 113 - DNA, 9760 bp, Artificial Sequence
  chemically treated genomic DNA (Homo sapiens)
gaatgtttatagttttataattttataattagggggtattattttcgtatttttttttttaaaatagaaattttaaattattattatatatagaaatttattattttttagatttttttttagatttttttgagattagttaggtaagttttgatagaattttatttttagtattaattacggtagaagattaggatgaggtgtggtgtttaaaatattttttagtttagaaagttttttgggaattttagaggatttttaaaaattttggattgttaagttttagagtatgttttattttagtttggttttgttttttgggtaaaagattaagataagtgggaatagattaaggaagagagtatttgaggttattttggaaatttaaaatttttcgggttagttaaaaaaataaaaataaaaattggagtaagtttttttatagtataatttattttttaatgtgtttttgagtttatttatttaatttggtttttatggattaaaataggttataggatattttataaatttttatgaaggtattttgtagtttggtataggtatcgagagaaaaagaaatttaaaagtaattaatgagataaatattatatatttataatatatatgtatatatatatgtataaatatatatatatataattttataattaatttatttttattttgtatagggtggatttgattgtttaggatatttagaggttttgttgttttttggtggtcgttgaattattatagattttgatatttaaaaattttttgggtgaagagtttaaaaattataatatgagaaattatggaagtatgtagaagtaatttgaataatttaagttagtttattttattaattttggtgatttatggtaaaatgaattggaagtaatggaagaaaagagtttttttatgtaaaattaagtttgaaaaaaaaaaaatttattaagagtatcgaatatgtgttatttgattttaggtataaagtgttatatttttttagttatattttgttattttaatattatttaaaaaaagagtaatttgattgaatattttttaatattttaggtgattagaaaattttagtggtattttagtaataatatttaagtggatttataatttagatataaattatatttttatttgttaaattgtttgaaattaatttggaaattgtatttaaagaattataattgtaattttttgaattttatttatttgattttataaaagtgtgtgaaattttataaaggtataaaataaatttttgatttatggtttgatttttgatttttgattttttatatttttagttaaatttgagtttagaaaaatttatgaattaatatgtttttaatgagtttaggttatgtatattttttatattagattgtaaataaatattttatatatattatataaattatgttaatgtaaatatgtaaatgatttttttatatagtggaaagattgtttatattttgattgaaattatagaatttaattttttgtaatatttgttaattaagatataatgttttttttttgtttataattaattttttttgtatagtattttttttaatttagtttaaattattttttttttgtgatgaatttgtatttttatatttgttagttgtgaatgtattttgatgataagtataaaagtagtgggtttagaaatagttttttgattttattgttgttaattatttagtttgatagttttggatttgtaatatattgaaatttttaattgtttttttgttttcgaatggtttgaatattagatatatatagtataatttttttttttatttgaaaatttatagaatttattttttgaagttattataatttatttttattttttttttaaaattagagaatattttttagagttaaatagtgaggtaaatattagtattgtaataagttaaaataaaatagtaggtgtatttttatttagaatgtgttttgaatttggatatttttttatatgtatagttatgtgattattggtaattatataaataaataatataaaatgtattaaaattgggtatatttttttagtatttgaagagaggcgttttttatttttttattatatatttattatagatgttgtaatagaggggatataaaattgaaatattaaggttttagtttttgtttttatttatttaaaatttattaaatatatgtggacgacgttattaatttagttgtataatgaatgtataaaaatgtaaaattagtttttagaattattgttttggcgtataggtgttggttttatatattatttggtattgtttaggaagataagttttttttgaatttattttatatataaatatatcgtattattaaaaataattgattagaaataatatgtttaaattataaaatgaagttaaaataaattgtaatggtgtgaggaagtttattattatgttattttaaaatgagaaagttttgtatattgataatttttatgttagtggttttatgtataaataggtttatatgttttattattagttaaatatagtcgagtgtaaatttatatattaattatatattgtatgttgaatattgtttttttgattgttatttatttttatttaaatgtttcgaattttttgttaatatatttagatattataaaagaaagaagagaagtttgaaaaatttaaaaattagtattattgtgtagttatgtagggagaattgttagtagtttggtatatgtgtatttaatgtgaagttttttgtttttaaaaataagagtaaagttatatatgtttttgtgtttgatagagagaagggatataaaaagaggatttattatattatttatatttattagaggagtgaaggatgttatttttttggttttttggttttaatggaaaagtatttgtatttatattattgagtattagttatttaatagatgaaaggaatattttaaattttaaaggttattttggtgttattttaagaagtggggatgagattttggggaaagtgttgaaattttggagaattcgttttaattattagaagtggtttaatatttgtaagtttgtagttttgtgagttttaaagattaagtgtagggatttatgtttttaatttttatgttttagtttataagttttatttttaaattatttatttgtgtaaataaagttttattttttttataataagtgtgttttttttatatttttttttgtttttttttaaggttaatttattacgtatttatattttttatgtattttttaagggatattgaagatgttttttgatatattttttaaaatattaaataggtataatggttaggaatatgtaatattgaagaaatgttttagaaattatagaattaaagaggtttaaagaataaattttatattttttttttatgttattttattaggtaaataaaaattataggagataatttaatataaaatataaataaatatttgggggttgttattttagagaattttttattataaaaagtagaaataatttaatttattttatatttttagatagaaaggttggaaaaagtttggagttttatgtgagattaaattttggatttatcggaaataaaaggaaattataaatgattgagaaatatttttaaaggaagaaattataggataaaaaaagaaatttattttaaatatgtgattaagttattttgtgtgatttttgaaattgaagatttggtaattaaaattttaaagtttttttttttattatttattttttgaatataaagtgttcgaaattgtttaatggaaaatagatttttttacgtagttttttttgtcgttcgggttgaatgaatttaattggagatattggttatgattttttttatttttagtttttttttgaaagataagtattgaataatttttgaaaatggtaaatatttgcgaagagaaaggttttgttttatgaatttaatacgtagtggtattttttaaaatttagtgtaatttatgtagcgaaatggaaaattattaaagtggaggtaatttaaggaaaattttagaaaatgataaacgcgtaaaaaaacgatacgtaattattagaaggtttttttttaatgttttatttcgtttaataaattatggtgaaaagatagggcggaggagaaggggcgtttaaaataaaagatttttttttttattttttttttttttgttttttttgttagagtttgttgtaaatttttggaaatattgtttaaatataatatatttggttattttatttttttagggattgtggtgggtggtatttaaaattgacggtttttggagtaatagaaaaagagaagtagaaattttttaaaaaggtaaaaaataaagttatttagttcgcggaggttttaataataaaaaagtaaaatatattttatttaaaggtatagtttattttattgttcgggtttcgtgtttggtagttgagagaaggtttgtttcgtttttggtttttaaaagatcgcgcggagtatagttatagaaaagagtgtaagttgggagcgttattttcggatttattttgttacgcgaaagttgcggttgttaaaagtagagcgtttaaagtagtatatatttcggttattattttcgtttttttttgaatatttagcgcgagtttagaatttggagggaattttggattagtaatttgatttcgttcggtatcgattggtttttgtttcggatttcgttttcgtggtcggggcggttatttcgtcgggattcgttttttggttttgggaatcgttttttggtaggtcggttgtgtttgttatttagttcgagtggcggaggtttttagttcggagtttcgttttttttttttttaattgatattattggagtgtggagtaagcggtcggtttgtagtcggagatttgtaggtagtaaatacggtgcgagcgaataggagtgggggggaaattaaaaaaagttaaacgtggagtagtcgatcggggatcgagaaggggaatcgatgtaaggagtataataaaataaaagttatttcggaataaatagtatttaaaaatttacgatttaagataattgaaatttaaaataaaatttgtttatgtattatggttttttaaattcggtattttttatggattattttatgttatatttggttgtttcgttttgtatatataggggaggcgtaggttgcgaaggaaggtaaggtgatgggaaagtaaagtttgttttgatttatttatttagatgtttatttgtataagttagttcgttcgcggcgttgtcggtcgcgttttcggcgtcgggcgattttttttcgtcggtttttcgtttttttatcgttgaggtcgtttttggcggattagcgagcgcgaattagggttgtttcgagtcgtttatagttttgtgttcggagtcgtttattcgacgggtgcgggatttttggcgcgggtagtttggagggcgtgagtagtaacgggggtggggtggggttggaggaattgtcggcgagtttattttttagtattttaggcgggttatatttttttttagttcggttttttttgtttttttattcgttttttgtgggagttgcggttagagttgggttggagattgggaaatgtagtttttatcgttttcgttagttcgtcggcgagtggcgggagttcggagtttttttagagggatcgagatttcgatgagttcggaaagttcgggttattaatgaagtgtttattgcgtcggaggcggcggcgcggttttgcggttggcgttcggtcgttagtacggaataataacgtcgcggaggtgaagcgcggcgtgcggcgcgcgattcgagggtcggggatgtttttatttagcgcgcgttgcgcgtcgggtttagcggttatgggggtagcggtagtttagcgggtttggtcgggtcgtggaggtagggggcgggttggagttgtgtaatttgtaaggatgtcgtttgggcgatttaaagtttttaattatttgttttatagtgtagtaattgaggaattcgagtgtttaatttttgttaaagatttgaattttgagggttggttttggtaggagaaggtaggttttatttggtaagttgttatagatacgtttgtatatggttatgttttttttttttgaatttttgatagaaggtaaaatatttttcggtgtttgtagttggagttggggaaaaataaattttgttaatggaagttttttgtttttgagtagtgttataattttatttttaattttttttatttcgtcgtttttttggttttttaggttgtgtatttaagttttatttttcgatttgttaaaagtagaagagaaataattatttatttttgatgtgtagagggagaggaatttgttatgaaatttaggttatggtggttatcgggcggggtgttgaggggatttatatataggtttttgatttatttatttttgaaaatttagtgtattttttttttatttttatcgtgtattttttttagttcgtttaagttttttttaaattcggcgttaaattttagttttttttttagtttgattttttgattttattttttatatttgtaatttgtatagatgttgaatttatttagagaatttcgtgtttttaagttggcggttacgcgtttgtagaaggacggatatttgttagaaacgtacgtttattttttttaaaattatatttttatttttttgacgttagcgattagaaatttttagttttggtatattgtgatttttttggaatagcggattagaggaaaagtttgtatcgtcgcggcgaaatttcgcgcgcgaatatacgtagattcgggttggagtttgggttataaataattgtattattagggggagaggtttttgtagttagaatgtttagttttttttgtttttttgggtgtaagttacgtgaagaggattttgattttaagagtttgaattttttagatgtagaagtgtgatgtataaaaggcgcgggggtgatgggagggagggtggtgatttgtggttggcgggcggcgagtgcgttcggtttttaggcggcgacgtttttagggcgtagcggcgattaagagttggcgttttaggagtttataagtttcgaggcggttcgtagtatttaagggttagcgttgggaatcgtttgaagtaggtgtcgggttttttggggtatttgggggtggttagaggaagataagaaattttttttttttattttttttgtgtacgttttttcgggttggttagttattatcgttatagggagcgcgtgttagagtttgacgtttgaaggtaaagtgtagttgtttatttttttttttcgtaaatgtcgtcgtcgtcgtcgttttttttttagaggagatgtttttcgaaagttattttttttttttcgaaagttattttttttttttcgattttttttcgagcgagggcgttatcggttttttggagtgtttaggtttggtagaggcgtaatggatgtttggcgcggttggcgcgttcgtttggtagttttcgtttcgttttttcgacggtttcgttttagtttcgggacgttagtttttgttcgcgcggtcgttgtttgggtttgttagggcgcgtttttagtttagttttttttttattatttgttggtttataggatttcggggcgcggagttttggagttttaggtttggtttttagcgttcgggtgagtcgagggattgcgttttcgcgggcgtaaagggaggtcggtattttgtttcgagcgggaagggatacgcgtttttttgagggtttaattagagagcggatcgagtagaagagagacgtacggattatttgagagcggttttcgattaaacgttttcgggtcgggttttgttttgttttaatttgttagtttgttttttttttaatttggttattattgttgtttgtttaggttttttgtttttatttttaggttgagttgaggggtagtagaatggtaataaatagtaatttcgtaatgtttattttatttttagaaatgatttaagaaggttatttgtatttaaaattttgttgtttatatttagtatataagaaaaataaaataaaaattaagaaagtattttaaaaagagtagagtatttgattatttattttgtttttttgtgttttatgtttgttgttgaggataaaaataaattttaaaaattattttttatataaattcgttagtttaacgatttatcgatgttataagttgaaatttaaattggtattttgaaagtgttgtgggtgtgttttttatttgaaagggagttaaatgtttttgattaagttttttttttttttgttagtttttttgagagttttaagtgtaaaatattaaataaagaaataataataataataaaataaaaattttgggtttttatatttatttttatttatagtgagtaattttgattagtgtgaaggaattaaatatataattaattgtttttttaaatagataattagttgtttttttgtttttttattataatatatttttgttttttaaatatatattttatttttagtgattgagttgtataattattaaaagtttatataagtatgtattttaagtaaaaattttaatatttttttgaggttgatgttaagtttattgatatatttaaaatttatttattattatttttggataaattgatgtatttgttaaaatggtgtagagttagataaatatttttaaagtgtaaaaatttatgtaattttgaaattagtttgattaaaagagtgagtgttttagaagagtaattgtttaaaaaagaaataaaatatattaaatagaaatattatgtgtattaatatataatattttaatgtatttttatattgatagtattaggagtatttataatattttatatatattttaaattaatcgtattatgttttttgatagtataaaagtgaaatataagtgattagaagttagagttgatattattttgagaattatttattattttgaaaattaagaaattaaaaaaaatgttgaaaaaattgatgtttgattaatttgaataaaattttgtaaataataggtaatttggttttttgataatattgtttaatagtttttaatatttttgtatttattttagtttaacgatattgtatgtggaaagattttttaaaagataaattttaatttttaaaagataatagaaaatattgttggtagaatgttataaattaatgattggattaagagtaatataggaattatattttattatgtttatgttattgtatttgataaatttgaatagtttaatggtttataaaatcgtaatatataattattgtggaattaatgtattatatataaaatttttatttttattttaatattgtattttaagatttaatattgtaattaaagtatattaaatataatattggtgttttaatatttttttttttttaaggaagtggaatatatatgtattaggagggtgtttattttattattgatttatataaataattatagattttaagttatatagtgatagttatatgaaaagatttattttaaaaatgtttatatgtgtgcgtaagtgttttatgtaatatatggaaatataatttttttttttagt

SEQ ID NO: 114 - DNA, 9760 bp, Artificial Sequence
  chemically treated genomic DNA (Homo sapiens)
attgaaaaagaaagttgtatttttatatgttatatgaaatatttacgtatatatgtagatatttttaaggtgaatttttttatataattattattatatgatttaagatttgtagttatttatgtaaattaatggtgaaatgaatatttttttgatatatgtatattttatttttttaaaggaaaaaagatattaagatattaatattatatttggtatgttttaattataatattaaattttaaaatgtaatattagaatgagggtagaaattttatatgtgatatattaattttatagtaattatatattacggttttgtaaattattgagttgtttaaatttgttaaatataataatatgaatataataaggtataatttttatattatttttgatttagttattaatttgtaatattttgttagtagtattttttattgttttttgagaattggagtttattttttaaaaaatttttttatatatagtgtcgttaagttaaaatgaatatagaaatgttaaaaattgttaagtaatgttattagaaaattaaattgtttattatttgtaagattttatttaggttagttaagtattagtttttttagtattttttttaattttttaatttttaaagtgatagataatttttaaaatggtattaattttgatttttaattatttgtattttatttttatgttattaaaaagtataatgcgattaatttaaaatgtatataaagtgttataaatgtttttgatattattagtatgagaatgtattagaatgttatatattaatatatataatatttttatttgatatattttattttttttttggataattatttttttaaagtatttatttttttggttaaattggttttagagttatataagtttttgtattttaaaaatatttatttgattttatattattttgataaatgtattaatttgtttagaaataatagtgaataaattttaagtatgttaataggtttaatattagttttagaaaaatgttaaaatttttatttaaaatatatgtttatatgaatttttaataattatataatttaattattagggataaaatatgtatttgaaagataaaaatgtgttatgataagaaaataaaggaataattgattatttgtttaaaggaatagttgattatgtgtttaatttttttatattagttaaagttatttattgtaaatgaaaatagatatagagatttaggatttttgttttgttgttgttgttgtttttttgtttagtgttttatatttaagatttttagggagattgataggaaaaaaaaaaatttgattagaaatatttgatttttttttaaatgagaaatatatttataatatttttaaaatgttaatttgaattttaatttgtaatatcgataaatcgttggattagcgaatttatataaaaagtaatttttaaagtttatttttatttttaataatagatatgaagtatagggaaataaggtgggtggttaggtattttattttttttgagatgtttttttaatttttattttattttttttgtgtgttgaatatagataataggattttaaatgtaggtgatttttttgggttatttttgagagtgaaataaatattgcgagattattgtttattgttattttgttattttttagtttagtttgggggtggaagtaagggatttaagtagatagtagtgatggttaagttaagagagaaataaattaataaattaaaataaaatagaattcggttcgagaacgtttaatcggaagtcgtttttaagtgattcgtgcgttttttttttgttcggttcgttttttggttaaatttttaaaagagcgcgtattttttttcgttcggagtagagtgtcgatttttttttgcgttcgcggaggcgtagtttttcggtttattcggacgttgggggttaggtttaggattttagggtttcgcgtttcggagttttgtgggttaataggtgatgggagaggggttagattgggggcgcgttttgatagatttaggtaacgatcgcgcgggtaaaggttggcgtttcggggttggggcggggtcgtcggaggggcggggcgggggttgttagacgggcgcgttagtcgcgttaagtatttattacgtttttgttagatttgggtattttagggagtcggtggcgttttcgttcgagaaggagtcgggaagaggagagtggttttcgggaagaggagagtggttttcgggaagtattttttttgaggaagaggcggcggcggcggcggtatttacggagagaaaaagtaagtagttgtattttgtttttaagcgttagattttgatacgcgttttttgtagcgatgataattgattaattcgagagaacgtgtataaggaaagtgagggaagggggttttttatttttttttagttatttttaaatgttttaggaggttcggtatttgttttaagcggtttttagcgttagtttttgggtattgcgggtcgtttcggggtttgtgaatttttagaacgttagtttttggtcgtcgttgcgttttagaggcgtcgtcgtttagaagtcgggcgtattcgtcgttcgttagttatagattattatttttttttttattattttcgcgttttttatatattatatttttgtatttaaagaatttaggtttttagaattagaattttttttacgtagtttgtatttagaagagtaaagagaattagatattttggttgtaggaatttttttttttagtgatgtagttatttatagtttaaattttagttcgagtttgcgtgtgttcgcgcgcggggtttcgtcgcggcggtgtaaattttttttttggttcgttattttagaggaattatagtatgttagggttgaaggtttttgatcgttaacgttaggggagtagaaatgtggttttggaggggatgagcgtgcgtttttagtagatgttcgtttttttgtaaacgcgtaatcgttagtttggaggtacggggttttttgaatgggtttagtatttatataggttgtagatgtggaaagtggggttagaaggttaggttgaaagaaggattagaatttggcgtcgggtttgaggggggtttgagcgaattaagaggagtgtacgatgagaataaagaaaaggtgtattaagtttttagaaatagatgaattaaggatttatatgtaagtttttttaatatttcgttcgataattattatgatttaaattttataatagatttttttttttttatatattaggaataagtaattattttttttttgtttttaatagatcgaaaaatgaaatttagatatatagtttgaaagattaggggggcgacgggatgaggggggttggggatgggattgtgatattgtttaaaagtaagagatttttattgatagggtttatttttttttagttttaattataggtatcgaaaggtattttattttttgttaaaggtttaaagaaggaaaatataattatatataggcgtatttgtaatagtttgttaaataaaatttgtttttttttattagaattaatttttagggtttaggtttttggtaaggattgggtattcggattttttaattgttgtattatggggtaaataattggggattttgagtcgtttaggcggtatttttataaattgtatagttttagttcgttttttgtttttacggttcgattaagttcgttgggttgtcgttgtttttatgatcgttgggttcgacgcgtagcgcgcgttgaatggagatattttcggttttcgggtcgcgcgtcgtacgtcgcgttttattttcgcggcgttattgtttcgtgttggcggtcgagcgttaatcgtaggatcgcgtcgtcgttttcgacgtagtgagtattttattagtaattcgagtttttcgagtttatcgaagtttcggtttttttgggaaggtttcgggttttcgttattcgtcggcgggttggcggagacggtaggggttgtattttttagtttttaatttaattttggtcgtagtttttatagaaggcgaataaggagataaggaagatcgagttagagagagatgtgattcgtttgaggtattaagaaataagttcgtcggtagtttttttaattttattttattttcgttgttgtttacgttttttagattgttcgcgttagaaatttcgtattcgtcggatggacggtttcgggtatagggttgtaggcggttcggaatagttttggttcgcgttcgttggttcgttaggagcggttttagcggtgagggggcggggagtcggcgggggagggtcgttcggcgtcggaggcgcggtcggtagcgtcgcggacgagttggtttgtgtaggtagatatttaaataaataagttagaataaattttgtttttttattattttattttttttcgtagtttgcgttttttttgtgtgtgtaaagcggagtagttagatgtagtataaaataatttatgaagggtatcgagtttgaaaaattatggtgtatgagtaggttttattttaggttttagttattttgagtcgtggatttttaaatgttgtttgtttcgaagtagtttttgttttattgtgttttttgtatcgattttttttttcggttttcgatcggttgttttacgtttagttttttttaattttttttttatttttgttcgttcgtatcgtgtttgttgtttgtaagttttcgattgtagatcggtcgtttgttttatattttaataatattaattagggggggagggggcggggtttcgagttgagagttttcgttattcgggttgagtggtaggtatagtcggtttgttaggaggcgatttttagggttaaggggcgggtttcggcgaaatggtcgtttcggttacgggggcggggttcgaggtaggagttaatcggtgtcgagcggagttaggttgttggtttaggattttttttaggttttgagttcgcgttggatgtttagaggagaacgaggatggtagtcgaggtgtgtgttgttttggacgttttgtttttagtaatcgtagttttcgcgtagtagaataaattcgagaataacgtttttaatttatatttttttttatagttgtatttcgcgcgattttttagaaattagaggcgaagtaagtttttttttagttattaagtacggagttcggatagtgaaatgagttgtgtttttaagtaaagtgtgttttatttttttgttgttagaattttcgcgggttgggtaattttgttttttgtttttttgaaaagtttttatttttttttttttgttattttaagagtcgttagttttaggtattatttattataatttttgaaagaataaagtaattaagtgtattatgtttaaataatgtttttaagagtttgtaataagttttggtaaaagaaatagaggaaaagggagtgggaaaggaagttttttgttttaagcgttttttttttttcgttttgtttttttattatagtttgttgagcgaagtgagatattaggagagaattttttgatggttgcgtatcgtttttttacgcgtttattattttttaaggttttttttggattgtttttattttgatagttttttatttcgttgtataaattatattgaattttaaagaatgttattacgtattaaatttataaagtaagattttttttttcgtaagtatttattatttttaggaattatttaatgtttattttttaaagagaaattaagaataaaaaaagttataattaatatttttagttgaatttatttaattcgaacggtaaggaaggttgcgtagagaaatttgttttttattaggtagtttcggatattttgtatttaagaggtaggtaataagaggaagaattttaaaattttaattgttaaatttttaattttaaaggttatatagagtaatttgattatatgtttaagatgaatttttttttttgttttataatttttttttttaaaaatattttttagttatttatgatttttttttattttcgatagatttaaagtttgattttatataaggttttaaattttttttaatttttttatttggaaatataaagtaaattgagttgtttttgttttttatagtagggagttttttaagatgataatttttagatatttatttgtattttatgttaaattgttttttgtagtttttatttgtttaataaaataatatggaagagagatatgaaatttattttttaaatttttttgattttgtagtttttgaaatatttttttaatgttatatatttttagttattatgtttatttaatattttagaaagtgtattaaaaagtatttttagtgttttttaaaggatgtatagaaaatgtaaatgcgtaatagattaattttagaaagagataaaaaaaaatatggggagaatatatttgttatagaggagatgaagttttatttatataaatagatgatttaaggatgaaatttgtaaattaaaatataagagttaaaaatataaatttttgtatttagtttttagaatttatagaattataaatttataaatattaaattatttttaatagttaaaacgaattttttaggattttaatattttttttagggttttatttttattttttaaaatgatattaaggtggtttttaaagtttaaaatattttttttatttattgaatgattaatatttaatgatgtgaatataaatatttttttattaaaattaggaaattaaagaagtaatattttttatttttttgatgagtgtaggtggtatagtgagttttttttttgtgttttttttttttgttagatataggggtatgtgtaattttatttttatttttagagataagaagttttatattaaatgtatatgtgttaggttgttgatagttttttttgtatagttgtatagtgatattgatttttaggttttttaaatttttttttttttttttgtagtatttagatatattgataaagaattcggagtatttaaataaaaataaatgatagttaagaagatagtgtttagtatatagtatatgattaatatataaatttatattcgattgtatttgattaatgataaagtatatagatttatttgtatatgaagttattgatataaaaattattagtatataaaatttttttattttaaaataatataatggtgaatttttttatattattataatttattttagttttattttatgatttaagtatattatttttaattaattatttttaataatgcgatgtgtttgtatataaagtgaatttaaaaggaatttgtttttttgagtaatattaaatagtgtatgagattaatatttgtgcgttaaagtaataattttgaaaattagttttatatttttatgtatttattgtataattaagttgatagcgtcgtttatatatatttagtgaattttaagtaaatggaaatagagattaagattttaatattttaattttatattttttttgttgtaatatttataataaatgtatagtggaaagatgaaaaacgtttttttttagatattaaggagatatatttaattttaatgtattttgtattatttatttgtataattattaataattatatgattgtatatgtagggaaatgtttaaatttaagatatattttaaatgagggtatatttgttattttgttttaatttgttataatattaatatttattttattgtttaattttgggaaatattttttgattttaagagagaaataggagtaaattataatgattttagggaataagttttatgaatttttaaatgaaagaaaaggttatattgtgtgtgtttagtatttaggttattcgagggtaaagggataattggagattttagtatgttataaatttaagattgttaaattaaatagttaataataatgaaattaaagggttgtttttgaatttattatttttgtatttattattaaaatgtatttatagttggtaaatgtgaaaatgtaagtttattatagaaaaagggtaatttaaattgaattagaaaaggtattgtgtagaagaaattgattataagtagaaaagaagtattatgttttagttaatagatattatagaaaattggattttgtgattttagttaaaatataaataatttttttattgtgtaggaaaattatttatatatttatattaatatgatttatgtagtgtatataaaatatttatttgtagtttaatgtaaaaaatgtgtataatttaaatttattaaaaatatattaatttatgaatttttttaagtttagatttagttgaaagtataggaagttagaggttagaaattaaattataagttaagaatttattttgtgtttttgtaaaattttatatatttttgtgaagttagataaataaagtttagaagattataattataattttttaagtataatttttaagttaattttagatagtttaataaataaaaatataatttatatttaaattatgagtttatttgaatattattgttgaggtattattgaaattttttaattatttaaaatattaaaaagtgtttagttaaattattttttttttaagtaatattaaaataataaaatgtagttaggaaaatgtagtattttatatttgaaattaagtagtatatgttcggtgtttttagtggatttttttttttttaaatttgattttgtatggggaggttttttttttttattatttttagtttattttgttataaattattaggattgataggatgaattggtttaaattatttaaattatttttatatgtttttatggttttttatgttgtaatttttaagttttttatttagaggatttttaggtattaagatttgtgataatttagcgattattagggggtaataggatttttgggtgttttggataattaagtttattttgtataaggtaaagatgagttagttgtgaaattgtatgtgtgtgtatttgtgtatgtatatatatatatatattatgaatatataatatttgttttattgattatttttaagtttttttttttttcggtatttatgttaggttataaaatgtttttataaaaatttgtgagatgttttatgatttattttagtttatagaggttaagttaaatgaataggtttaaaggtatattagaaggtgaattatattatggaaaagtttgttttagtttttgtttttgtttttttaattaattcgaagaattttgagtttttagagtgattttagatatttttttttttagtttgtttttatttattttagttttttatttaaagaatagggttaggttgggatggagtatgttttgggatttaatagtttagagtttttaaggattttttgaagtttttagagaattttttaggttgaggagtattttagatattatattttattttaattttttgtcgtggttaatattaaaaatgaaattttgttaaaatttgtttgattaattttaaaaaggtttaagaagaggtttaaaaaataatgagtttttatgtatggtaataatttggaatttttgttttagagaaagaaatgcgggagtagtgttttttagttgtgaaattgtaaagttgtggatattt

SEQ ID NO: 115 - DNA, 10988 bp, Artificial Sequence
  chemically treated genomic DNA (Homo sapiens)
tgattttaaaaggaatatagttttattaatatttggattttagtttacggaggtttattttcgatttttgatttttggaattgtaagataataattatgtgttgtttttaattattaagattttttttggtattgatagaaaattaatgtaatgtttatgtttattttaaagtaagatagaggagaagaggtcgtgtcggggaatttgattatatcgggaattttaaatttaagtttaggattttttggttaatttttatatttttagtagagatagggttttattatgttggttaggttggttttaaatttttggttttaggtgatttattttttttagttttttaaagcgttgggattataggcgtgagttattacgttttgtttgattgttatgtttgtttttttttcgttattgtttttttttattttaattttttaatatagtttttatatttgtttttaatttattaagaatataaagtgaagattttttttttgaatttttatatttttattttttttttattttgttttagattgttaaaagattttaagtgttgtcgttgttgtttatttattttttatgttgattagttttattttgtcggtggtgttttaagttttgatgggatagatttttagaatttatttgaatgtagagagagacgtatattataagataagagaatatgggaattaggaaatgtgttagttatatttataagtagaaggtagattttatagaaatgtaggttatttttttagtttaggaaatgtaaatgtttttagagagtattatttggaggcgtagttttagaaatagattgtattttattggaagagtcgattaggggattatttgttttatattatagattattttattttttatatgtatttgaatggaaaagatataaattaggaaaggagtaaagaatggtgtggagtgttgattatttttgttttgtatatgaggattgttttgtttaaaattttattaaaatttagaatgtttttaagttttattgtttgtatgggtaattgtaaaggatttgttattttttttttgagattatgttatggttattttagaaagaggatatttttagtatttttttttattttattaattttttggggattatttttgagtattaaatttatgtaaagatagtggtttgggggaaagtattagtaagtatattttataaaaaggagatagagatttttgttgattgtagggaaaaatgtagattatcgtgattattttattttatttgtggtagaggttgttgtttttttggttaatacgtttttttttttttttttttaggtttaatagttttaattttattttgtgtagtatgtattttgtaggttttaagtaggtaggggtggttacgtgatattgttttggttaataatatatatgaagttattgaatggattttttagaaaggttttttgaatagtgttaatttagttggatgtagcgttttaattttgttttttttttttttttgtttgaaatttgtagattttatagttggagttttggttaaaatgttgataatttgagaataagtttttattttaaagttggagttttgttgatttgggatttttatcgtatttttgtgttatttaatttgtttaaattattgttgtataattttgttgttatatatagttgaagttaatttttaattgagagaaaagttatttttttttttttggaggtattaatatttttgaatattttgttattattgtatggttaaagtaatattaaagtgtaggattatgatgggtaaattttaatattattatgaagggtatttattatttttggtttataaattagttgtaatttaggtttgatttttaaataaattagtaatataggagaatttttgaatattttagaagtttttgaatagaaaataataaaagttttagttgtataaatgggtatttaatatttttattggtaaagtgtttggagattagattttagtttttaggaagtgtaattgtatttagaggttataaagttttaagatagtttagtgaagggtttgagttttgtgaggttatgtattgggagttataattaatgttttggaataagagataggggatttagaagatttttttatggttttttattagaatttttattagtgaaattatttgtaaagttttttgtttatgataatattagtttatattagttgttttaaggggaaataaggaagaagaaaattgtatattttaggggagtgagtaaagtttaagaaggaggtaaaaatttagaaaaaatgaggtagaattaatttaggagtttttttattttatttggagttttttatttagtagttttttttggttttaaatttatataatagattgttgtgtgttagaaatgattaattttgtgagttataaattttattaggttttgtttattagtaatattttagggttttttttttgaataagttaaaaaaaaaaaatatatatatatatatatatatatatatatagaaagaaatagggttttattttgtcgtttaggttggagtgtagtaggataattttggtttattgtaattttcgtttttcgggtttaagcgatttttttattttggttttttgagtgtttgggattataggtatgtattattatgtttggttaatttttgtattgtttggtagagatgaggttttattatgttggttaggttgattttaaatttttgattttaagtgatttttttattttagttttttaaagtgttgggattataggtataagttattgtgtttatttatatagaaaaagtttaaatattattttttattgatttattttataatatttttaagtatttggagtgttttaggtattaaataaattatagtaaaaaatttatattaaattttaaaaaggaatttattattttgttttttaatagttgtaggttgtagtatattttaataatgtattttatgttttttatttattattaaaatttggtttgataagatataggtaattaggatgtaaagtcgattaattataaatttaaatttttttgtattttgagtatgatattttttttgaaaattagatgttttttaaattttattaataagataaatataattaattatataagttttgagtagtaaaaattttattttatattatagttatttaatatgaggtatattatgaaatagaaaagaaggtagatatttttattgttatgttaatataggatacgttgtaaattattataggaatttttgggttttataaagtaataattacggtttggttttgtttatatttttattttaatataatttagttatgtgttttttttttaagtttttaatataattatagatgtttagtaattaggtatgttaatgtatgagttacgtaattttatatataatgtaaattttgtttttttgtagaagtttttgaaagttttggagataattagaaaatgaaggaagttttttattattgagttttagggtaaagggaagaaataagataaagtagaatcgttagtataagtggaattattaatgacgtttaaatgtagttattaaatattattagatttatttattgatttttgatattaagagtgaataaatttttggttaagtgggaatttgttcggtagtttttatttttttattatttatttagttaatttattaaagtttgtttgttttttttaggtgatttttattgagttttattgttttgtttattgtgtttgttggtttatagattttttttataatttttttcggtttttgaatgttttttaagtattagttttgattagtttatttgttttaataaataggagagtaagatgggatagggcgatatagggagaaaagggggtaaagggaatcgtatcgggtgtttgtgttttttagaaaaattagtaggtggtagtaatatttcgtggtaaggttttagtttagttttgtaggatttaaataatagattttaaattttcgttttcggttagagaaggggttagaggtgggcggaaatattttttttcgcggcgttttttcggttttttaattttgtttttaggcgttagttgagagtattttgtatcgtttttttttattgtagggaggtttttttcggagcgcgggcgagggaggaggtatttagaggtgtagcgatttgtttaagttatgttagagttaggcgtatagtagcgttttttttttttaattcgattgttttgttttttggggagggtagatggagggaggttcgatttagaagttttaacgttgattaagatttagatacgaaaagagaaaagagttttcggttagtacggcgacgtttttatatcgagacgtttttttttttcgttgtttcggttttttttattatcgttcgtatttttttagattttttagtttgtttttttttttattttttgttttttttttttttttttttgtttagtttacgtttattttagtttaaagttgagtaggagttttattgttttagtttttagagttaaagtcgaagaggagggaggcgcgagggggtgtgtgtagggttttgttttgttttgaattgttacggttcgttagttgcgtttcgtttcgcgggtgttcgatttaagtcgagttcgagttcgagtttaggtaggagttttatagatagttttttttttttttattttttgtaggcgttttacgcgtgcgattttttcggttaagattcgcgggaggaggtcgtttttttttcggcgtataggcggggtttcgggcgcgtttcgcgtttttttcgcgcgtcggggcggaggagcgggcgtcgcgtatttatcgtttaggtcgggagggcgggttcggtttttcggaagaagggagtgggaaggcggttaaaggggttgaaggggcgggtcgggtcggtttgggaggggacgcggagggggcgggtcgggttgcgttcgttttagtcgcggttttatagtagcgggcggcgggattcgggatttagtttggcgacggcgatttcgacgcgggtttttaggatttttcggcgttttatttttggagtagtttttgtcgttagcgttaggtttatttcggaattttagggattttcggcgtcgaacggattcgggtcgggtgtaacggggttttcggattggagaagacgcgggtggtatcgtgcgagttttaggagtttcgggtttattgcgaggtttcggggggcgtagatttgtagagattgcggttaacgggaaggtgagttcgcggggttagtaggcggcgttgtgggggtcggggatagtatgtttggggatagaggaattaaggtttgtaagagtagtggggttttttagtttttaggtggttttttgagggagtattgaggatttttttttaaggttagagtggggtttatgaagggtgaggaaacggttaatttggttattttttttttattttattttgatttggtattattgatatcgtattatttttgttgttaggattttttagttgcgtttttagatatttttttttggttttggtttgggagttttaatttgggagggttttcgtagagacggagttttacgtttggaataggattgttatttttttgattttagtggtattattttaatttttttggagttgggaggagttaggaggttgattatatatttgttttttgttttttataaggtattgttttttttagttttatgattatagttaagttttggaggtggaaggaacgtttggtttttgttgtttagttattatttttaacgtgtaattaaattttattgcgtgtttttgttttagttttattttcgttttgttttttttatttgggtgtttggttttgtttgttttatatttttatttatcgattttggtcgtttggtattttttttttttttatttttgggggagttggtatggatttagtatagtaatgttgtaatgtttttggtagcgtttatggagcggagttgttgggtttgtttttagttaatttaggtttttcgttcgttaggggaatttgattgaggttttaggaggggagatgttggttttgagttgagagattagtgggagggagttgtgtggggttgttagtagattatagaagttgtttaagtaaggggtattggagtattgaggtttttgagtgttgtttagtggggttatttggttttttagagtagtgggtttttttttttaaaggaagattagcgtgggggtgtttatgtatttatttggtggttttagaaggaggatttgtttggagtttattattttatttagggtgtaaaaagatggttggtaatgatattgagttattagaatgttggggagtaataggttggggtgggttgagcgtgggaaaggtaggattttttttttgggacggttgttttgttattattttgttttgagtttgggttttagattttgagtttttattttaggtagaaggaggatggtaggttttggagggtttgggaagttttaggtttttttttttttatttattttttttcgttttttatttggtttttttttttagtttaggtgtttttgtagaagtattttttggggttaagagtaatttatagttagattgggggtagagtaggggtcgaaggtgaggaagaagggtttatggaattatttcggaattagtattgatgtgtattttttgttataggaaagtaatagtttttatttatatagatagtatttgttttcgtttattttattttatatatatttttttatatattttattaggtagatatatatttttaggtattgttgacgtaggtgttatttttggtatttaggggtttttttttataattttttatttatttattttttaggtatatttgttttttgttttaatatttttttttatgtttttttttagagttacgtatgtttttcgttagtgtatagagtggtttattttaagtggttgtttggttagatttagatattgtttgtattttaaaagttttttttagttttatagtttgggagtgggaggtatatttgtttgagttatagtgttttgggggatatttttaggggttggaggtttttagggatataggattgttttttgttaggtaatttataaattggtttttttagttaaggaagtagggattagaagagtcggaggatagttatttttttattgtttgttttggatgtttttatgaagtttgatgatgggattttttttaaggtaggaggttagagtacgaagagatttttaaggtggagattaaaggatagaggttttggtattaaattgagtaaggattatattggaattttttgggtatttaatagttgtggaataggataggggatagggtttgtggtattgattttttttatattgatttgtgtggtttataggtgtaaggattagtttagtaattatattagatataaaatttcgaatcgttttgtttttgggattgttttgtttttgttggattttgtagtttgttttgttttattaaattgtttttgtttgggttcggtttggggttatgttttttattatgtgtttttagtggatagttttttgggtttttttttgtttttttatagttttatttttttgtttgatatcgtcgaagagaagtatgtatgatgttagtagcgggatagttggaattttttgggagataagtttaaagattagttagagataataattattttggtttttttgttggtattattttatttatttatttttagtttttattgtatttttatttttattttttttttatagatgaatattttttgatattttgaaatatagaaggaaaatggtatggggagtgaataaaatgtaaacgtatgtttatttgtttaggttttataaatattttttttttttgtttagattttaattatgagattttacgttaattataaaaataaggtatgtttattgtaataagaaaaataattgaattatgtgtaagataaaattaatgtttttatttataattttttatttttattttttatagtaatttattttaatggtttaatatgttttttgtttatttttttttaagtttatttggtttatattatttaatttttaaaaatttattttgtggattgaggtgtataaattatattaagtaagtttgatttgtttatgaaaatattatatttagtatttaattggagtacgattaattttttaaatttttattaatttattaatttaatttatttttaagttatttttttttttttttttttttttttttttttgagatagtattttgttttgtcgtcgaggttggagtgtagtggtacgatttcggtttattgtaagttttgtttttcgggtttacgttatttttttgttttagtttttttagtagttgggattataggtatacgttattacgtttagttaattttttttttttttttttttgtatttttagtagaaacggggttttatcgtgttagttaggacggtttcgattttttgattttgtgattcgtttattttggttttttaaagtgaaatattttatttttatagtaatataattcgtaagttatgttttgtaatttatgattttataaatttttattttttgttagtttttgaaaataaaatataattttgatatttaagaaatagttttatttttgtaaattaaagagatgtagtaggtttgtggatttattgtttttattgtattaaaaagatattaagtgatatatttataaaagaagttgagaatatattataaagttatagattgtaatttttgttatttaaaattttgtttaattcgtttcgttttttttattattgttttatgtttatatttttgttgtttttggttttatatttttaaaattttatatatatttgaaatgtgaatatttttttaaaggagataagtttttttgtatatttttgtgttagagaatttttaaatattgattagtttgtaagttagaggagagaggatttttaagtaggttgtgagagaggagtaaggggtttggttttgtagaggttgttttttatttttgtggtaggagaaatgtattggtttgtttttgggatgtttttttggattaaatgtagaagatgttttatgtttataattattgaagatatttttgaaaaattaagttttgagttttgtttatttagtattttaggtatgtggagtagtcgtgtttttgttatttatgtttttgtttttgaaattggttttaaaagaatttgtagtggtatgaatttgttgatagtaatttattttatattttaataaagttttttttttttttatttggatttttgtaataggggtatatttatattttttttatatattaaaattaaaagttttgaatttatttggtttgtttgataagtaagaatttatttaattttttagtttgatttagtaataattttttttttttgaaaaaatgtatttataatttttagttatttggatttgaatttaaaagaggtttttattaaatattagaagtatttttttgggtattttaagatttttaattatttttttttaatgaatatttttgtttttagtaaaattttaaaaaattgttgaagtggttatttataggtagtgtttttattttttttttttttttatgttgttttttgatggtagaagttgagtggttttaatatttatgttttataattgtttttgtttttttttggattttttggagggaggttagtttcgtgttgttattacgaggtatgttaaggttatgtaagtacgttttattgtaattataagtgattgtgttttttgtagttcgggttattaaagtaaatattttgttatttattttttagagtgttttatattggatagttgatattatttgtagcgtattttttttattttgtttggttgttttttaaaataatttattgaaatatttttaaaatatttattgttttttttttatgattatttgtttagttgtaagtttgagaagatatagggtttattgttttttttttgtatagattatagaatttatttatgttttgagtgaaagaaagagattattttaaagaataatttttaggtaaatggtaaaatagtttttattgtttaaaaatttgttgttggtattttttttttttgataatagtatttttaaggatttcgtgattttggtttgttttagtgtgttaagtacgtttttaaattaagttattgagagtttggaggggatgtatttataatatgaattattttaggatatttattaaatagttattggtgacggtgttaaggttatagaatttaatagttatgtttgttttttattttatgattttttcgtttttttttaaagtatttattttatttgtgaaggattttagtaatattttagatatttttgtaaagaatattatttaagagtaatttgttatatggaaatgttttttatttgtttttataggttgtaaattgaattttttattttataaatagggttaaagatgtataaaaggtgagttttaggggttagttggtaggtgtttattttatattagtttacgcgtatgtagaaatggtgtatttttatgataattttatggatagtatagttcgtagtgttagaaaaaaattagtaggaattaaattatgatttttatatttgttgtaattaaagttttatagtttgatttttgttttatgatagtttttaataattttaaggttatatatatttaggaaaaataaattataattttttttttaattggttttttttttgttttttttttagttttatgttttttgagtaatttgggtaatatgttttttttttttttttataga

SEQ ID NO: 116 - DNA, 10988 bp, Artificial Sequence
  chemically treated genomic DNA (Homo sapiens)
tttgtgaagaaaaaaaagagatatgttgtttagattgtttaaaagatatagaattgagaggaaaataaaaaaaaagttaattagaagagaagttgtgatttgttttttttggatatatatggttttgggattgttgaaagttattataaaataaaaattaaattatgaaattttaattgtaataaatatgaaaattataatttgatttttattaatttttttttggtattgcgggttgtgttgtttatgaagttattatggaaatatattatttttatatacgcgtgggttgatgtagagtgggtatttgttaattagtttttgaaatttattttttatatatttttaattttatttgtgaaatagagagtttaatttatagtttatggagataagtaaggagtatttttatatggtaaattgtttttaagtaatgttttttgtaaaaatgtttgaaatgttattaggattttttatagatgaaataaatgttttggagaggaacggggagattatgaagtaaaaagtaggtatagttattaaattttgtaattttggtatcgttattagtggttgtttaataaatattttaaagtaatttatgttgtaagtgtattttttttaaatttttaatggtttaatttggagacgtgtttgatatattgaagtaaattagagttacggagtttttagaaatattgttattagggaaagaaaatgttagtagtaggtttttaaataatgaaggttattttattatttgtttagaagttattttttaaaatagttttttttttttatttagaatatggatggattttgtaatttgtataaagaagaaatagtaagttttgtgtttttttaagtttataattaggtaaataattatgaagaaggaataataaatattttggaaatattttaatgaattattttgaaagatagttaagtaagatagaaaagatgcgttgtagatagtattagttgtttaatatggaatattttggaagatgaatagtaagatatttgttttgatgattcgaattataaggaatatagttatttgtggttgtaatagggcgtgtttgtatagttttagtatgtttcgtaatgataatacgaagttggtttttttttagaagatttagaaaagagtaaaagtaattatgaaatatggatgttaaggttatttagtttttgttattaagaaatagtataaagaaaagaagaaaatggagatattgtttgtggatgattattttagtaattttttgaaattttattaagaataaagatatttattaaaaagaaatggttgaggattttaaagtatttagaaggatatttttaatgtttgatgaggattttttttagatttagatttagatgattgaaggttataaatatatttttttagaaaaaaaaaattgttgttgagttagattaggaagttaggtgagtttttatttattaaataaattagataaatttaagatttttaattttaatatataaaaagaatatgggtgtatttttgttgtaggaatttaaataaagaaaaaggaagttttattaagatatggaataaattgttgttagtaaatttatattattgtagatttttttgaagttaattttaaaggtagaaatataagtgataagaatacggttgttttatatgtttggaatgttaagtaagtaggatttagaatttgattttttaaaggtgtttttaatggttgtgggtatggagtattttttgtatttggtttaggagagtattttagggataggttagtatattttttttgttatagagatgggaagtagtttttgtaaagttaggttttttgttttttttttatagtttgtttgagagtttttttttttttgatttataaattggttagtatttagaaattttttaatataagaatgtgtaaaagaatttattttttttagaaaaatatttatattttagatgtgtataaggttttaaaaatataaaattagaagtagtagaaatgtgaatataaaataatggtggagaaaacgagacggattagataaagttttaggtaataaaaattgtagtttatgattttataatatgtttttagttttttttatagatatattatttaatatttttttgatatagtagagataatagatttataagtttgttatatttttttggtttataaaaataagattgttttttaggtattaaggttgtgttttgtttttagaaattggtaaaaagtaaagatttgtagaattataggttataaagtatagtttacgagttatgttgttataaaaatgaaatattttattttgggaggttaaggtgggcggattataagattaggagatcgagatcgttttggttaatacggtgaaatttcgtttttattaaaaatataaaaaaaaaaaaaaaaaaaattagttgggcgtggtggcgtgtgtttgtagttttagttgttggggaggttgaggtaggagaatggcgtgaattcgggaggtagagtttgtagtgagtcgagatcgtgttattgtattttagtttcggcgatagagtaagatgttgttttaaaaaaaaaaaaaaaaaaaaaaaaaaaagaatgatttaaaagtaaattaaattggtaaattggtaagaatttaaaaaattaatcgtgttttaattaaatgttaaatatgatatttttatgagtaaattaagtttatttaatatagtttatgtattttaatttataaagtgaatttttaaagattaaataatgtaagttaaataagtttggaggaaggtaggtagaagatatattaggttattaaaatgggttattgtgggaggtagaaatgaaggattgtaggtgggggtattaattttgttttatatataatttaattattttttttgttatagtaagtatattttatttttataattaacgtaaaattttataattaaaatttaaataaaaaagaaaaatatttgtaaaatttagataaataagtatacgtttatattttatttattttttatgttattttttttttatgttttaaaatattaagaaatgtttatttataagaagaaggtagaggtggaaatatagtaggagttgagaatgaatgagtgaagtaatgttaataagaaaattaaaataattgttatttttggttagtttttaagtttgttttttaagaagttttaattgtttcgttgttgatattatgtatgttttttttcgacgatgttaagtaaagggatgaggttatgaagggatagaggggaatttaggggattgtttattgggaatatatagtaaagggtatggttttaaatcgagtttagataggaataatttagtgagataaagtaggttgtagagtttagtagggatagaatagttttaagggtaaagcggttcgaggttttatgtttggtgtggttgttgggttggtttttatatttgtgagttatataggttagtgtgggaggggttagtattataggttttgttttttattttgttttatagttgttaaatgtttaggaaattttagtataatttttgtttagtttaatgttaaagtttttattttttaatttttattttggagattttttcgtgttttggttttttgttttgagaaggattttattattaggttttatggaggtatttaggatagatagtgaggaggtggttgtttttcggtttttttagtttttgtttttttggttggagaagttaatttgtagattatttagtagaggatagttttgtgtttttggaggtttttagtttttgagaatgttttttagagtattgtgatttagataaatgtgttttttatttttaggttgtggagttgggggaggtttttaagatgtaggtagtgtttaggtttagttagatagttatttagaatgagttattttgtgtattgacgggggatatgcgtggttttggaaaagagtataagggagggtgttaaggtaggaggtaaatgtgtttgagagatgagtaagtggaaggttgtggaagaaagtttttgagtgttaggagtagtatttgcgttagtagtgtttgaggatgtgtgtttatttggtggagtgtgtaagggaatgtgtatgagatgaggtgggcgggagtagatgttgtttgtgtagatgggggttgttgtttttttgtggtagaagatgtatattagtgttggtttcggagtggttttatgggttttttttttttattttcggtttttgttttatttttagtttggttgtgagttgtttttggttttaggaggtatttttgtagaaatatttgggttgggagagggagttaagtggggggcggggaggagtgggtaaagaaagggaaatttgaggttttttaaattttttagaatttgttattttttttttatttagagtgggaatttagggtttagggtttaggtttaggatagagtgatagtagaatagtcgttttagaaggaggattttgttttttttacgtttagtttattttagtttgttgttttttagtattttggtaatttagtgttattgttaattatttttttgtattttgaatggagtaatagattttaaataagttttttttttgaggttattaggtaagtatatagatatttttacgttaatttttttttgagaaaaaaggtttattgttttgaaaagttaagtggttttattgagtagtatttagaagttttaatgttttaatgttttttatttgggtagtttttgtggtttattaatagttttatatagtttttttttattggttttttagtttaggattagtatttttttttttagagttttagttaagtttttttggcgggcggagggtttgggttaattgggaatagatttagtagtttcgttttatgggcgttgttagggatattataatattgttatgttgggtttatgttagtttttttagggatgggaggagagagggtgttagacggttaagatcggtgggtgggggtgtggggtaagtagggttaagtatttagatggagggagtagagcgagggtggagttggggtaggagtacgtaatagaatttggttgtacgttgggggtgatggttgggtagtaggaattaagcgttttttttatttttaaggtttaattgtggttatggagttgggggggatagtgttttgtggggagtaggggataggtgtgtggttagttttttgattttttttagttttaaggggattggagtgatgttattggagttagaggggtggtaattttgttttaagcgtggagtttcgtttttgcgaggatttttttagattaggatttttaagttagagttagaggagaatgtttgggaacgtaattgggggattttaatagtaagggtaatgcggtgttaatgatgttaggttagagtggagtgagaggggagtagttaggttgatcgtttttttattttttatgaattttattttggttttgaggaaggatttttagtatttttttaggaagttatttaggggttggggagttttattatttttgtaaattttaatttttttgtttttaagtatattgttttcgatttttataacgtcgtttgttaatttcgcgggtttattttttcgttggtcgtagtttttgtaggtttgcgtttttcgaggtttcgtagtggattcggggtttttggagttcgtacggtgttattcgcgttttttttagttcggggatttcgttgtattcggttcgggttcgttcggcgtcgagagtttttgggatttcggggtggatttgacgttggcggtaggggttgttttagaggtggggcgtcgggagattttgggggttcgcgtcgagatcgtcgtcgttaagttgggtttcgggtttcgtcgttcgttgttgtagagtcgcggttggagcgaacgtagttcggttcgtttttttcgcgtttttttttaagtcggttcggttcgtttttttagtttttttggtcgtttttttatttttttttttcggggagtcgagttcgttttttcggtttaggcggtgagtgcgcggcgttcgttttttcgtttcggcgcgcgggggagacgcggggcgcgttcggggtttcgtttgtgcgtcgggaagggggcggttttttttcgcgggttttggtcgggaggatcgtacgcgtggggcgtttgtaggaagtgggaagggaagaggttgtttgtaaagtttttgtttgggttcgggttcgggttcggtttgggtcggatattcgcggagcgaagcgtaattggcggatcgtggtagtttagggtagggtagagttttgtatatattttttcgcgtttttttttttttcggttttaattttaggaattaaaatagtggggtttttatttagttttgaattaaggtgggcgtgagttgagtaagagagaaggaaggaaaagtagggggtggagggaaagataaattgagaaatttgggagagtacgggcggtggtagggggagtcgaggtagcgggagaggggggcgtttcggtatgaaagcgtcgtcgtgttagtcgggaattttttttttttttcgtgtttggattttggttaacgttggggtttttgagtcgaatttttttttatttattttttttaaggggtagggtagtcgggttgaaaaggggaagcgttgttgtacgtttggttttgatatggtttgggtaagtcgttgtatttttgggtgttttttttttcgttcgcgtttcggagagaatttttttgtagtgaggaggggcggtgtaaggtgtttttagttggcgtttggaggtagggttgaggaatcgagggggcgtcgcgaggaaaagtgttttcgtttatttttaattttttttttagtcgaggacggggatttggggtttattgtttgggttttatagagttgggttggggttttgttacgaagtgttgttattatttgttggtttttttagggagtataagtattcggtgcgattttttttgtttttttttttttttgtatcgttttgttttattttgtttttttgtttattaaagtaaatgggttgattaaaattggtatttaaagagtatttagaagtcgaagaaaattgtgaaagagatttatgagttaataaatataataaataaaataatgaaatttagtaagagttatttgggagagataaataggttttaatgaattgattgaatgagtgatagaaagataaaggttatcgagtaagtttttatttggttaggggtttgtttatttttaatattaggagttaataaataagtttgatagtatttaatgattgtatttggacgttattaataattttatttgtattgacggttttattttattttgttttttttttttgttttgaaatttagtggtggagggttttttttattttttggttatttttaaggtttttaaagatttttgtaaagaaatagaatttgtattgtgtgtggaattacgtaatttatatattaatatgtttgattgttagatatttatggttatattgaaaatttaaaaaaaagatatataattagattatgttaaaataaaaatatggataaaattaaatcgtagttgttattttataaaatttagaaatttttgtagtaatttgtaacgtattttgtattgatataatagtaaaaatatttgtttttttttttattttatgatatattttatattaggtgattataatatgaaatgaagtttttgttgtttaaggtttgtgtaattagttatatttgttttgttaataaaatttgagaggtatttagtttttaaaggaagtgttatatttaggatgtaaagaggtttaaatttgtgattagtcggttttgtattttaattgtttatgttttattaaattaagttttaatggtaggtggagagtatagaatgtattgttaaagtatgttgtaatttgtagttattaaaaagtaaagtaatgaatttttttttaaagtttaatgtaaattttttgttataatttgtttggtgtttgggatattttaggtgtttagaagtgttatagaatgaattaataaaaaataatatttaaattttttttatgtggatgggtatagtggtttatgtttgtaattttagtattttgggaggttgaggtgagaggattatttgaggttaggagtttgagattagtttggttaatatggtgaaattttatttttattaaataatataaaaattagttaggtatggtgatgtatgtttatagttttagatatttaggaggttaaggtgggagaatcgtttgaattcgggaggcggaggttgtagtgagttaagattgttttattgtattttagtttgggcgatagagtgagattttgtttttttttatatatatatgtgtgtatatatatatatattttttttttttgatttgtttaaaaaaaaaattttggagtattgttaatgggtaggatttaataaagtttatggtttatagaattaattatttttggtatataataatttattatgtaaatttggaattaaaaggaattgttgagtagaaaattttaggtgagataggaaggtttttagattggttttgttttattttttttgagtttttgttttttttttgggttttgtttatttttttaggatgtgtaattttttttttttttatttttttttagaatagttaatgtaagttgatgttgttataaataaagagttttataaataattttattgataagaattttagtaaaaagttataaaggagttttttgagttttttattttttattttaaaatattagttatagtttttaatgtatgattttatagggtttaggttttttattgaattgttttgaggttttgtggtttttaggtgtagttgtattttttaaaagttggagtttagtttttaaatattttattaatggaagtgttaaatgtttatttgtataattaaagtttttattgttttttgtttagaaatttttagaatgtttaaaaatttttttatgttattggtttgtttgaaagttaaatttagattgtaattgatttgtagattaagggtaatggatattttttatggtggtattaaagtttatttattatagttttatattttgatattattttaattatgtaataataataaggtatttagagatattagtgtttttaagagaaagaggatggttttttttttagttaggggttgattttagttatatgtaatagtaaagttgtataatagtggtttaaataaattagataatatagaaatacgatgaaggttttaagttaataagattttaattttaggatgaggatttgtttttagattgttaatattttagttagagttttagttatgaggtttataaattttaggtaagaaaaagaagggaataggattaaaacgttatatttagttgaattagtattgtttaaagaatttttttggaagatttatttagtgattttatatgtattattggttaggatagtgttacgtgattatttttatttgtttgaaatttgtaaaatatatgttgtataaaatgaaattaaagttgttaaatttaagagaggaagaaagaaagcgtgttagttaggggaatagtagtttttgttataaatgaaataaaatgattacggtaatttatatttttttttgtaattaatagagatttttattttttttttataggatatatttgttggtatttttttttagattattgtttttatataggtttaatgtttaaagatggtttttaggaagttagtggagtgaagggaaatgttaggagtgttttttttttaaaataattatgatatgattttaaaagaaaaataataaattttttgtagttatttatataaataataggatttgaaaatattttagattttaataagattttgggtagggtagtttttatatgtagagtagaagtgattaatattttatattattttttgttttttttttggtttgtattttttttatttaggtgtatataggagatgggatgatttatgatgtggagtagatggttttttggtcggtttttttagtagaatgtagtttatttttggagttgcgtttttagatagtgttttttgaaaatatttgtattttttaaattgaaagggtggtttgtatttttatgagatttgttttttatttgtagatgtggttgatatattttttggtttttatatttttttgttttatagtatacgtttttttttatatttaaatggattttgagaatttattttattagaatttaaagtattatcgataaagtggagttagttaatatgaagaatgagtaaatagtaacgatagtatttgagattttttaataatttgaagtaaagtagaaaaggaatgaagatgtaagagtttaaagaaaaagtttttattttatatttttaatgagttaaaagtagatgtggaagttatattaaaaggttgagataaaaagggatagtggcggggggaagataaatataatagttaggtagggcgtggtggtttacgtttgtaattttagcgttttgggaggttgaggagggtggattatttgaagttaggagtttgagattagtttggttaatatggtgaaattttgtttttattaaaaatatgaaaattagttagggaattttaaatttaaatttagaattttcggtataattaaatttttcggtacggtttttttttttttgttttattttgaaataaatataaatattgtattggttttttattaatgttagaaaaaattttagtggttgaaaataatatataattattattttatagttttaaagattagaagtcggaagtggattttcgtgggttaaaatttaggtattgatagggttgtgttttttttggagtta

SEQ ID NO: 117 - DNA, 8649 bp, Artificial Sequence
  chemically treated genomic DNA (Homo sapiens)
atttatttttttattgataatttttgggtgttttttatagagggggatttggtagggttatgggataatagtggagggaaggttagtagataaataagtgaataaaggtttttggtttttttaggtagaggattttgcggtttttcgtagtgtttgtgtttttgattatttgagattggggagtggtgatgatttttaatgagtatgttgtttttaagtatttgtttaataaagtatattttgtatcgtttttaatttatttaattttgagtggatatagtatatgttttagagagtatagggttgggggtaaggttatagattaataggattttaaggtagaagaattttttttagtgtagaataaaatgaaaagttttttatgtttatttttttttatatagatacggtaattattcgattttttaattttttttttatttttttcgtttttttattttataaagtcgttattgttattttggttcgtttttaatgagttgttgggtatattttttagacggggtggtggtcgggtagaggcgttttttattttttagacggggcggttggtcgggcggggggttgatttttttatttttttttcggacggggcggttggtcgggcggggggttgattttttaattttttttttcgacggggcggttggtcgggcggggggttgattttattatttttttttcggacggggcggttgatcgggcgaggggttgatttttttatttttttttcggatggggtggttgtcgggcggagattttttttattttttagatggggtggttgtcgggcggagaggttttttattttttagacggggtagttgtcggacggaggggttttttattttttagacggggtggttgttaggtagagggtttttttattttttagacggggcggtcgagtagagacgttttttattttttagacggggtcgttgtcgggtagaggcgttttttatattttagatggggcggcggggtagaggcgttttttatattttagataatgggcggtcgggtagagacgttttttattttttagatgtgatggcggtcgggaagaggcgttttttattttttagatgggatggcggtagggcggagacgttttttattttttagattgggtagttaggtagaggggttttttatattttagacgatgggcggttaggtagagatattttttattttttagacggggtggcggtcgggtagaggttgtaattttagtattttgggaggttaaggtaggcggttgggaggtgtaggttgtagtgagtcgagattacgttattgtattttagtttgggtattattgagtattgagtgaacgagatttcgtttgtaatttcggtatttcgggaggtcgaggttggcggattattcgcggttaggggttggagatcggttcggttaatatagcgaaatttcgtttttattaaaattagttaggcgtggcggcgcgtgtttgtaatcgtaggtattcggtaggttgaggtaggagaattaggtagggaggttgtagtgagtcgagatggtagtagtatagtttagtttcggtttcgtatgagagggagatcgtggaaagagagggagatcgtggggagagggagagggggagggggaggggggagggggagggattaattaatagttttataagtagatataatagtgtataaataaggaaattaaggaagattttttttttttagaattcggattttgaatattaggttgagttggagttgagtgagtaataaaatgaaaggttttttaatgtgggggagggtaggtaggagtggagatttttaagtagtattagtattgttgtttgatgggagtgtgaatttgaatatatgaagttttagttttagtagaatagtaagaaattttaagtaaggttaggtatggtttatatttgaaattttaataatttgggtaaattgaggtggaaggattgtagaggttaggagtttaagattagtttgggtaatatagttagatttttatttttattttcgtatttttatattatataaaaataataaagaaattttaggtaaggttagatggtaaggttaggtgtggtggtttatgtttgtaattttagtattttgggaggtcgaggtgggtggattgtttaaggttaggagtttaagattagtttggttaatatagtgaaatttcgtttttattaaaaatataaaaattagttaggtgttgtggtaggtatttgtaattttaattatttaggaggttgaggtaggagaatagtttgaatttaagaggtagaggttgtagtgagttaagatcgagttattgtattttagtttgggtattaaaagcgaaatttaggagaatgttttgaatttaggaggtagaggttgtagtgagttgagattacgttattgtattttagtttgggtgatagagcgagattttattttaaaaataaataaataaataaataaagtagttagatattttggtgtttatttgtagatttagttattagggaggttgaagtgggagaattatttgagtttgggaagttgaggttgttgtgagttatgattgtattattgtattttagtttgggtgatagagggagattttgttttaaaaaaaggaaaaaaagttaggtgtggtggtttatatttgtaattttagtattttgggaggttgaggtgggtggattatttgaggttaggaattagagattagtttggttattatagtgaaattttatttttattaaaaatataaaaaattagtcgggtttggtggcgtacgtttgtagttttagttatttggaagtttgaggtaggagaattatttgaatttagtagtgagttgagattaggttattgtattttagtttgggtgatagaaatagaataagatttcgtgttaaaaaaaaaaaagtaatagattagaaggttatgaggttaaataaaataatgttttgtttttgttttgagatggcgttttattttgtcgtttaagttggagtgtagtgatgtaatttttttttattgtaatttttatttttcgggtttaagcgatttttttgttttagttttttaagtagttgggattataggtgtttattattatgtttagttaatttttgtatttttagtagagacggtgttttattatgttgattaggttggtttcgaatttttgattttaagtgatttgttcgtttcggttttttaaagtgttgggattataggtatgagttatcgcgtttagtcgaatgttttgttttttaagatggaagatattttagtattttggtaggttgaagtaggtggattattttagtttgggtaataagagcgaaattttgttttaaaaaaaaaaaaaaagaaaagaaaaaaaaagagagaaagaaattttaggtaaaagtttgagttttattttttaattatttgattattttaattattgttattaggtggatgattttggagaggttatatatttttagttttgtaaaatggggagttatattgtttaaattatataatttttatgttaagtgatatattttttaaggtattaagtttgaggatatattttgtaaatgaaatgatatatggaaatgtttgtatatgttaatggttttgttgttgttattattattatgattattatatatatggtttggagaaagttaatttttttaaagcggagattttttagtagagaataggttttttaggttgtatattaatagggagtatgtttaaggaatgttagtcggtagtttttgttaggtgtgaggggtgaaatttttttttattaaggtttaattgttttcgaagtttttaggtttgaagttttggagaaaataattaggtttttcgggcgagatttcgaatattagtttaagggatttgaaatgtaaggtcgtttgggattttattgttacggatgggtattaggcggcgtcggtcggattcgtttcgggattagtagggttttgggtagtaattcgtagggagttcgatcgtttttggttaggttcgggtagttggtgggggaggttttagaggtttacgttattcgtggacgtagtttttagtgtttttttcgcgttttattttattgttttatttttttttttgcgagagtttggatttggaaggtatttgggagggtgtaagcgttttggtgtgtgtttatttgggtttttagaagagcggcgggaattgcggtcgttcggacggtgcggttagattttagtgtggaaggggaggtagttgtttttttaggcggtcgtggggggtagtagaggggacggcgataggtgcgggagtttttttcggggtagaagtggaaaggcgggtttcggggtttgtttttaggttggaaattattttcgttttttatttaaattttcgggagaggttcggtcggcgtcgggtttggaggaggaagcggttagagatagtgtaattttacgcggtttttgtggttcgggtttttgggttgggtggatgaattatggggtttcgagtttgggagaaattgaggtggtttggacgtgaggtaaaaaatatttttttttttaaaaatatatagagagaaatatttatattttgagagaaaatttattaagtgaattaatcggttaggggagttgagtgatttggttaatgggcgaggttaatttttagggggtagggttttggagagttttttatttttttatttattatttttttttggatttgggggttttcggaatttcgatttttttttggtttattttttgtagaaaaattagggtgagttttattttcgatttgtttcgttaagttgcgggatcgcggggcgtggtacgttcggggtaggcggttcgaggtttcgtaatttttattttagtttcgcgcgggagggggcgcggtcgtgatttatttttttttttttgcgttttttttttttttttttttttttttttatatatatatattttttttttgttattttttttcggatttcggtttcggtttcgattgtaatttgtaattttcgttgtcgtcgtcgtagtagttattaattcgttagcggtttaggtggtttttgtttcgatgttttagtttaggggttttcgggtcggatttggttgggttttttttattttttgcggagttatgagggcgaacgacgttttgtaggtgttgggtttgttttttagtttggttcggggtttcgaggtgggtaatttttaggtaggtaagtggcgcgagagtatcggcgggttcggtatttgggagtcggaatttagtgcgcgtagtttcggagggtatgggtacggttttaggcggcgcggggttgtgggtgttgttttcggtttgttaggattatttgggagaggggcggttaggttcgggttatcggcgtggttcggtcgagggcggtatttcgggatttttacgttatttttttttagagcgtcgtcgattttttaattggtttttttagaagaggttgaggtcgaaatagtagtttatatttttgaggggttttgtagggaggggagtagggaattttattttgtaaataggaggtgtttggaggtgggggttttggcgggaagggtttcggtttgttcgttaattttttgttttttattcgcgtcgattttagttatttttagtttcgttgttttgtcgatagggcggagttatagaaggttggagggggttgttgttttttggtgttggaaaaataggagcggtattttttttttcgtgagtgagtttgttttggggaggtttgagattaattagagggttaagtttaggtgatattaggtaggaggtttaatagaggttggcgttttttttttttagtatagtagagtttaagtaatatttttttgttaagatttaggttaatataatttatatttattgagtatttattatatataaggttttgggttaggagttgtaagggtaaggatgtttagtttttggttttttttttttttaatttgaggattaagagggtatttttgttattttttaagttttttgttttggggagttttttttgggtttagtttgtgtttttcgtttttattttgtttattgtttgatattgtttttaggattttagatagagtttcggattgtttttttttagttttttttcgatttttatgttatttgagtttatttttttggggtgtttttgggatcgtggatatttgaggattgaagttttgtggatttttttttttttttttagattttagtttggggtttggtatagttagggttttttttttagtgtgggagtggaagaaattatttgtgttttttttatagttgttgggtttaaatttagattttgggatttttagatgtgaatatttttagttggtggaggggggtggtttggggattggcgtgggagggagtagtggagtgattgtataattgttttatttagatttttgtaatttttatttagaaatttaggagtattagagtttggttattttttttggggaggtaggaggtaggtatggttgggtttttttattttttatttgggttttgtagtttttgggtattcggttttgttttagtttttttatagtttttttgttttggttgtgatgggggtgggggatgttggaggggaggtttttggttgaggaggggttggagattttggttttattttatttttagtgttttttattaaaggagggtttgtgatattgtttttttttatgttttcggtttttgggtatagtagggatttttatgattttttttttttgttttgttttttaagttgtttagtttttttttagaggtgttgtttgtgttttttttttgtttaggttttttgttttttgtttgtgtaatatggattttatttttagggtagtagggaattgggttatttttaatattgtagttttttaagtatagatataaagtttgtataaatatttatgggtacgtgggatagatggggttatttgaaatattttttgtaaggaaatttaattatagatttttgagttagtaggattaatgtgtacgtgttcgtgtgtatattgtgtgtgtatgtgtgtgtttatattattatttttttgtgtagaaagtttggttttttttttatttggggagaagtgttggtattataatttgggaaagggggtattttgttaggaaggggattggggtggggttgttttagaaatgattaatttttttagttttttttattttaatttaaggattttggagtttttagtttttttggaattagttttttttgttgggattagttaatttttatggggagtgataaggagttttttaaggttaagaagttagattaggggtgtatgttataggagggattggggttttattagtttttttttttttatttttattgttgttttttattgagttattatcgttttagggaagggtggttggaataggtggtatttattttttattttttattttatatatggtttttttttgaattagaggaaagagattggggtagggttttagagtttaggattttttatagttcgttgtttattatatttgtaaagaagagtgaatttttaaggttgatatgttatgtatttttagtttaggtttttttttagtgtgggtgaggattgttatggtgaaaggtttttttatgaattttttttaataatgaaattgtgtggaggtttaatatggggtatttgttattatttttttttaggtttttttgtatttgttgaaaaatattttagggttggaaagtgatgttgaggttgttagagtgtgttgggatgggggagagagtgagaaggaaattttgagtttaggaaggcggggaggtaattagttttttattttttagttttaaagataaagtttttattgatttttttttattttagtattgttagagtttttttttttattgaggttatttgtttgagtttaaggtttgagggtggaggggagtgttgttgaggacggggtgtttagggatagggtggggtagttttttttttggatagaatcgttttattgtgggttggattgtggttttaggtattgtttttattttttgtttttattttatttttagtagatataataggggttgtgtattagttttaaagagatatttattttaggatttagagagaggtaggatgagggtagagaagtgagtgttttagttggagggggagaggagggtaattaaagttgcggtttttttttaattttttttttttagggagagaaataaattttttgtttttttttttagttaattttttagtatttaaaagaagtatagaggggttttaggttgaaaaaggaaatttttttatttttttatttatggaatggtaaggggattttgagaagagagaaagtttttaggttattatagtttttgtttatcgtttgtgggagggttggaggtaaatgttatttgattttgtttaatgtaattggaagagggtaattaagggggtgatttttggggatggtagatgggttgagaatttgtgtttagtttttagttatttttttttttgttttgaatagt

SEQ ID NO: 118 - DNA, 8649 bp, Artificial Sequence
  chemically treated genomic DNA (Homo sapiens)
attgtttaaagtagagggaagagtggttgagggttggatataaatttttagtttatttgttatttttaaagattatttttttggttgtttttttttagttatattagataggattagatggtatttgtttttaatttttttataagcgataggtagaagttgtagtggtttgagagttttttttttttttagaatttttttattattttatgaatgggaaggtgaaaagatttttttttttaatttgggatttttttgtgttttttttgggtattaaggggttaattgagaaggaagatagggaatttgtttttttttttagaaaagagaagttaggaaaaggtcgtaattttgattatttttttttttttttttaattagggtatttatttttttatttttattttgtttttttttaggttttggaataaatatttttttgggattagtatatagtttttattgtgtttattgagggtgggatgggggtagagggtgggggtagtgtttggggttatagtttagtttataatgaggcgattttatttaggaggggggttgttttattttgtttttagatatttcgtttttagtagtatttttttttatttttaagttttgggtttagataagtgattttagtagaggggggagttttggtagtgttggggtgagggggggttaatgggagttttgtttttaaagttgaaagataaggagttagttgttttttcgtttttttaaatttagggttttttttttatttttttttttattttaatatattttagtaattttagtattattttttagttttagagtattttttagtaaatatagaggaatttggagagagatagtagtagatgttttatattgagtttttatataattttattgttagaagaggtttatgaaaaagttttttattatggtaatttttatttatattaggggagagtttagattagaggtatatggtatgttagttttgggagtttatttttttttgtaaatgtggtggataacgggttatgggaagttttggattttgaagttttattttagttttttttttttggtttagggaaagattatgtgtggggtggggagtagggggtagatattatttgttttagttatttttttttgaggcggtggtagtttagtgggaggtaatagtgggaatggagggagggagattggtgaggttttaattttttttataatatatatttttagtttgattttttgattttggagggttttttattattttttatgaaggttggttagttttagtaaagagagttagttttagaggagttgggaattttagggtttttgggttgaaatgaaagagattaggaaggttagttatttttggaatagttttattttaattttttttttggtaggatatttttttttttaagttatagtgttaatatttttttttagataagggaggagttaagttttttgtatagggaagtagtagtgtgggtatatatatatatatataatgtatatacgaatacgtatatattggttttgttggtttaggaatttatagttgggtttttttgtaggaagtattttaggtggttttatttattttacgtgtttataagtgtttgtgtagattttgtgtttgtgtttggaaggttatagtgttagaggtagtttagttttttgttattttgagggtaaagtttatattatataaatagggggtaaagggtttgggtaggaagggagtataaataatatttttggggaggagttaggtagtttggggagtagggtaggggaagggaattataaaaatttttgttgtatttaggaatcgggagtatagggaggggtagtgttataggtttttttttggtagagagtattaggggtgggatagagttagaatttttagtttttttttaattagaggttttttttttaatattttttatttttattatagttaggataaaggggttatagaaggattgagatagggtcggatgtttagaggttgtaggatttagataaagggtaaagagatttaattatgtttgttttttgtttttttagggagggtggttagattttggtatttttgggtttttgggtgaagattgtaggagtttggatgggatagttatatagttattttattgtttttttttacgttagtttttagattatttttttttattagttgggagtgtttatatttaaaaattttaggatttaaatttaggtttagtaattgtgagggaagtataggtggttttttttatttttatattggggaaggggttttggttgtgttaaattttaagttgagatttgaggggaggggaggagatttatagaattttagtttttaggtgtttacggttttagagatattttaaaggggtgggtttagatagtatgggagtcgggggaggattggagaagagtaattcggggttttgtttagggttttagagatagtgttagataataagtaaaatgggggcgggaggtataagttgagtttaggaaggattttttaaggtaggaggtttagaaagtagtagaggtgtttttttgatttttaggttggggagagaaaagattagaggttggatatttttgtttttatagtttttggtttagggttttgtgtatagtagatgtttaataaatatgagttgtgttgatttgggttttgataaagagatgttgtttaagttttgttatattgaggaaagggggcgttagtttttgttgggttttttgtttgatgttatttgaatttggttttttggttaattttagatttttttagggtaggtttatttacggaagaggaggtgtcgtttttgtttttttaatattagagaataataattttttttaattttttgtagtttcgttttgtcggtaaaataacgaaattaggggtagttgaaatcggcgcgggtggggggtagggggttggcgagtaaatcgagatttttttcgttaaggtttttatttttaagtattttttgtttatagaatgaagttttttgtttttttttttgtagggttttttagaagtgtgaattattgtttcggttttagttttttttggggagattaattagagggtcggcgacgttttggagaagggtggcgtgagggtttcggaatgtcgttttcggtcggattacgtcgataattcgagtttgatcgttttttttttaggtggttttggtaaatcgggggtagtatttataatttcgcgtcgtttgagatcgtgtttatatttttcgaggttgcgcgtattgggtttcggtttttaggtgtcgagttcgtcggtgttttcgcgttatttatttgtttgagagttgtttatttcggagtttcgggttaggttgaaaagtaagtttagtatttgtagagcgtcgttcgtttttatgatttcgtagagggtgaagggagtttagttaagttcggttcgggggtttttaggttaggatatcgaggtaagagttatttgaatcgttggcgaattggtggttgttgcggcgacggtagcggaggttgtaaattgtaatcggagtcggagtcggagttcggggagggatggtaggggaggggtgtgtgtgtgtgagagagagagagagagggagggaggaacgtagagggaagggggtgagttacggtcgcgttttttttcgcgcgaggttggagtagggattgcggagtttcggatcgtttgtttcgagcgtgttacgtttcgcggtttcgtaatttggcggagtagatcgaggatggggtttattttaatttttttgtaggagataggttaaggggaggtcgagatttcgaaagtttttagatttagggaagggtaatgaatgagggagtggaaagttttttaaagttttgttttttgaaagttggtttcgtttattaattaaattatttaatttttttagtcggttggtttatttggtggatttttttttagaatgtgaatatttttttttgtgtgtttttgagggggagggtgttttttgttttacgtttaggttattttagttttttttagattcgaaattttataatttatttatttagtttaggaattcgagttatagagatcgcgtgaaattgtattgtttttggtcgtttttttttttagattcggcgtcggtcgggtttttttcggggatttggatggggggcgggggtggtttttagtttgggaatagatttcggagttcgtttttttatttttatttcgggaggggttttcgtatttgtcgtcgttttttttgttgttttttacggtcgtttgggagaatagttgtttttttttttatattggagtttggtcgtatcgttcgggcggtcgtagttttcgtcgtttttttggggatttagatgggtatatattaaggcgtttatatttttttaggtgttttttaagtttaggttttcgtaggaaaggggatggggtagtgaagtgggacgcggagaggatattagagattgcgtttacgaatggcgtggatttttggaattttttttattagttgttcggatttggttagaggcggtcgggttttttgcgggttgttgtttaaagttttgttagtttcgggacggattcgatcggcgtcgtttggtgtttattcgtggtagtggagttttagacggttttgtattttaaattttttaaattggtattcgggatttcgttcggagagtttagttgttttttttagaattttaagtttgaagatttcgaaaatagttgagttttgataaagaaaaattttattttttatatttagtaaagattatcggttaatattttttaaatatgttttttattgatatgtaatttagagggtttgttttttattggagaattttcgttttggggaggttggttttttttagattatgtgtatagtagttataataataatagtaataataaaattattaatatatataaatatttttatatattattttatttataaagtatgtttttaaatttagtgttttagagaatgtgttatttaatataaaaattatatgatttaggtaatataattttttattttatagaattagaagtgtgtgatttttttaaggttatttatttggtgatagtggttgaggtgattaggtgattgggaggtggggtttagatttttatttagggttttttttttttttttttttttttttttttttttttttttttgagatagagtttcgtttttgttgtttaagttggaatgatttatttgttttagtttgttaaagtgttgggatattttttattttaaaaaataaaatattcggttgggcgcggtggtttatgtttgtaattttagtattttgggaggtcgaggcgggtagattatttgaggttaggagttcgagattagtttagttaatatagtgaaatatcgtttttattaaaaatataaaaattagttgggtatgatggtgggtatttgtaattttagttatttaggagattgaggtaggagaatcgtttgaattcgggaggtggaggttgtagtgagaaaaaattgtattattgtattttagtttgggcgatagagtgagacgttattttaaaataaaaataaaatattgttttgtttgattttatggttttttggtttgttgtttttttttttttgatacggaattttgttttgtttttgttatttaggttggagtgtagtggtttgattttagtttattattgagtttaagtgatttttttgttttaggtttttaagtagttggggttataggcgtgcgttattaagttcggttaattttttgtatttttagtagagatggggttttattgtgatggttagattagtttttaatttttgattttaggtgatttatttattttagttttttaaagtgttgggattataggtgtgagttattatatttggtttttttttttttttttgagataggatttttttttgttatttaggttggagtgtagtggtgtaattatggtttatagtagttttaattttttaggtttaggtgatttttttattttagtttttttagtaattgagtttataggtgggtattaaaatgtttggttattttgtttatttgtttgtttgtttttgagatggagtttcgttttgttatttaggttggagtgtaatggcgtgattttagtttattgtaatttttgttttttgggtttaaggtatttttttgagtttcgtttttggtgtttaggttggagtgtaatggttcgattttggtttattgtaatttttgttttttgggtttaagttatttttttgttttagttttttgagtagttgagattataggtgtttgttataatatttagttaatttttgtatttttagtagagacggggttttattgtgttgattaagttggttttgaatttttgattttgggtaatttatttatttcggttttttaaagtgttgggattataggtatgagttattatatttggttttattatttggttttatttaggatttttttattatttttgtatgatatggagatgcgggggtgggggtgggggtttggttatgttgtttaagttggttttgaatttttggtttttgtaatttttttattttagtttatttaaattgttaggattttagatgtgaattatgtttggttttatttaggattttttattgttttattgagattggagttttatgtgtttagatttatatttttattagataatagtgttgatattatttaagggtttttatttttatttatttttttttatattaaagggttttttattttattatttatttagttttagtttaatttggtatttagggttcgagttttgaaggagaaaaattttttttggtttttttgtttatatattgttgtatttatttataagattgttgattggttttttttttttttttttttttttttttttttttttttttttacggtttttttttttttttacggttttttttttatgcggagtcgaagttggattgtattgttgttatttcggtttattgtaatttttttgtttgatttttttgttttagtttgtcgagtgtttgcgattgtaggtacgcgtcgttacgtttgattggttttggtggagacggggtttcgttgtgttggtcgggtcggtttttagtttttaatcgcgagtgattcgttagtttcggtttttcgaggtgtcgggattgtagacggagtttcgtttatttagtgtttaatggtgtttaggttggagtgtagtggcgtgatttcggtttattataatttatattttttagtcgtttgttttggttttttaaagtgttgagattgtagtttttgttcggtcgttatttcgtttgggaagtgaggagtgtttttgtttggtcgtttatcgtttgggatgtgaggagtttttttgtttggttgtttagtttggaaagtgaggagcgttttcgttttgtcgttattttatttaggaagtgaggagcgttttttttcggtcgttattatatttaggaagtgaggagcgtttttgttcggtcgtttattgtttgagatgtggggagcgtttttgtttcgtcgttttatttgggatatgaggagcgtttttgttcggtagcgatttcgtttgggaggtgaagagcgtttttgttcggtcgtttcgtttgagaagtgaggagattttttgtttggtaattatttcgtttgagaagtgaggagttttttcgttcggtagttgtttcgtttgagaagtgaggagttttttcgttcggtagttattttatttgggaagtgaggagagttttcgttcggtagttattttattcgggagggagatgggggggttagtttttcgttcgattagtcgtttcgttcgggagggaggtggtggggttagtttttcgttcggttagtcgtttcgtcggggagggaggttggggggttagtttttcgttcggttagtcgtttcgttcgggagggaggtgggggggttagtttttcgttcggttagtcgtttcgtttgggaggtgaggggcgtttttgttcggttattatttcgtttgggaggtgtatttaatagtttattgagaacgggttaggatgataatggcggttttgtggaatagaaaggcgggaaaggtggggaaaagattgagaaatcggatggttgtcgtgtttgtgtagaaagaagtagatatgggagattttttattttgttttgtattaagaaaaatttttttgttttgggattttgttgatttgtgattttatttttaattttgtgttttttgaaatatgtgttgtgtttatttagggttaaatggattaagggcggtgtaagatgtgttttgttaaatagatgtttgaaggtagtatgtttattaagagttattattattttttaattttaagtaattagggatataaatattgcggaaggtcgtagggttttttgtttaggaaaattagagatttttgtttatttgtttatttgttgattttttttttattattgttttatgattttgttaaatttttttttgtgagaaatatttaagaattattaataaaaaaataaat

SEQ ID NO: 119 - DNA, 10543 bp, Artificial Sequence
  chemically treated genomic DNA (Homo sapiens)
agttttagttattcgggaagttgaggtaggaggattgtttgagttttggatattaaggttgtagtgagttatgattacgtcgttgtattttagtttgggtgatagagtaagattttgttttaaaaaaataaaaaaaagaaattaaaagaaataaaataggtttaattattttggaaaaaagtgtttttatttttttaaaaggtaaatatgtttagtatatgatttagttattttatttttagggtttgttttaagaaaaattagagtaaatttgtataaatatttgtatatgaatgtttatggtagtattatttataataatttaaattggaaataatttaaaagtttattaataggtgaatagattagtgaaattttagagaatgaaatatttagttataaaaaagaaatttgtaataatgtggaatattatgttaagttaaaaaaaaaaaaaaaggttatatattgtatgattttatttgtatgaaatggggtgttggtagttttttgaaattggattgtggtgatgggtgtttaattgtaaatttattagaattaaacgaataatagaattaaaatgggtgaatttttttttttttttgagatagagttttattttgtcgttaggttggagtgtagtgatatgattttggtttattgtaatttttgtttttcgggtttaaacgagttttttgttttagtttttgagtagttgggattatagatatgtattattatatttagataatttttgtatttttagtagagatggggttttattatgttggttaggatggttttaaattgttgatttcgtgattcgtttgttttggttttttaaagtgttgggattataggtatgagttatcgcgttaagttaaaatgggtgaattttatggtatgtaaattatattttaataaagttttaaaaattaatatatgtgtgtttgtttgtgtgggttgttttaaaatattatagattgaatggttttaataatagagatttattttttatagttttggaggttggaaagtttaagattaaggtgttgattgatgtgattttttgtgagggttttttttttgggttgtattttttttttttttttttttaaaaagttattaattttggtcgggtacggtggtttatatttgtaattttagtattttgggaggttaaggtgggtggattatttgaggttaggagttcgagattagtttgattaatatggagaaatttcgtttttattaaaaatataaaattagtcgggcgtggtggtttatgtttgtaatgttagttattttggaggttgaggtaggagaatcgtttgaatttgggaggtggaggttgtcgtgagacgagattatgttattgtattttagtttgggtaataagagtaaaattttgttttaaaaataataataataataataaagttattaattttataatgagggtttatatttatgattttttttaattttaattttttttaatgttgttatttttaaatattataataatgggggtgagaattttaataagtgaatgtgtggggagataatttagtttatggttatgtgttatttatattattaatagggtgggaaaaaatggagaatgaatagattgggggtaagtgataggattgttggttagtattaagtatttgggtttgtagttatgaattaaaatcgagattagttagggtgattttgtatttttttttatttatatttagttgttaggggtgtaggtgtagaataaatggagggttgaatttagtttatagtttggaggtatgtaaaggtgtggtaataatgatggtggggaatttggttaggtagttgagagtggtgtggttatgattgggggagggatagtaataagttagatagtttaatggatggttagggttgaaggtttattggtgtaatttttagaaggagtgagttggagagataggaggtgacgggtagagcgtgagatgtatggagttgagattttgtaggggttgtggttatgcggttgttgttatttagaatgggttttttttttttattaggttgggatttttggggttgttatagttatgtgttgttgtgtgtttttagtataaggtttaggtgtgattatgggaaagaagggttgggtggaggataagtgtagtgggggagaggaggttaaggtattaagaggttagagtggtaaaaggattatttatttgaatttgaaaattattaagaataatgataggagtggtgtgggtgatagtgagtttgaagttaaatgacgaggtgagtagaggtgatttgggagttaatgggtttagtagtataaaggggagtaggtgttatagtgtgattgtgtaagttttagatttagggtttagggaggaggtagagataatggtttagaagtgttagtgaggagtaaggacgttttttttttatttatagatttagtggatatgaaggtcgagaaggagaaaatagtttcgtttggaaagggaggtttttagggtagagttttttttagagtaagaaggttataggaaggtttagagggagttgaggaaatggggaatattgggaaaagtttttaagggtttcgttatttttgttttgttttgtttgttagtgttttttttattttttttttatttttttgtttgggttttttttattttggttttgagttttttgtttggggttttttagttttatttttgtcggtgttttttttattgtttttttatttttttgtttgttttagttttgatttttttgggttaatattgtttgggaatttgtttgttttttttattggattggtagttttaggaggataggattcggggttgttttagttattattgtgtttttagtataagattaataggtatttttattattaattatttatcgatagagttaattttaggtttttagagtaagttagtaggtaaagtattttagaagtaggagatggtgttaggattttaagaaatagggttggaattttttaaatttgtattgtattttgagtatttttgttttttagaagaaaaatattaattagaaggtaaatagtaaaatttatgtgaaataggtaatattattcggaattggatttattggaattattgtatatttagaaatttagaatagatttaattattttattttatagtttttaaaaagttttttttgtttggtttttgtttttgttttgggataggggtgtcgttttgtgatttaggttggagtgtagtggtgtagttatggtttattttagtttagatttattgggtttaaaggatttttttgttttagttttttgagtagttgggattataggtgtaagtaattatatttagttaattttttattttttgtaaagataaggttttattttgtagtttaggttggttttaagtttttgggtttaagcgatttttttgtttcggttttttaaagtgtttggattataggtgtgagttattgtttcgatcggttttgaaaagtttaagtagattttttattataatatttaaataattttttaggaatgtttttgtgtaaattggtggtattttatagttggaatattgtatatagagaatttataacggtatgaggttatttatttatttaataaatatttattgggtatttagagggttgttttaggtttagagtgatagagtagtgaatggaatagagttaatatttaggttttggattggtaggtttttttggagtttttcggtaattttttataatagtagttgttttgttttgtagaatgaatatagggatggatattgatattatataattataaagtttaaaatttttaatatttaagtagaatttgttgatttttgacgtcgttttttgtttttattttgatttgtttattttttttttttgatttacggtagtagttagtttttggtttttttgtttttatttttatttttgtagtttgttttttatatgtagttagagggatttgtgttagattatattttttttttgtttggaatttttttatggttttattttattgtttaagtttttattatgttttataaagtttcgtataatttgtttttgttagttattcgtttttatttttttttattttttattttgtttattttgttttatttattttttttattgtttttttaattttttatatttttttttttttagggtttttgtatttgtagattttttttttgtttggaattttttttttttagataggtgtatgttttattttttattttttttagttttttagtttaaaagttttttgatgtattttttgattatcgtgttaaaaaaataaaaattatttgttttttaaaatttttattttttttttttgttgttattttttttaaagtatttatcgtttttaaatatttaatatgtttggtgtttattttttttattaaaaagatgaattttaggagagtggagatttttatgtttcgtatatcgttgtatttttagtttttagaatagtatttggtatatacgaggtgtattgtaaatgtttttcggatgtttgaatggaagtttagagtcggttattgtttttggggttggaaatgtattggggaagtttttttgggtgtataggggttagagggatttagttaggaatataaaagagggtatagttcgtgcgaaggttatgagttttgattattggggtgttcgtattggggaagaggaaatcggaagcgagtttagggcgatcgttgtataggtaaaggttgggaaggtagagagcgagggtagcgggttgcgtgtcgataggttcgagaatttaggtttattgcgcgtgcgtcgagtttcgggcggggaaggggttcgggggcgggattacggggtggcgttacgtagcgtacgtcgtcgcgcgtttgcgtttttttttacgtgcgaaagtttcggattcgtggagttgtgaacgtcgcggatttcggagtcgtataaattagggttcgttatgaagttaggttaggttggggtgagggttcggggttagggacggaggtcgggcgggaattcgggtgttaggttagaatcggaggggtggggttttggtttgggggtaggggttttgagtacgggttttagttttttgtgggaagggggattttgattttagtaggtttaggggtttgtgattggttttagaggttacggtcgtgagtcgaagaaggtcgtgggtttggtattgggggtgttgacgtggggttcgttttattgaggtcgtttaatagggattttggatattgggtaggaggcggtatttaagggttttgggttagagtttggatttaggtatttggagttttggatcgttgggcgtgttttgggaattaggtttgggtcggagatggagagtttttgattttgggttttggagttgtgtgtgggaagtttttatttgttttttttgtcgttgttattattattatttttttatttcgtattttagttttttcgagtgggtcggagtggatgaggatttttcggttggtcgtgtgcggcgtttttcggtttattttttcgttttttgtatttatagtggggcggattttcggggatggagtggagatttggggattaagatttttattttcgggacgagatttaataagttcggtattagtttggggtggtggggcgggtggttgttataggaggtaagtagttttatttttaagattttttattagattttgttgaaattattttttttatggtggaatgatgagggggttttggttttgatagtagaagggttttagtttagtgtgttagtttttgtttagttttttagtttgttgtgtgaatttgggtaagtggttttatttttttgagtttttgtttttttattaataaaatggcgttagttaggattaagcgacgttaaaaaaaatagtatagtgtttgatatataatagtattagttttaattgttatttttattttttttaaagagaataatattagaatttttttcggtggtgtttgagtattttttttatttggtttgtttaattcgtatttatttgtgtgagaatttgttttattgagtttggagaatttttattatggtttaaagggtttgtttttttagtataggtttttttttttttttgtgtgtgtgtttgtgtggagagatgggggttatttggtaggagatttgtggatttgtgttttttttttaagttttttttttttttcgtgtttggggattttttgatgaagtggggtgggggattgtaggttaggtatgttgagattttggtttgtttgtaggtattttggtttgtgatttttttataaatggaggatattcgtttttttaatttttttttatgtgtggtagaatgtgaagttgtaaaagttgttaggtgttagttttttagtaaggattttagtttgagtgagaaaagaattttttgggagatttttgagtaggggcgtggtgtagtttgatatttttaaaagggattttttttgtttcgatgtgtgaaagattttagggtggtaaaagtggaagtaggtatattggtgggaagtttgttgttgtaatttaggagatggtgtggtggattaggatgggagtagtggatatgttgatagttttatatgtttttgaagatagaattaatagattgtatgtgggtgtgtgatcggagttaaggataattaagggtttgggggtgtgtaattggaaggatggaattgttatttttgagatggagaaggttgtggaaggagagtagattttaaattagggggtttatggatttttttttttttaaaaaaagaatttattggaaaagtttgtgtgaatatgtgttttttttgaggattgggtatttttggtatatttttttttaaaagttttaggatttgaaacggattgagatgttttgagtatttgggattgaaagtttatatttatgtttatttcgttttaagtatatgttagtattttttttttgttaggtttgggttgagatttttataagtttagttgtggtattttttttaaatgaaggttttggttttggaaaattgttggagggtttgggtaagaaaattgagatttgagttgttgttttaaaaatagtatttattagttgttgtgtggaaagtggattgtagggggagtagaatattaaaaagtgaataatttttagttatgttttagagttttgaaaaggaaattttattttaaaagattaaattaggagtagttattaaaagttatatttttatttttaatagaaagatgaaaaaagaattaattggaaaagtttgtgtgaatatgtgttttttttgaggaatgggtatttttggtatatgaggagggaagaggagacgcgtatttttgagtttgaatgatgatgtttaaagtaggtgttagatagtatatatgtgatgtgttttgtgggtataagttatttaatttttataattttataggatgagtattgtattttttttatttttatttttttgatatagaatttttttttgttatttaggttggagtgtagtggtattattttagtttattgtaattttcgtttgtgtttaattgatgtttgtgttttagttttttgagtagttgggattataggtatgcgttattacgtttagttaattttttgtatttttagtagagatagggttttattatgttggttaggttggttttgaatttttggttttaaattgttcgtttgtttgggttttttaaagtgttgggattataggtatgagttatggcgcgtggtttggtattgtattgtttttatgttttatagatgaagtttttaagatttttatgaattttttttattagggtcgagagtggtagtaatattgtttatttttttatatgcgatatttgaggggagtgatcggtatttttttggttattatttgatggattgtgtgttttttgaataaatagagggtgttttttttttgaggtagggtttagggtttaagagttattagtttagtgtttatttaatatttattgagtttatattttgtgttagatgttgtgtagggttttggggatgcggtggtgattaaaatagttaaaaatttttgtttatttggagtttgattttagtgggggaggtaggtggtaataatattaaaaatgttatgtgtgataattgatttgaagggaaataaagtagggtaagggtattgtggttaaagtaggtttttttggggaattaatattttattagagattagaatgtagtgaaggagcgagtgagttatgtatatgtttgtaggagttaggtagtgggaatagtacgtggtaaagatttagaagttggattgtgtatgtttggtggggaagagtatggggtttagtataaagagaatgaagttagggaagttagtataggttagatttttaggatgatgatatttaatgtgggttgtattttggagttatttggagagttttaggggaagattttgcgtttagaataatgaaattagaatttaaagtttaaagattttaggttttgattttaggttttgtaagttagggaaaggattttttattttattttggatgtggtggaaaattattggagggatttgggtaagggtatgatgagattttatttgttgttttaaaaatagtatgtattagttgttgtgtgaaaagtggattgtagagggagtagaagattaaaagtaaataatttttggttgtttgggagttttgaaaatgaaatcgtttatttttaaagattaaattaggaatggttgttaaaagatatattttttatttttaatattattaaggtgtatgaagggttcgtaggataagattataatgtatttttataaaaaatatgagtaaggttgggcgcgttggtttacgtttgtaattttagtattttgggaggttgaggcgggcggattaagaggttaggagattgagattattttggttaatacggtgaaattttttttttattaaaaatataaaaaaattagtcgggtatggtggtgggcgtttgtagttttagttattggggaggttgaggtaggagaaaggcgtgaatttgggaggtggagtttgtagtgagtcgagatcgtgttattgtattttagtttgggtgatagagtgagatttcgttttaaaaaaaaaaaaaagtaagtttatgattgaatagattatattatgtgagaatgtgagataattttaaattattagttttttaattattttttttaatttgtgtgatttagtatttttgagtttttgaaattaaattagagaaaatattgaatttgttagtattagagttttgttttaaacgttgttttgtgttaatggtgtttgttgttttgaattggtaagaataaagtttgtttgagtttgttattttttaaatatttcgattttattgataagtcgtaaattatttgtaaagtgtagtttatttttaaatgatagtttgttttgtttttttttgttttttttttgagttgagagggatttttttaagtttggaagtagggagatgagttagggttgatattattttgtatttttttttgttttggggttggggttgatattttttttttagttttaaggttaggagtgggagagtatgaagacgtttgtagagtttagggggttttgttgttatagtatgtgttcgtatgtagggtttattttttatagtaattaatattgatatggaatgaattttgtgaatttgttatgtaattaaggaaattaggatattaatagtaatttatatttatttatgtattttttttttattttaattttatattaatattttttttttatttattaatattatgagttttatattttttatttttttgtttttttttttgggtagtatgattgtggttgggtgtggtgtttgatatttgtaattttagtattttaggaggttaaggtaggaggattatttgagttaggagttggagattagtttgggtaatatagtgagatttttatttttatattatgggagtagtggtatatatttgtaatttagttattttagagatcgaggtaggagaattgtttgagtttaggagttcgaggttgcggtgagttgtgattgtgttattgttttttaatttgggcggtatagtaagattttgttttaaaaaaaaagtattaagtaaaaaaaattattatgattttaatatttattagtttgttgtgtataattgaaggttatttttatgattttgattgtgaatgttttttattttatttgtttattttattgatggatatttgggttagtttttattttttttttgttgtggatatttttggaaatgtgttttgttgtatacgggtatatgtattttaggttttttatttgagaggtattgttgggtataaggtggtttaattttttaagttttattgttttgatttttgttttgttttttttatagg

SEQ ID NO: 120 - DNA, 10543 bp, Artificial Sequence
  chemically treated genomic DNA (Homo sapiens)
tttgtgggggaaataaaataggagttagggtaatgaagtttaaaaggttaaattattttgtatttagtaatattttttaggtgagaaatttgaaatatatgtgttcgtgtatagtaggatatatttttaagaatgtttatagtaaaagaaaagtgaagattaatttaaatgtttattaatagaatgggtaaataaaatagaagatatttataattaagattatgaaaatgatttttagttatatataatagattaataaatgttaaaattataataattttttttgtttagtgttttttttttgagatagggttttgttgtgtcgtttaggttggagagtaatggtataattatagtttatcgtagtttcgaatttttgggtttaagtaatttttttgtttcggtttttgaagtagttagattataggtgtgtgttattatttttatagtgtagagatgggggttttattatgttgtttaggttagtttttagtttttggtttaagtgatttttttgttttggttttttgaagtgttgggattataggtgttaggtattatatttagttataattatattgtttaagaaaaggagtaagggaatgagaaatgtaaaatttatgatattggtgaatgggaaggagatattaatatggggttgggataggggaggagtatatgaatagatgtaggttattgttaatattttggtttttttggttgtatagtagatttatagaatttattttatgttaatattaattattgtgaagagtgagttttgtatacgagtatatgttgtgataatagggttttttagattttgtaaacgtttttatatttttttatttttgattttggagttggaagaaaagtgttaattttagttttaaaatagaggggaatataggatgatgttagttttaatttatttttttgtttttaagtttaaagaagttttttttagtttaggggaaaaataagaaaaagtagaataaattgttatttaaggataggttgtattttataagtagtttgcgatttgttagtaagatcgaaatgtttaagaaataatagatttagataggttttatttttattagtttaggataataaatattattagtataaaataacgtttaaaatagaattttggtgttaatagatttaatattttttttgatttggttttaaaaatttagaagtattaaattatataagttaaaaaaaatagttggaaaattagtggtttaaaattattttatatttttatatgatgtaatttatttaattataagtttgtttttttttttttttgagacggagttttattttgttatttaggttggagtgtagtgatacgatttcggtttattgtaagttttattttttaggtttacgttttttttttgttttagtttttttagtagttgggattataggcgtttattattatgttcggttaatttttttgtatttttagtagagaaggggttttatcgtgttagttaggatggttttaattttttgattttttgattcgttcgttttagttttttaaagtgttgggattataggcgtgagttagcgcgtttagttttgtttatgttttttgtaaagatatattatgattttgttttacgaattttttatgtattttaatggtattaaagataaaaaatgtgttttttaatagttatttttaatttaatttttaaaaatgaacggttttatttttaaaatttttaaataattaaaagttgtttatttttaattttttattttttttatagtttattttttatatagtagttaatatatgttatttttaaaatagtaagtaagattttattatgtttttgtttaaatttttttaatggttttttattatatttaaaatgaaataaaaagttttttttttggtttataaagtttgaaattaaagtttaaaatttttaggttttaaattttgattttattgttttgggcgtaaggtttttttttaaagttttttaggtgattttaaggtgtagtttatattgagtattattattttaaggatttggtttgtgttgatttttttgattttattttttttatgttgggttttatgtttttttttattaagtatatatagtttagtttttaaatttttattacgtgttgtttttattgtttggtttttgtagatatgtgtatggtttattcgtttttttattgtattttggtttttgataaaatgttagttttttagaagggtttattttggttatagtatttttattttgttttatttttttttaaattaattattatatatggtatttttaatattattattatttgttttttttattaagattaagttttaaatgggtagggatttttaattgttttggttattatcgtatttttaaaattttgtataatatttggtataaagtatgggtttaataaatgttaaatgagtattgagttgatgatttttaaattttgggttttgttttaaggagaaagtattttttatttgtttagaaagtatataatttattagatggtgattagggaagtgtcggttattttttttaagtatcgtatatggagagataggtaatgttgttgttattttcgattttagtaaggaaggtttataggggttttgaaaattttatttgtaagatatggagataatatagtgttaggttacgcgttatagtttatgtttgtaattttagtattttgggagatttaggtaggcggatagtttgaggttaggagtttaagattagtttggttaatatagtgaaattttgtttttattaaaaatataaaaaattagttgggcgtggtggcgtatgtttgtaattttagttatttaaaaggttgaggtataagtattaattgaatataggcggaggttgtagtgagttgagatggtgttattgtattttagtttgggtgatagagagagattttgtattaaaaaaataaaaataaaaaaaatgtagtgtttattttatagggttgtaaagattaaatgatttgtatttatagagtatattatatatatattatttggtatttattttgaatattattatttaaatttaggggtacgcgtttttttttttttttttatgtattaaaagtatttattttttagaaaaaatatatgtttatataaatttttttagttagttttttttttatttttttattaaagatgaaaatgtaatttttaatagttatttttaatttgattttttaaaatgaagttttttttttaaaattttagaatataattaagagttgtttattttttaatgttttattttttttatagtttattttttatatagtaattaataagtgttgtttttgaaatagtaatttagattttaatttttttgtttaagttttttaatagttttttaaagttaagatttttatttaggggagatgttatagttaggtttatgaaagttttaatttaggtttaatagaaaggaagtattggtatgtgtttggggcggagtgggtatgagtgtaaatttttaattttagatatttaaaatattttaattcgttttaggttttggagtttttgggggaaaatgtattaaaagtatttagtttttagaaaaaatatatgtttatataaatttttttagtaagttttttttttggggggaggggggtttataaattttttgatttaaaatttgttttttttttatagttttttttattttaaaaatggtaattttatttttttagttatatatttttaaatttttggttatttttgatttcgattatatatttatatataatttgttggttttgtttttaaaagtatgtaaaattgttagtatgtttattgtttttattttggtttattatattattttttagattatagtaataagttttttattaatgtgtttgtttttatttttgttattttgaggttttttatatatcgaagtaaaaagaattttttttaaaaatgttagattgtattacgtttttgtttaaaaattttttaaagggttttttttttatttaggttaaaatttttattaaagagttaatatttgataatttttataattttatattttattatatatggaggaaggttggaagaacgggtattttttatttatgagggaattatagattagaatgtttgtaggtaagttaggattttagtatatttggtttataattttttattttattttattaagagatttttaaatacggaagagaaagggaatttgggagaagggtatagatttataaattttttgttaggtgatttttatttttttatataaatatatatataaaagaaaaagaaagtttgtattaggaaaatagattttttgggttatggtggaaattttttaaatttaatgaagtaagtttttatatagatgagtgcgggttgggtaggttagatggaggaagtgtttaggtattatcgagaaggattttaatgttgttttttttgagaaagataaaggtaataattagagttaatattattatatgttaagtattgtgttattttttttaacgtcgtttaattttaattggcgttattttattgatgagaaaatagaggtttagagaggtaaagttatttgtttaagtttatatagtaggttaagaagttgagtaagagttgatatattgaattgaggtttttttgttgttaaagttaggatttttttattattttattatgaagggagtggttttagtagaatttagtggaaaattttaagaataaaattatttattttttgtgataattattcgttttattattttagattaatgtcgagtttgttaagtttcgtttcggaggtggaaattttaatttttaaatttttattttattttcggggattcgttttattgtaagtgtagaaggcgggaaagtgagtcgaagagcgtcgtatacggttaatcggggagtttttatttatttcggtttattcggaaaagttgggatgcgggataaggggatggtggtggtggtagcgatagggaaggtaaatgggggttttttatatatagttttaggatttaaggttaggaattttttattttcgatttaagtttgatttttaaaatacgtttagcgatttaagattttagatgtttgaatttaaattttagtttaagatttttgagtgtcgttttttgtttaatatttaaaatttttattagacggttttaatgagacgaattttacgttaatatttttaatgttaggtttacggtttttttcgatttacgatcgtgatttttgaagttagttataaatttttagatttgttggaattagaatttttttttttataggagattggaattcgtgtttagaatttttgtttttaggttaaggttttattttttcgattttggtttggtattcggattttcgttcggttttcgtttttgatttcggatttttattttagtttgatttggttttatggcgagttttggtttgtgcggtttcggagttcgcggcgtttataattttacgagttcggggttttcgtacgtggaaaagagcgtaggcgcgcggcgacgtgcgttgcgtgacgttatttcgtagtttcgttttcgggtttttttttcgttcggagttcggcgtacgcgtagtgagtttggattttcgagtttgtcgatacgtaattcgttgttttcgttttttgtttttttagtttttgtttgtgtagcggtcgttttaaattcgttttcggtttttttttttttaatgcgagtattttaataattagggtttatagttttcgtacgggttgtgtttttttttgtatttttagttaaatttttttggtttttgtatatttaaaaaggtttttttaatatatttttagttttaagaatagtgatcgattttgggtttttatttaaatattcgaaaaatatttatagtgtatttcgtgtgtattaggtgttgttttaggagttgggaatatagcggtgtacgagatataaaaatttttatttttttggagtttatttttttaatggaggaaatagatattaaatatgttgaatgtttgaaagcgataagtgttttggagaaaataatagtagggaaaggggatagagattttggagggtaaatgatttttgtttttttggtacggtggttaaggaatgtattaggagatttttgagttaaagggttgaaggaagtgaggagtgaggtatgtatttatttaggggaagagagttttaggtagggaaaagatttgtagatgtagaggttttgaggaaggaaagatatgggaagttggagagataatgaggagggtgggtggggtaaagtgagtaaggtggagagtaagaggagataagggcgggtagttaataagggtagattgtgcggagttttgtgggatatagtgaggatttaggtagtaagatggaattatggaagggttttaagtagagaaggaatgtgatttgatataggtttttttggttgtatgtgggaagtagattgtaggagtgagggtgaaagtaggaaaattaaggattggttgttgtcgtgaattagaagaaaaggatggatagattagagtgggggtagagagcggcgttaggggttaatagattttgtttaagtattaagaattttgggttttgtaattgtgtaatattagtatttatttttatatttattttgtaaagtaagataattgttgttatgagaagttatcgaaaaattttagaagaatttattagtttagagtttagatgttgattttgttttatttattgttttattattttaggtttaggatagttttttgggtgtttagtaaatgtttgttgaatgaatggatggttttatatcgttgtgagttttttgtgtatagtgttttagttgtggaatgttattaatttgtatagaaatatttttgaaagattgtttagatattatgatggaaaatttgtttaaattttttagaatcggtcggggtagtggtttatatttgtaatttaggtattttgggaggtcgaggtaggaggatcgtttgagtttaggagtttaaggttagtttgggttatagagtgagattttatttttataaaaaataaaaaattagttgggtatggttgtttgtatttgtagttttagttatttaagaggttgaggtaggaggattttttgagtttagtaggtttaggttgaaatgagttatgattgtattattatattttagtttgggttatagagcgatatttttgttttaaaataaaaataaaaattaaataaaaaaaattttttaaaaattatgagatgaaatagttgagtttattttggatttttagatgtgtaatgattttagtgggtttaatttcggataatgttatttattttatatggattttattatttgttttttaattaatattttttttttaaaggataaaagtatttagagtgtagtgtagatttaggggattttagttttattttttggaattttggtattattttttgtttttgagatattttgtttgttagtttgttttgaagatttgaaattggttttatcggtaagtaattagtggtggaggtgtttgttggttttgtgttggggatataatggtggttaaaatagtttcgggttttgtttttttggagttgttagtttaataggagagatagataggtttttaaatagtgttggtttagaggggttagggttgggataggtagaggggtaggagggtaatgggggaagtatcggtagaaatgggattggggagttttaggtagggggtttagggttaggataggggaggtttaggtagagaggtgggagggggatggaggagatattggtaggtagggtagggtagggatagcgaagtttttgaggattttttttaatattttttatttttttaattttttttgaatttttttgtgatttttttgttttaaggaggattttgttttgaagatttttttttttaagcggggttgttttttttttttcggtttttatgtttattggatttgtagatgggagaagagcgtttttgttttttattggtatttttaaattattgtttttgttttttttttgaattttaggtttgaagtttatatagttatattgtagtatttgtttttttttgtgttgttagatttattgatttttaagttatttttgtttatttcgttatttagttttaggtttattgttatttatattatttttgttattatttttggtgatttttaaatttaggtaaatgatttttttattattttggttttttggtgttttgatttttttttttttattgtatttgttttttatttaattttttttttttatgattatatttagattttgtgttgggaatatataataatatataattgtgatagttttagaggttttagtttggtgggggagaaggatttattttagatggtaatagtcgtataattatagtttttatagaattttagttttatgtattttacgttttgttcgttattttttgtttttttagtttattttttttaaagattgtattagtgagtttttagttttaattatttattaagttgtttgatttgttgttattttttttttaattatggttatattatttttaattatttagttagattttttattattattattattatatttttgtatatttttaaattatgaattgaatttaattttttatttattttgtatttgtatttttggtagttgaatgtggatggagaaaaatatagaattattttggttggtttcggttttgatttatgattataaatttaaatgtttaatgttgattagtaattttattatttgtttttagtttatttattttttatttttttttattttgttgatggtatagataatatatggttatgggttgaattgtttttttatatatttatttgttgaagtttttatttttattgttatggtatttggaagtgatagtattgggagggattagggttggaggaggttatgagtgtaaatttttattatgggattagtgattttattattattattattatttttgagatagagttttgtttttattgtttaggttggagtgtaatgatatgatttcgttttacggtaatttttattttttaggtttaagcgatttttttgttttagtttttagagtagttggtattataggtatgagttattacgttcggttaattttgtatttttagtagagacggggtttttttatgttggttaggttggtttcgaatttttgattttaggtgatttatttattttggttttttaaagtgttgggattataggtgtgagttatcgtgttcggttaggattagtgattttttaagagggagagagggagagatgtaatttaggaagagggtttttatagagaattatattaattagtattttgattttggattttttagtttttagagttgtaagaaataaatttttgttattggaattatttagtttatggtattttaagatagtttatataaataaatatatatgtattaatttttaaaattttattaaggtataatttatatattataaaatttatttattttggtttggcgcggtggtttatgtttgtaattttaatattttgggaggttaaagtaggcggattacgaggttagtagtttgagattattttggttaatatggtgaaattttatttttattgaaaatataaaaattatttgggtgtgatggtgtatgtttgtagttttagttatttagaggttgaggtagaagattcgtttgaattcgggaggtagaggttgtagtgagttaagattatgttattgtattttagtttggcgatagagtgagattttgttttaaaaaaaaaaaaaaatttatttattttaattttattgttcgtttaattttggtaaatttatagttgggtatttattattataatttaattttagaaaattgttaatattttattttatataaatggaattatataatatgtagtttttttttttttttttgatttagtataatgttttatattgttgtaaattttttttttatggttgagtattttattttttggaattttattggtttgtttatttgttgatgggtttttgagttgtttttagtttgggttattatgaataatgttgttatgaatatttatgtataaatatttgtgtagatttattttaattttttttgggataagttttaggagtaaaatggttgagttatatgttgagtatgtttattttttgaagaaatgggaatatttttttttaaagtgattgggtttattttattttttttagttttttttttttatttttttgagatagagttttgttttgttatttaggttggagtgtagcggcgtgattatagtttattgtagttttgatatttaaggtttaagtaatttttttgttttagtttttcgagtagttaggatt

SEQ ID NO: 121 - DNA, 5377 bp, Artificial Sequence
  chemically treated genomic DNA (Homo sapiens)
gggggtgttcgttggtttttttgggttaggttgattattatggtgtttttttgtatagagatatcgggaaacggttcgaggtgcggaagatcgtgatcgcgtgtttgggcgagtttaattatattattcggttggagtacgtttaggcgcggtttattttgttttataatcgtcgtggcgatttggttatttatttggttagttttatgggtattcgttttattttgttggtagttaggtgtttgttttgtttttgttcgttttgtttagcgtcgtcgttttttatagttcgcgtgtttgtttttgttcgtttatacggtttagggggtattgagtgttatttagtggggtatttttggtattttgggagggataattttgttttgtgggattgttttatgttgtaggaatttttggtttgtaattatttaatgttagtagtgtgttttattttgtgcggtgtttgtgtatttttttagaattttttagttgagtacgtttggtttattgagaaatagttaagttagtaggtatttttggttttatggggttggtttgcgtgggggaagggtgtgtggtttatgtgttgtgggttagatgtttttggtttggggtttcgtagaggttttagggttgtgtgtatttttttttttaggttatatgattatttcgtagatgggtttaatgattgggtttttatgataatttatttttgggatgaggatttttttggcgagtgggttttagagattgaaaatattagcgaagttaataattatggtattgggggtatttgaggggtaggggtacgaggtggagggttggtaggatttcgagtattgggtgtggtgttagtattgttttaatttttgtttttttttcgttttggaatagggacgttgattaagtttattttcgtattttatggtatcgtttttgaggggttgttcgtatttttagaaagtagtggttgtaagatttttacgtttagttaggtttgtgtgggttagtagtgggtgttgttgggttttgggggtttgagtttgggggtaaggcgggtgtttgttttgaagtttagttttaatagaaaaaagttttaagagatttagggtttttggggtttttgggatgattatagttttggggttggaggattttggggatgtggtgatttggtttggggttgttgtggttttggggttatagtttgtttagttgatatatatttgtttttttttttacgtcggtagtgtgcgaggaaggtttttttttgtattagaagagttgtgtttagtattgttttttagggttcgttttttaagttttcgatacgtattatagtatcgagaatgacgtggagattattcgggttagcgtttgcgttttttgttacgttttatgtgttatatgttaggggtcggttttgatagattgttttagttgttttagttacgtttttttggattttgtggagtagatttgttttcggtaaagttagagtagtcgagagttttcgttatagtagtagttatttcggttgttttcggaggtggaggcggggtaacggttgcgggtagggttgttgtttttatatttgtttgaggtggtggtcggttttagttgcgtttttatcgtgttggttttcgttattgtttttttggttttgtagttgcgttttggttttagttttcggggggtgaaggtgtatattatggatcgtggttttattttttataaggggttgttttttgaagtttggtaggaggagtgttcgtttgatttagaagaggacgagggtcggggcgagaggatcgtttttattaaagattagagcgttttttgatgagtttattgtttatttttttaagttaattttttttttgggtattttttaatttattaaagtatttttttattttgggattgggtttggattttagttgggaggtaagaggggtggagattgttttttattttattttcgggtttatttggttatttgaggtgggtttaggattagttggggcgtggggagggtcgtattttatttttagtattttttttatgtggagaaaggagtgaaatttttagggtagtttgtttcggtttcggttttagttagagtttttgcggagtgaagaggggtagtttttgtttgttgggatttttgatttaggtcgtagtttttgtttttttttgtttttttaaagtaataatggttttatttaggtagtcgggggttggtttaggagatatttgagggaggaggttatttttttaagggtttttgtattttttattttgttttttagttttggtgagttttggcggtagtagttattataggaagggattaaggtaaggtaggtgtttttaggtgtgtacgtggtatgtggtttgtggtttgtgttttatgatttatttttgtgtttcgtgtttttattattattggttattaggttggcgtagttaaggtcgaagttttggttgaattttgtgttggtgttttgattatcgtttttttttttgtattcgtttttttcgttagggtttaagtttttgttttttgagttcgggttgtttgggttgttggtatttatagatttggagtttttgggtgggtggtggggaggggcgttggtttagtcggtttttttggttttttattcgatgttgtttttttttgtggggattttaggggttgtttgaggatatatttttattttgtgattattttattttagatgttgatgatttgtttttgtatttttaatgggggtagtagttggattatttacgtttttatatttatcgttcgttttgtttttttttggttgttttggttttgaggtgtgggggttgtagtatgttgttgaggagtgaggaatagttgagttttaagttttgaagaggcgggttagttaggcgggtttaaggaaagggggttttagtgggaggggtaggttgatatttgtgttttaagtggggttcgttatgtcgggggtttataggttattggttttttaagtgttagaggtgggtaggtggtggtattgagtttttttaatattgtgttttggtggagaaagtattgatttgttatgttttttttaaatttttttttttgacgtgttttttgtattttttttattaggataattagtttttttttatttgggagttttttttttttttttattttagttatttttggtatttagttatttgtttaggggtgttttttttttttttatttttttgttttcgtggttagttcggttggttttgtaagatgttgggttggtgtatagtgattttttttttgtaatttaaataggtttagtattgttggttttatttaatggatatgagataatgttagaggttttaaagtgattaaacgtgtagattatgtaaattaggtttagtttttagtgtggtatcgttgtttttgtatcgtagttgaggatagggggttagttaggtttatatagtggtttgtttgtttggatgtgggtttaagttagaaggttaaagttttttaaggggcgggaggatgcgttagtttttagtggaggagttggtgtttttggggtggggttggtgatttttggtttttaggagttgagtattaaatttttaaagttttggtttttagtagtgtgaagaattgggtttattgtgtttttttgggttgaagtgatttggtcgttataggttatagggttgaggtttaaggtggagggaggtttgattgaattaagatgattttttgtggggagtttgagttttaaatggaaaattttacgtttgttcgttttttaatttttgttttttgatttttttaggttttttttgggataggaagtttttgtttgggggtaggaggatggggataaaattattaggatttgtattcgagaagtagtttttgttcgggatatttatttggaaattttatttaaatggaagttggcgtttgagtttttttttagggaatttcgtgaggtggggagggttgggattagggtttttttttttttttttgcggtggttttggtttggtgttaggattgcgcgtttttttttagtattcgcggatattttgggtttttttgggtttagtatttgtttggggtttcgttttgggtttttttttttgatttttattttgcgttttttttcggtgttttcggggcgttgtcgggttttggggtttgcggggcgcgggcggtttttggttgggttattttttttcggtttttttttttttttcgttttcgtggtcgtgcggtcggttagaggttgcggtttagcgcggagtaggggggttggtaggcgtcggggcggtcgggtcggtttcgttcgtttttttttttttataggttcgtttcggggtttgggttaattgaaatcgcgggaggaggaagcgcggaattaggaattggtcggggttcgtatcgggtttgagtcggttcgaggtcgttttaggagtagttgttcgtgcgggtatttttagtttcggggtttggaggagcggtgggagttgggggcgcggtaggtaggggtagagtaggcgtttcgagggttagagatttatttaggtgggggtaggggtcgcggaagggcggggatggtcgtaggggtagggtttaggttgtgggcgtttgaggttttagttggggtaggtttggtttgtcgaggatttgggtaagggtgtttttgtaaggggtggtgggtggaagggtttggggagggaggttttaggttggtttttgttttcgaacgtgcggaggagattttgacgttaaggaagtaatgagggttagtttttaggttaggttgttgttgggtatttatggttgcgtgtgagcgaggtaggattttatttttttttcgtttgtagtttattttgattttatagtttttagttttttcgttttatgttttcgtttttagttgttgttttgtttttagggatggttttttttttgtttttagaatagtattatgggttttttttttgagttgtgtagtttttagggttacggggttttgtagtaaatgtaggaggtcgagtttcgtttattggagggtatgagaaagtggatggtttagcgggttaagagtgatagggagtatgtaggattgttttattatatgtttttgtaggatagtgggggttagagtcgggttattagttttgatagttttattagttaggtgggtttttatgggattttggtgggtgttggttgtatttgttttttttttttttttttgggggttttttggggtagtggttggagatttggtaggttaaggtttgggagttattgtgtttttttttttgttttttttatttgtgttatatagt

SEQ ID NO: 122 - DNA, 5377 bp, Artificial Sequence
  chemically treated genomic DNA (Homo sapiens)
attatatagtatagatgggggaggtagggaggggggtataatggtttttaagttttggtttgttagatttttagttattgttttagagggtttttaggagaggaaggagaaggtagatatagttagtatttattagagttttatagagatttatttgattgatggggttgttagggttgatggttcggttttggtttttattgttttgtagggatatgtggtgaagtagttttgtatattttttgttatttttgattcgttgggttatttatttttttatgttttttagtagacgaagttcggttttttgtatttgttgtaggatttcgtggttttgggggttgtatagtttagaagagaagtttatagtgttgttttggggatagaaaaggggttatttttggaggtaaggtagtagttggagacggaggtatgggacgaggaggttggggattgtagggttaggatggattgtagacggggaggaggtggggttttgtttcgtttatacgtagttatgggtatttagtagtagtttggtttggggattggtttttattgtttttttagcgttagggtttttttcgtacgttcgggaataggagttaatttggagtttttttttttaggtttttttatttattattttttatagggatatttttgtttaggttttcgataggttaagtttgttttagttgaagttttaggcgtttatagtttgagttttgtttttgcggttattttcgttttttcgcggtttttatttttatttgggtgggtttttggttttcggaacgtttgttttgtttttgtttgtcgcgtttttagtttttatcgtttttttaggtttcggggttagaggtattcgtacgggtagttgtttttgggacggtttcggatcgatttaggttcggtgcggatttcggttagtttttgatttcgcgtttttttttttcgcggttttagttggtttaggtttcggggcgggtttgtggaggggaaggggcgggcgggatcggttcgatcgtttcgacgtttgttagtttttttgtttcgcgttgggtcgtagtttttagtcggtcgtacggttacggaaacggaagggaggagggggtcgggaaagaatggtttagttaagagtcgttcgcgtttcgtaggttttagggttcggtagcgtttcgggaatatcgggaaggggcgtaaggtgggggttaggagggggagtttagggcgaggttttaggtagatgttgggtttagggaagtttagggtgttcgcgggtattgaggggaggcgcgtagttttagtattaggttagggttatcgtagaagagaaagagggaattttggttttagttttttttattttacggaattttttaaggagaggtttaggcgttagtttttatttgaataaaatttttaagtaaatatttcgaatagagattgtttttcggatatagattttagtggttttgtttttatttttttatttttaggtaggggttttttgttttaagggagatttggggaaattaaggggtaggggttggggagcggataggcgtggagttttttatttgggatttaggttttttataagaagttattttgatttagttaggtttttttttattttaggttttagttttatagtttgtggcgattagattattttagtttaggaagatataataggtttagttttttatattgttggaaattaggattttgggagtttagtgtttagtttttgaggattaggggttattagttttattttaggggtattagtttttttattaggggttggcgtattttttcgttttttggaggattttggttttttgatttgggtttatatttaggtaggtaggttattgtgtaggtttaattggttttttatttttagttgcgatgtaggagtaacggtattatattggagattgggtttggtttgtatagtttgtacgtttaattattttaaaatttttaatattattttatgtttattaaatagaattagtaatgttgggtttgtttaaattataagaaaaaaattattgtgtattaatttagtattttataaaattagtcgggttggttacgagggtagggggatgggagaggagggggtatttttgggtagatggttgggtattaggaatggttagggtagaaaagaaaaggggatttttagatgggaggggattgattgttttaatgggaggggtgtaaaaggtacgttagaagaggaggtttgaggggggtatgataggttagtgttttttttattagggtatagtgttgggggggtttagtgttattatttgtttatttttggtatttggagagttagtgatttatgaattttcggtatggcgagttttatttgaaatatagatgttagtttgttttttttattgggattttttttttttgagttcgtttggttggttcgtttttttaggatttggggtttaattattttttattttttagtaatatgttgtagtttttatattttagggttagggtagttagggaggagtagggcggacggtgggtgtgagaacgtgggtagtttagttgttatttttattaaaaatataaaaataaattattagtatttaaagtgaaataattataaagtgaaaatatatttttaaatagtttttgaagtttttataggggaaagtagtatcgggtgggaggttagagaggtcggttgggttagcgtttttttttattatttatttaggggttttaggtttgtgagtgttaatagtttaggtagttcgggtttagaaaatagggatttgggttttgacgggagaggcgggtgtaagagaggggacggtggttaggatattagtatagggtttagttagagtttcggttttggttgcgttagtttggtggttagtggtggtggaggtacggagtataggggtgggttatgggatataggttataggttatatgttacgtgtatatttggaggtatttgttttgttttggtttttttttatgatggttgttgtcgttaagatttattagagttgggggatagggtggagggtgtagaagtttttggagaggtggtttttttttttagatattttttaggttagttttcgattgtttggatgggattattattgttttagagggatagggaagggtaagagttgcggtttgggttaggaattttaataagtaagggttgtttttttttatttcgtaggaattttggttggggtcggggtcggggtaagttgttttaaaggttttatttttttttttatatggaaggggtgttgagggtggggtacggttttttttacgttttagttggttttgggtttattttaggtggttaggtgggttcgagggtaggatgggaagtagtttttattttttttgttttttagttggggtttaaatttagttttaagataaaaaaatattttggtgaattaaaaagtgtttaaggaggggattggtttgagggggtgggtagtgggtttattagagggcgttttggtttttgataaaggcggttttttcgtttcggttttcgtttttttttgagttagacgggtattttttttgttaggttttagggggtagttttttgtaggagatgaggttacggtttatggtgtatatttttatttttcgaaaattaaagttagagcgtagttgtaggattaggaagatagtgacgaagattagtacgatgaaggcgtagttgaggtcggttattattttaggtaggtgtgagggtagtagttttgttcgtagtcgttgtttcgtttttattttcgggggtagtcgaggtggttgttgttgtggcggggattttcggttgttttggttttgtcgggagtaagtttgttttatagggtttaaggaggcgtggttggggtagttgaggtagtttgttagggtcggtttttggtatgtggtatatgaggcgtggtagggggcgtagacgttggttcggatggtttttacgttattttcggtgttatagtgcgtatcgaggatttggggggcgaattttggagggtagtgttggatatagtttttttggtgtagggagaagtttttttcgtatattgtcggcgtgggagagagggtaagtgtgtgttagttaaatagattgtagttttaggattatagtagttttaagttaagttattatatttttaggattttttagttttaggattgtggttattttaagagttttaggggttttaggttttttgagatttttttttgttagagttgggttttaggataggtattcgttttatttttagatttaggtttttaaagtttaatagtatttattattgatttatataggtttgattggacgtgagggttttgtagttattgttttttggaggtacgggtagttttttaggggcggtgttatagagtacgagggtgaatttggttagcgtttttgttttagagcggggaggaggtaagagttaagatagtgttggtattatatttagtgttcgagattttgttagttttttatttcgtatttttattttttaagtgtttttagtattatagttgttggtttcgttggtgtttttaatttttaggatttattcgttagagggatttttattttaggaatgagttgttatgaaggtttagttattaaatttatttgcggagtagttatgtggtttggggaggggagtgtatatagttttgaggtttttgcgggattttaagttagggatatttaatttatagtatatgggttatatattttttttttacgtagattaattttatggggttagaagtgtttgttggtttggttgttttttagtgagttagacgtgtttaattgggggattttagaaaggtatataggtatcgtataaggtggggtatattattgatattaaatggttgtaagttagggatttttgtaatatgggatagttttataggataaaattgttttttttaaaatgttaagagtgttttattgagtagtatttagtgttttttgggtcgtgtgagcgagtaaaggtaagtacgcgggttgtgagaggcggcggcgttgggtagggcgggtagggatagagtaagtatttggttgttagtagggtggagcgggtgtttatggggttgattaggtggatggttaggtcgttacggcgattataggatagggtgagtcgcgtttgagcgtgttttagtcgagtgatgtggttgggttcgtttaggtacgcggttacggtttttcgtatttcgagtcgtttttcgatgtttttgtgtaggagagtattatgatggttagtttggtttagagggattagcgggtattttt

SEQ ID NO: 123 - DNA, 6082 bp, Artificial Sequence
  chemically treated genomic DNA (Homo sapiens)
  unsure (1153)
tgtaatttttgtttttcgggtttaagtaatttttttgttttagttttttgagtagttgggattataggcgcgcgttattgtacgtagttaatttttgtatttttagtagagacggggttttattatgttggttaggatggtgtcgattttttgatttcgtgatttgtttattttagttttttaaagtgttgggattataggcgtgagttatcgcgtttggttaatatttgttttttaattaatttgtttgtttagattttatttaatgtaattatatttttaaaatattattatttgaatatgtaattaatatagaaattattgatgagatattttatattttttttataataagtttttaagatgcggtgtatattttttatttatagtatattcgttagtattagttatattttaagtgtgtagtggttattgtgtgggttataggtttagaatataagatatgaagatggagagtgagaaatgtttttggaaaggttggaagtttttgtttttttgttgttaattattaaattttttgagagtgttattaaggagtgatttaaagtattatataaagagaattataaatattttaatattatatttgaaatttaaatgtataattttttatatttggttggtattttagagaggagagaatgggtatagttatttatattatttatttgagttttataattatttgtgatgtggttttttttaggtgggaaatcgaggtttagaacggttaagtgattattttagggtggtaagattataagtggaagggtgtgaatttatattgtttttagcggataagaataaaaagatttaggttgggtgtggtggtttatgtttgtaattttagtattttggggaggttattgtaggtggattttttgagtttaggagtttattattagtatgggtaatatggtgagattttatttttattaaatatatagaaaattagtttagtttttcgggaggttgaggtgggaggattatttgagtttgggggatggaggttgtagtgagttgaggaacgtgttattgtattttagtttgggtgatagagtaatattttgttttagaaagaataaaaagatttggttatgaattcgttagttagttttttttatataatttntggataaggagatttgatatttataggtttttttttagaagtgggagagttttaaggttacgtggttcgtttagtttttgttattttattagatattgtttattttgtatgttggattagtattttagtgagaagatagtaggtatttttatttatgtagtttatttagtttttataattatttgtgatggaggtaaggtaagtattttagttttttttgatgagtgggaaattgagatgtgttttttttttgttttttatcgaggatttttgtatgtaggtatgaattttaggagtttagttgatattggagagacggggcggggggaattagttgtagggttttggaggaagttgttgtgtatatttgtaaggttgtaggttatatttatttgttaagtagtgaaggaaggaagttgtttttaagggattggaaaaatttattaattagtagaatgagaaattgaggtgaagtaggaggtggtagggttttagatagtatgttggattagtggtttgtgttattgtgttttttgtaggcgggtggtatggggtgtatgttgattttttattttaggagttggtgttaggaggttaggtttttttaatatttttgttttatagatgttaaatttgagggttagaggggtaggagaggaagagattttttgtattttttttgggaaagaataagagggaagttggtagatgaatttgaagtgtattgattagggagttgagagagggcggtttgtagttagtttatatttgggaggaggcggtaggtttttttggggatagagtggttaagtcgaagtaagtttaattattttaatatgatattatttttttttattggaatttgagaatttgtttagtattttgatatttagtaagggatttgggtttttttggttaggtgtgcgtttttgggtgataggtttgtattaggtgtattttcgggatgtagtaagttgtggaatatgggtttaggggtattttttggtaagtattgtttttattttagttttgggaatgtgttttatgtagtgttttagatggtttatttgtggtttgtttttaagggttttttttttagttagttagttttgagatagagttttatttcgttatttaggttggagtgtagtgatgtaatttcggtttattgtaatttttattttttaaatttaagtaatttttatgcgttagttttttgagtagttgggattataggcgtgtattattatatttagttaatttttgtatttttagtagacgaggaattttattatgttggttagtttggttttaattttttattttaggtgatattttcgttttagttttttaaagtttcgggattgtaggtatgagttaatatgttttggtataagggtttatttttgattaatggaattgtaaattaagttttttttgttattagagttattttggatttatttttatttatttggtttggataaattgagtttgtattagatggagttaggtttgattaattttttatttatttttttttattttgttttttaatatttaaaaattttgaggtattattatatgttagttatatttttttgagtaaagtatttaatttttttgagttttagtttttttattgtataaaaggaataataaaatttattttttataagtttatagtgaggaatgaattaattttttattatagttttaaattaattttatttagggtatttttggtatatagtgggtgtttagtatttattttatttttttttttttgatttttttcgtaaaagtagaaaaatgaaagagaaatgttgattttttttttgatttgaaattattaaaatattttagtaagttttgggagggagttagtggtgtggtatgtgtatttcgttggttaagtatatgtgaacgaagttaagaatttaggggtttttttgttagttagtattgatttatttgcgaggggttttgtttggttcgggggaggtagggttgaagtattatattagggtatgtttcggggaagtagattttttgaataatttggatggttttttggagtatttaggatagaagttatttggaaaatagagatggttatttttacgtagttttgatagtgtttagaaagttttgttatttggtaaatgttaatagttatgattcgttttttaagattttggggagttttaagttttattttattagatttgagaagggtaaagggttgtagattttgtttttttaattggggttagtgtgagttatttttgatttagtgtttgtaatagattttgattttgtagtgggattttttaggtttttttgtttttcgtaatttttggatttatattcgttagatattatttgttattttttagtattagggagaattggattttttttggttttatatttttaggttttttgtaagtagttggtgagggtttttttttttttgtaagggaggttggtagaattatggatgtgattcgtataattttagagataaaaagaaagtatttaggaggttatttattttagttgttttattgtataggtcggggagttgagtatggagtttagtagttattaattagttatttttgtatttggtttttatttattggtttttagtttgtttcgtgattttttattgttttttattttttattagagggattggttggttttagatggagtggtttttttaaaattttttttttaaattttttgagatagagttttattttgttatttaggttgtagtgtagtgttgcgatttcggtttattgtaattttcgttttttgagtttaagtaatttttttgttttagttttttgagtagttgggattataggtgtgtattattatgtttagttaatttttgtatttttagtagagatgggattttattatattggttaggttggttttgaatttttgattttaaatgatttgtttattttagtttttcgaagtgttgggattgtaggtgtgagttatcgtatttggtttgggtagagtgaagttttatgttggggagttattagtatgtttaaattttttgtaattgtagtatattttgtaaaattgttttttataaaagggtagaattatttgggatttttatgagattatttattttgtagtatatattattttgaagtttatattttggaaaattttatgatggtatttttaggtttgtacgtaatttgtatttaaaatatagttgtagaattgaattaaagtatttttttgtttaattaagatttataatttttttttttgagatagaatttcgttttgttatttaggttggagtgtagtggtgtaattttagtttattgtatttttcgttttttggatttaagcgatttttttgttttagttttcgaagtaattgggattataggtgcgcgttattacgtttgggtaatttttgtatttttagtagagacggggtttcgttatggttaggttggttttaaatttttggttttaagtgattttttcgttttagttttttaaagtgttgggattatagggtgtattattatatttagttaggatttatgatttaatttattgttggggtagttttataatttttttttggacgttttagtaagtttatattttaagtagttattatatggtatattttattttttgttttttttttttttttttttatttagatttttttaatttttggggttttttttttttttttagggttagtttgaaaaggaggatcgagtttattgtggagtatttatggagatgtggagttttgttattaatttttaattgtagaattgggatgtggagttggaagtgtttttttttttgggttgtgttggttatagttatattttgtatcgttaggtcgttttcgattttgtttgaataaggtaaggtgttggttgggggtagtttggatttttgggttttgggaataggatgggttgggagggaggtgatatggttgtaggtgatgtggttaatagggaaggtttttttttaagtggagtaaagaattttttttttgtaggagaaatttttaagatatttgggttggttttggtttggttataaatataattgattttattagaggttggggttatgaaggttggtgatatttatttatttgagatgatatgtttgtggggggtaatttatgtttttttttttttgaggaaagaatatttgatgaggattttagtgttatattttaatataggtgatgtataaaatgtagttggtggtgtaatggggagagaatgattttagaatttgcgtgtagaatttgggttagattataggggatgttgtaggaggtgagagtttgttaaagatttttgatttttagaaaattgttttaaggttatattttcgttaggtatagtgggttatatatgtaattttagtattttgggaggttaaggtaagaggattatttgaggttaggagtttaagattagtttaggtaatatagcgagattttatttttataaaaaaaaaggaaattaattgggtgtgatggtgtacgttgttagttttagttatttgttatttaggaggttgagataggaagattgtatgattttaagagttgaggttgtagtgaattatgattgtattattgcgttttagtttgggtgaaaaaaaggtatattttttataagggttagtagttatggttttacgtttgtatttttttatttttaattgtgttttataggttttgtttgggggtttgttaagcgatttgttttggataggtattgtttgaggggttttgaagtgattgagatttaggaagtataaaggggtatggagatttatggcgtgttggaaatttagagttattatcggtaataggaaggatttattttatta

SEQ ID NO: 124 - DNA, 6082 bp, Artificial Sequence
  chemically treated genomic DNA (Homo sapiens)
  unsure (4930)
tggtggggtaagttttttttgttatcgatgatggttttgaatttttaatacgttataggtttttatgtttttttatgttttttgggttttaattattttaaaattttttaaatagtatttatttaaagtaaatcgtttggtaggtttttaaatagaatttgtgagatatagttaaggataggaaaatgtaggcgtgaagttatgattgttgatttttatagaagatgtgttttttttttatttaggttggagcgtagtagtgtaattataatttattgtagttttaatttttaggattatgtaatttttttgttttagttttttgagtagtaagtagttgggattagtagcgtgtattattatatttagttaattttttttttttttgtagagatggggtttcgttatattgtttaggttgattttgaatttttggttttaagtgatttttttgttttagttttttagagtgttgaggttatatgtgtgatttattatgtttggcgaagatgtggttttgaaataattttttggaagttagaggtttttagtaagtttttattttttataatattttttgtagtttgatttaagttttatacgtaaattttaaggttattttttttttattgtattattagttgtattttatatattatttatgttaaagtgtgatattagggtttttattagatattttttttttagaaagagaaaagtataaattattttttataaatatgttattttaggtaaatggatgttattagtttttatgattttaatttttgatgaagttagttatgtttataattagattagaattaatttaggtattttgagagttttttttataggaagggagttttttgttttatttgggaaggagttttttttgttgattatattatttgtaattatattattttttttttagtttattttgtttttaaggtttaggagtttaggttgtttttagttagtattttattttgtttaggtaaggtcggggacggtttagcggtgtagagtgtggttgtgattagtatagtttagaagaggaggtatttttagttttatattttagttttgtagttagaggttggtgataaggttttatatttttatggatattttatagtgagttcgatttttttttttaaattgattttgaggaaaggaaaaaaattttaaaagttaggagggtttaggtaggggaggggaaaggaaaaatagaaggtaaagtatgttatgtggtggttgtttaaagtgtggatttattaaggcgtttagaagaaaattgtgaagttattttaataatgaattagattataggttttggttgggtgtggtggtgtattttgtaattttagtattttgggaggttgaggcgggaggattatttgaggttaggagtttgagattagtttggttatggcgaaatttcgtttttattaaaaatataaaaattatttaggcgtggtggcgcgtatttgtagttttagttatttcggaggttaaggtaagagaatcgtttgaatttaggaggcgaaggatgtagtgagttgagattgtattattgtattttaatttgggtgatagagcgagattttgttttaaaaagagaggttataggttttaattggatagagggatgttttagtttaattttatagttatgttttgagtgtagattacgtgtaagtttgggaatattattatgaggttttttaaggtataaattttaaagtagtatgtgttataaagtgaatggttttatgaaagttttaaatagttttgtttttttgtgggaaatagttttataaagtgtgttataattgtaggaggtttgagtatgttgatggttttttagtataagattttattttgtttaggttaggtgcggtggtttatatttgtaattttagtatttcgggaggttaaggtgggtagattatttgaggttaggagtttaagattaatttggttaatatggtgaaattttatttttattaaaaatataaaaattagttgggtatagtggtatatatttgtaattttagttatttaggaggttgagataggagaattgtttgaatttaggaggcggaggttgtagtgagtcgagatcgtagtattgtattatagtttaggtgatagagtgagattttgttttaaaaaatttaaaaaaaaaattttaaaaagattattttatttagggttaattagtttttttggtgagaaataaggggtaatgaagaattacggaataagttaaggattagtaaatggaagttaggtatagagataattagttagtagttgttggattttatgtttaatttttcgatttatgtaatgaagtagttgaaataaatgattttttgggtattttttttttgtttttaaaattgtacgaattatatttatagttttattagttttttttgtagagagaagaaaatttttattagttatttataaagagtttaagagtgtggagttaggagggatttagttttttttgatgttggaaggtgataagtgatgtttgacggatatgagtttagaagttgcggggggtaagggggtttgggaggttttattgtagaattaaggtttattgtaagtattgagttaaagatggtttatattggttttagttaaaagaatagaatttgtagttttttattttttttaggtttggtggggtaaaatttaaaattttttagggttttaaagaacggattatagttgttaatatttattaagtgataagattttttgggtattgttaaggttacgtgggggtgattatttttattttttaggtggtttttgttttaaatgttttagggagttatttaagttatttagagaatttattttttcggaatatgttttaatgtggtattttagttttgtttttttcgagttaggtagggtttttcgtaagtgagttagtgttggttggtagaaaagtttttggatttttggtttcgtttatatgtgtttggttagcgggatatatatgttatattattagtttttttttaaggtttattaaaatgttttaatgattttaaattaaaagagaagttaatattttttttttatttttttatttttacgaaaggaattagaaaagagaaaatgaaatgaatattgaatatttattatgtattaaggatgttttaagtagaattaatttagaattatagtgaggaattaatttattttttattataaatttatgggggataagttttattattttttttatgtaatggagaaattgaggtttaaagaggttaagtattttatttaaggaaatgtagttagtatgtaatagtgttttaaggtttttggatattagagaatagggtgggaggaagtaaataagggattgattaagtttgattttatttgatgtaaatttaatttatttaaattaagtagataagggtaaatttaaggtaattttggtaataaaagaggtttgatttgtagttttattggttaaagatagatttttgtgttagggtatgttggtttatatttataatttcgggattttgggaggttgaggcgggagtattatttgaggtggggagttgagattagattggttaatatggtgaaatttttcgtttattaaaaatataaaaattagttgggtgtggtggtgtacgtttgtaattttagttatttaggaggttaacgtatgagaattgtttgaatttgggaggtggaggttgtagtgagtcgagattgtattattgtattttagtttgggtgacggagtgagattttgttttaaaattaattaattaaaagaaagatttttggaagtagattatagatgggttatttaggatattgtatggggtatatttttagagttgggatagaagtagtgtttgttagaggatgtttttaaatttatattttataatttattatatttcgaaaatatatttgatgtaggtttgttatttagaaacgtatatttgattaagaaaatttaggttttttgttaagtgttagaatattgaataagtttttaggttttaatgggaaagagtggtgttatgttgagatggttaagtttgtttcgatttggttattttgtttttagaaaagtttgtcgtttttttttaggtgtgggttggttgtagatcgtttttttttagttttttggttaatgtattttaaatttatttgttagttttttttttgtttttttttaaaaaaggtataaaaagttttttttttttttatttttttggtttttaagtttgatatttgtaaaataaggatgttaagaaaatttggttttttggtattaatttttggaataagaagttagtatatattttatgttattcgtttgtaaaaaatatagtgatataggttattagtttaatatgttgtttgggattttgttattttttgttttattttagttttttattttattaattaatgaatttttttaattttttagaaataattttttttttttattgtttgatagatagatgtaatttgtagttttgtaggtgtatatagtagttttttttaagattttgtagttggtttttttcgtttcgtttttttaatattagttaggtttttgggatttatgtttgtatgtagaggttttcggtggggagtagagagggggtatattttagttttttatttattagagggggttgaaatatttgttttgtttttattataggtggttatgaagattgaatgggttgtatgggtgaaagtgtttgttgtttttttattggagtattgatttaatatatagggtggatagtgtttggtgagatagtaggggttggacggattacgtgattttgaagtttttttatttttaagagaaaatttatgaatgttagatttttttgtttanaaattatgtaaggaaaattagttgacgaatttatggttaaatttttttattttttttgagatagagtgttgttttgttatttaagttagagtgtagtggtacgttttttaatttattataatttttattttttagatttaagtgatttttttattttagtttttcgagaagttgggttaattttttgtatatttaataaaaatggggttttattatgttgtttatgttggtaatgaatttttgggtttaggagatttatttatagtggtttttttaaagtgttgggattataggtatgagttattatatttagtttgggtttttttatttttgttcgttggagatagtatgaatttatatttttttatttatgattttgttattttgggatagttatttaatcgttttaagtttcggttttttatttagaggaagttatattataggtgattatgaggtttaaatgggtggtgtgggtgattgtgtttatttttttttttttaaagtattaattaaatgtaaagaattatgtatttggattttagatataatattaagatatttataattttttttgtgtagtgttttgagttattttttaatagtatttttaggagatttggtaattggtagtagaaggataggaatttttaatttttttaaaggtattttttattttttatttttatgttttatattttagatttgtggtttatatagtggttattgtatatttgaaatgtggttggtgttaacggatatgttataagtaaaaagtatatatcgtattttaaaaatttgttatgaaaaaaatgtaaagtattttattaataatttttatattgattatatgtttaaatgataatattttggaaatatagttatattaaataaaatttaaataaataagttaattaaaaaataaatattggttaggcgcggtggtttacgtttgtaattttagtattttgggaggttgaggtgggtaaattacgaggttaagaggtcgatattattttggttaatatggtgaaatttcgtttttattaaaagtataaaaattagttgcgtgtagtggcgcgcgtttgtagttttagttatttaggaggttgaggtaggagaattgtttgaattcgggaggtagaggttgta

SEQ ID NO: 125 - DNA, 9018 bp, Artificial Sequence
  chemically treated genomic DNA (Homo sapiens)
tttgggaggttgaggtaggagaattatttgaatttaggaggtagaggttgtagtgagttaagattacgttattgtattttggatgatagagtaagattttattttaaaaaaaattaaaaaataaaaataaaaataaagataaaaataaaataattaaaaaaattcgaataaataaaaaaataaaaataaagaaaaattaagtgtttgttacgttttaatttattttatttttttagtgattttattaaagatttaggagaggtcgggtgcggtggtttacgtttgtaattttagtattttgggaggtcgaggcgggtggattacgaggttagtagtttaagattagtttggttaagatggtgaaattttatttttattaaaaatataaaaaattagttgggcgcggtggtaggtatttgtagttttagttatttaggaggttgaggaaggagaattatttgaattttgagggtggaggttgtagtgagtcgagatcgtgttattgtattttagtttgggtgatagagtgaaattttgttttaaaaaaaaaaaagaaaaaaaaaatttaggaaataagaattattattttttttattttatagttgagaaaatggaaaatttagataatttaagtaattggtttgaggttatatagcgtttgtttgtttgtttgttttttttgagacggagttttttttttgttatttaggcgggagtgtaatggtacgatttcggtttatcgtaatttttgttttttaggtttaagtgattttttcggtttagttttttgagtagttgagattataggtatgtacgattatgtttagttaattttgtatttttagtagagacggggtttttttatgttggttaggttggttttgaatttttgattttaggtgatttatttgtttcggttttttaaagtgttgggattataggtgtgagttattatgttaggtttttttttgttgttttttgagagggaattttgttttgttatttaggttggagtgtagtggggcgattttagtttattgtaatttttgtttttcgggtttaagcgatttatatgttttagtttttagagtatgtgggattataggtatgcgttattataagcggttaatttttgtgtttttagtggagacggtattttattatgttggttagtttggtttcgattttttgtttttaagtgattcgtttgtttcggttttttaaagtgttggaattataggcgtgagttattgcgttcggttataggttataaagttattgagtaaagaaagttgtatttagttttttattttaagaaagttatttttttttgttttaaagtgaggttatatttttagaaggattttgttttcggggaagttttggttttggaatttaggtttagttttaagtttaaaattattgatgttgtttagtagtgggattaatgattttgttttatttaaatgttataagttttttgaagatgggttggagttgttagggtatttagtttttttttttatttagaagtaaatatttttattatagtttttcgattattttatatttttttatttgagtgttttttttatgtcgagggtattattgagatgtagtttagagaatgaaatttttggtgttgtagggagtttagatttattcgggaaggtttatgagtattttatgttagtagtttttattttatttaacgtttttatagagtgaaggaatagttatttattataaaataaattattaaaagaaaaattttaaatttttaaaggagagaggtttatggtagtgagcgtttttattttttttttttttttttttttattattaacgggttagtagtataatttgttttttgaaatttttgggggtatcggagttttggtgtttttatttttttttttttttattgatgtattattattagagtgaaaaaagaagggcgtttcgagggtttttgaaaaaaaaaaagggtgattatttaagatattttgtaaaggggggaaaattgcgaagaaaagagattttagtagggggtggaggaattgtgaatgtgtttttgtttggcggtttttttagttgaaatttggtgttggcgttcgtagtttagtttaaattgttatttttagtttttattggtttttttgtttttgttttagaattttaatagattggggtttatttatttatttatatttcgtcgtggaagtttattaataggttttattagtaatattatttatgggaggttattgacgaaaggggttttagttatttgaagagggaagagaaaagaaaaaattgtaaagagattatttttttatttagaagttttagtggtgtgaaggtttttttggatggtttgaggttatttgaagattaaatatggggatataattgattttttaaaaataattttaaatatatttttttttttttttaaaattgaagagttttttgttgtggttttgtgggttttagttttttatatatgagttttttttagggaataaggagtttttgatagattggtgtttttttatttttataaaaaatatattttgtaaattgtgtttggatatgaaagtaggtgtttttatttgttatttttagcggaaagttttttttttatttaatatgtataaagttattgatgaatgggggatagggatagcggttttttgtattattaatttatgtgagaatgtgttaatagtatttttaatggttgatggatgcggtgtaggatgggaaaggaattgttttgagatattcgagttttttattggtggggaatataaagatgtaagtggtagtttgcgagtaggtagatacgtttagttgtattttttttttgagaatttgaaaatatattgttattaaaataattcgtgtgggagtgaatggttaagtgttaatttgggttgaggtgttcgttaatgtataggttttggggttaatttaggttagaggatttgattaaaaatatatttttttattaagtatatagagggataattttgtttaagaattagtttttattttgttgttattaaatttttaaaatataatgttatagttttttgtttgaggtagttaaatggattttttatttgtgtggtttttaaataatttgtataaacgttttttgtgttatatttgtgaataaaaatgattttttaattatgtagtattttgaaaaatatttttgtaaatgttatgaagggtgtaatgttagtgatataggtgtaaatatgtttttaaatttaggaaaagtttgttttttaagttaggtttgtttttaatgttttatttatttttaggttttaaaaggattttaaagtatttttgggtttagtgattttttttaaaaaaaaataattaaggttttaatttatatggttttgaatttaagtacggttgtttaggagttggatgaataaggagggagaaaaagtatatttaaaataaattatttcgaagatacggtttagtgaaaaggtaaatggatataggaattttaattagttatagtttggtgtgtagttgaagaattagattttgtatttatgatttttaatttaagatttagagggaggaattattttgtttaaggtttatttatggtagagttgtttttagatttttttgaatttttttttattaatttaaatatatattattaaatattttttttttttgatgtaattttggttttttttgagagagttatatttaaagttaggttgttttagtagttagttgtgtggttttaggtaaattatttaatttttttgattttgtttttttattagaaattgggaatagtattttgtagggtggttgggtagatgaaatagaattatttatgtagtgtgatttttttatagtagggtttttattaatatttagttttttttttttatttttattgtttagaaggatagaaatatgtaatgttttgcgaatatttttaagtggtttttttttttttaaaagttttagttgtttggtaatttttttcgtagtattaagtaggcgtattttaaagtttttttagcgggagggtagggttagagttttcggttatttgttttttaatttgatataaaataacgtaacgtagttatttagcgagtcgttggttagtttcgttcgttcggggaggagggaggaggtggcgcggggcgcgggattaggttttattcggaggttgtcgttgtatttttacggtcgtatcgcggtcgagttttcgtttttcgggtcggtgttttcggttgttcgaaggcgttcggagtcgcgcggaattcggggcggttcgggcgcgcggcgttgattggtagagagggcgtcgtcgtttaggaaacggttcgggttttagtgggggcgtgatttatcgcgagaaggcgggggcggcggcggcggcgcgggcggcggttggaggagagcgcggtggagagtcgagcgggcgggcggcgggtgcggagcgggcgagggagcgcgcgcggtcgttataaagttcgggcgtcgcggggttgtatgcggcgtatttggttcggcgcggcgattgtttttcgggttggcgggggtcggtcgcgagtttcgggggtttcgaggtcgtagtttgtttgcgcgttttgagttttcgtaattcgcgagtaaagtttggtggaggtaacgttaagtttgagttagttatttttttcgtttcgcgagttagagggtaggtttcgggcgttatgttcgcggttttttatagttttagtgcgtatagcggtgtagtatttcggggaaataaattcgaggtagttcgcgggcgttatgttcgcgttttttcgtagtttggggtacgcgtgaagttcgggaggtttggcgtcggcgaagatttaaggattatttttttgcgtttggagttgtttttcgtaatttcgggttcgtcgttttttttatttcgatttacgcggggcgcggggataatataggtcgcggaggagcgttgttatttaaggtaatcgtcgcgtaagacgtttcggggagtttcgttagtcggggacgtgggcgttacgggagttcgggacgtcgggtgtatcgtttttcgggcggggggcgcggaaggattagtattgtggaggacgtttcgtgttttttttttgtggttgtataggtgatgggggaggtgggtgcgtgttgacggtcggcgttttggaagttttgtttttgttatttttatttagatgttgatatttgtttttggcgttgacgtttttttttttgttaaattttggcgggcgtattttcgttgattgggcgcgttttttcgattttagagtagacgggcggaaggttcgtttgttcgtggtatagtttcgtaggtcggttttcggggttattttcgaggtgttttattcgtgtgttttgggaattttcgtattatttaggttttgcggagatttttttttcgggagggggtcgttggggtggggtcggtgatatttcgtaggggtggcgatggttaggggtggtattgttggggaggcgacggtttcggtgtttgggcgtttttcgttcgtagtcgtcgtcggcgttggagggagcgtagtgcgtttggggttagggggcgaattggatcgattttttttagttcgtttgtttgttttgtcgtagcggttgggagatgtcgaaagcgtaggcgagttttaatttgcgcgtttatttttttcggttacggggtcgcgttggggaaaaaagtcgagggttttgcgtggcgttggtttcgattttcgcggattacggatttggcgtaggaggttcgttcggggattattagttttcgtcgtttttttcgtatttcgtttttttgtagatcgttttttagattttttttttttttttttaatttaataaaatttatttttaaaggtaaatttgtttttaaatttagggtatttattatgtgtttggtgtgaaacgttattaatatttaaaattttattgtttttttggttttaaatttttgtaaattttttatcgggttcgatttatttttatttgaaaagtttgtttagtttgaatagaaaagtaattaggcgtttttttttttttttttggaatgttaattaaaatgtagatttttttgagttttttagcgtttcgagaagggggagaaaaataggatattttaggtaaataaatgaaagaagtgttgttttgaaagggggtggtggtggggagtatttttaagttgttcgtaagttttgattggacgtaagtattaaatcgggagggttttgtggttttgggttagtgtgtgttttttgagattttaatttgttgaggaatttttttttagttttgattttttgatagttttcgtttttatttagtgttggggagaagtagggaggttttaagcgaagagatgggtttgtattttggaggagtcggatattgttgatttttttgatgtgaaatttatttaggaataaaatattaggtgattttagtggtcgagttagtagtggatagattattttttaggtggaagtttaaagcggagggtattgtattggtttgtttttttggagggcgggggttttgggaatgttatggtaaattgaagagtttagtataggtttggtatggggatcgtttcgtagttaagttttttttgtttgttattttgtttgtttttgggggtaggtttgtgtcgaggtgaaaatggatcggggggcgggcggtcgagaagagttatttattagagggagggtgataatttttttcgcgtgtaggttgagaagagagtttttttttaaggggaaaaataaatacgttggggtttttattggggtttagattttaggaaggattatggtattgaaggtaggaagtcgggattgtggtcgttagcggtatgttgggtttgtatttttaatatcgagtttggggatttaattattttgtttaggaggtcgtattatatttttgtttattggtgtgaggaattgtgtagatttgtcgttttaggttttcgttttttagagttttggggagggggttgtcgtggggtttggatttggaaatggttgaaatgtaaatttttagtgttagttagcgggatgatggaacggtttgagatttagcggagcgttttgtttatttttttttgtttggagttaaggaggtttttttgggtagggataggtgggcgagtaggtcggggaaggagtttggggtgaaatttttgcgaggatttaggattgtttttgaagtcgtgttagaggtagaaaatttttttgtattttgtaaatgtttagtaaattaatgagaatgtttgtgtattttttttttatatgtatgtagaaatagattcgaaattattttttgaggtttttgattaagaggaaagaaaagttaagaggaaaaattttttaagttatttgaaagtatatgtatatatcgtgtacgtatatattatgtatatatatatatcgtgtatatatatatattatgtacgtatatatatcgtgtatatatatatatattgtatatatattttttttgtttttgttgtgaattatatcgttttatttgtgttatttttgaagtagaggttttttttattttttttttggaaatgatgtggtatattttttttttttttttatttttgtttttagttaaagttaaaaggagtagtttttatgatgagatttggggaggttttagtagtgttgaaattttatgatataatttgaaatatcgagtgggtatataaaaaatgtagagtttagagatttttgtattaaaggtttttttgttatttttagttttagaaaatgtggtttatttttgtggtttatagaatttgaagtttgagattgatgagtttttttttgtgattgttttaattattttttaaagtttgtgtattttattgtatttttagttatagagagtattgagtgaatttaaagttgtttggaatatattaagtttttttggaaaatttttttttttttggattaaatgggtgaatagaatattaagttgagtgtttttttttaatttatattttgaaaatttagttagtaggtttgtatatggaaagttattggtttaattatatattatgattataatttatataatttatattattattattaataaatttttgtattatttattagaatttgtatttgtttagtttttttatttttttatagaggttgaagatatttagtagttttggattgttatttagttataggggaagggaatttaggtttcgaagttttttttggattagttgcgttgaatgcgttgtagttgtgtttatttttcgtaagtggttgtttggcggaagattgaaagatatttttttatttgaaaatgaattttgataagtgtaaattggtgggaattttttgtagtttttttgggatttttttgattttgttggttttttttttttttaagagcgatagtgagggtgggagattgtttatttttagtttagtagaaatacggagttgtgagtagatttttttaatagtttagttttttaaagtttagttggattaagagaagggaacgaggttggttatgttaattcgagtatttttaatttgtttttgtagttgtttttgaaattaaggttacgttgtttttgtttattgagggcggtggaggcgatagtggatagtagaagagagtatatattgttttattgaagtggttgtacgtatttgagttttgtagttattgttttatttttgttttttaaaagtatgtttttaaaaagattagttttatatatttttgtggatcggtttggtggtattatttgggattttgaggtgaggatggaaggatttagtagataatgaaaaagaattttgtttgcgtatatttgagaggttgaaaaatggttttattttatttgggttggagtgatttggtattggggaagattttttgattcgttaattttttttttttagt

SEQ ID NO: 126 - DNA, 9018 bp, Artificial Sequence
  chemically treated genomic DNA (Homo sapiens)
attaaaggaaagagattggcgagttagggaattttttttaatgttaaattattttagtttaagtgggataaaattattttttagttttttaaatgtgcgtaaatagagtttttttttattatttgttaaatttttttatttttattttagagttttaggtgatattattagatcggtttatagaaatgtgtgaggttaatttttttaaaagtatatttttaagaaatagagataaaatagtagttataggatttagatacgtgtagttattttagtgaggtaatgtgtgtttttttttattatttattatcgtttttatcgtttttaatgagtagaagtaacgtgattttagttttaagggtaattataaaagtaagttaaaaatgttcgggttggtataattaatttcgttttttttttttagtttaattgggttttagaaagttaaattgttggaggagtttgtttatagtttcgtatttttgttgggttggaggtgagtagttttttatttttattgtcgtttttgggaagaaaggagattagtaaaattaaaagaattttaggaaggttatagaaaatttttattagtttatatttgttaggatttatttttaaatggagaagtgttttttagtttttcgttaagtagttatttacgaagagtgaatataattgtagcgtatttaacgtagttgatttaaaaaggatttcgaagtttgaattttttttttttgtgattaaatggtagtttagggttgttaaatgtttttaatttttgtagaagggtgaggaaattgagtagatgtaaattttgatgaataatgtaggaatttattaataatgatgatgtaaattatgtaaattatagttatggtatgtgattggattaataattttttatatgtaaatttattggttaaatttttagagtataagttagaagaggatatttaatttaatattttgtttatttatttgatttaagggaaagagaattttttaagaaagtttaatatattttaagtaattttaaatttatttagtattttttgtgattaagggtatagtaaaatgtataaattttagagaatgattaaaataattataagaaggggtttattaattttaggttttagattttgtgaattataggaatgaattatattttttaagattgggggtggtagggaggtttttaatataaaaatttttaaattttatattttttatgtatttattcgatgttttaagttatgttataggattttaatattgttggagtttttttaaattttattataaaaattgttttttttagttttgattgaggataaaaatggaggagggaaaagaatatgttatattatttttaaaggaggaataaagaaaatttttgttttaaagatagtataggtgaaacggtgtgatttatagtaaaagtaagaaaagtatgtgtgtagtgtgtgtgtgtgtatacggtgtgtgtgcgtgtatggtgtgtgtgtatgtacggtgtgtgtgtgtatatggtgtgtgcgtgtacggtgtgtgtatgtgtttttagatagtttgaaagatttttttttttaatttttttttttttttagttaagagttttagaagataatttcggatttatttttatatatatgtgggaggaaagtatataaatatttttattgatttattaagtatttgtagaatgtaggggaattttttatttttaatacgattttaggaataattttaagttttcgtagaggttttattttaggtttttttttcggtttgttcgtttatttgtttttgtttagaggagtttttttggttttaggtagagaaaggtggatagggcgtttcgttgaattttaagtcgttttattatttcgttagttggtattagaaatttgtattttagttatttttaggtttaaattttacggtagttttttttttaaaattttggaaggcggagatttaaggcgataggtttgtatagttttttatattagtggataaaagtatggtgcgattttttaggtaggataattaggtttttaggttcggtgttgggaatataggtttagtatgtcgttggcggttataatttcggttttttgtttttaatattataattttttttggagtttgagttttagtgaaagttttagcgtgtttatttttttttttgaaagggaattttttttttagtttgtacgcgggaggagttgttattttttttttgatggatggtttttttcggtcgttcgtttttcggtttatttttatttcggtataagtttgtttttaaagataggtagagtgataagtaggaagggtttggttgcggagcggtttttatgttaggtttgtgttgggttttttaatttattatgatatttttaaaattttcgttttttaagaaggtagattaatatagtgtttttcgttttgggtttttatttaaggggtgatttgtttattgttggttcggttattgggattatttggtgttttgtttttgggtagattttatattaggaaagttaatagtgttcggtttttttaaagtgtagatttattttttcgtttaaggtttttttatttttttttagtattgagtaggagcgggagttgttaaggggttaaggttagggggaaattttttaataaattgaaattttaaaaaatatatattgatttaggattataaagttttttcggtttaatgtttgcgtttaattagaatttgcgagtagtttgggggtgttttttattattatttttttttagggtagtattttttttatttgtttgtttgaaatattttgttttttttttttttttcggggcgttaaagagtttagagaaatttgtattttaattgatattttagggaaagagagaggggcgtttgattgtttttttatttaaattaaataggttttttagatgaaaatgagtcgagttcggtggaagatttatagggatttgggattagggagataatggagttttaaatgttgatagcgttttatattaaatatataatgggtgttttgagtttgaaagtaggtttgtttttaagggtaggttttattgaattgggagaaaggaaggagggtttggagaacggtttgtaagggagcggggtgcgaggagagcgacggaggttggtggttttcgagcgggttttttgcgttaggttcgtggttcgcgagggtcggagttagcgttacgtagggttttcggtttttttttttagcgcggtttcgtggtcgaaaaaaatgagcgcgtaagttagaattcgtttgcgttttcgatattttttagtcgttgcggtagagtaggtaggcgaattagaaaaagtcggtttagttcgttttttagttttaggcgtattgcgttttttttagcgtcgacggcggttgcgggcgaggggcgtttaggtatcggagtcgtcgtttttttagtagtgttatttttggttatcgttatttttacgggatgttatcggttttattttagcggttttttttcgaaaaaggggttttcgtagggtttggatggtacggaagtttttaggatatacggatggggtatttcggagatgatttcgggaatcggtttgcggggttgtgttacgggtaggcgaatttttcgttcgtttgttttggggtcggagaaacgcgtttagttagcgggaatgcgttcgttagggtttgatagggaggggggcgttaacgttagaagtagatgttagtatttggatgggggtagtagaggtagaatttttagaacgtcggtcgttagtacgtatttattttttttattatttatgtagttatagagggaggatacggagcgttttttataatgttagttttttcgcgtttttcgttcggaggacggtgtattcggcgtttcgggttttcgtggcgtttacgttttcggttggcgaagtttttcgaggcgttttgcgcggcgattattttgaatggtaacgttttttcgcgatttgtgttgttttcgcgtttcgcgtgggtcgggatggagaaagcgacgagttcggggttgcggggagtaattttaaacgtagaagagtggtttttgggttttcgtcggcgttaagtttttcgggttttacgcgtattttaggttgcggaggagcgcgggtatgacgttcgcgggttgtttcggatttgttttttcggggtgttgtatcgttgtacgtattagggttgtaggggatcgcgggtatgacgttcggggtttgttttttgattcgcggaacgagaggaataattgatttaggtttggcgttgtttttattaaattttgttcgcgagttgcgaaggtttagagcgcgtaggtaagttgcggtttcggggttttcggggttcgcggtcggttttcgttagttcggagagtagtcgtcgcgtcgggttaggtacgtcgtatgtagtttcgcggcgttcgagttttgtggcggtcgcgcgcgttttttcgttcgtttcgtattcgtcgttcgttcgttcggttttttatcgcgtttttttttagtcgtcgttcgcgtcgtcgtcgtcgttttcgttttttcgcggtgggttacgtttttattgaaattcgagtcgttttttggacggcggcgttttttttgttaattagcgtcgcgcgttcgggtcgtttcgagtttcgcgcggtttcggacgttttcgagtagtcggagatatcggttcgggaggcgagggttcggtcgcgatgcggtcgtagggatgtagcgatagttttcgaataaggtttggtttcgcgtttcgcgttattttttttttttttttcgggcgagcgaggttggttaacggttcgttgagtgattgcgttacgttgttttatgttaagttagaaaataagtgatcgaaggttttaattttgttttttcgttaaagagattttaaaatgcgtttgtttgatattgcggggagggttgttaggtagttgaagtttttggaggagaggaagttatttggaaatgttcgtaggatattgtatgtttttgtttttttaaataatagaaatgagaggaaaaaattgaatattaatggaggttttattatgggagggttatattatataggtgattttattttatttgtttaattattttgtagagtattatttttagtttttgataaggaaataggattagagaggttaagtaatttgtttaggattatatagttggttattaggatagtttgattttgaatgtggtttttttagaaaaagttaaaattgtattaaaaaaaaaaagtgtttaataatatatgtttggattaataaaaagaaatttaaaggagtttaaagataattttattataaatagattttgaataaagtaatttttttttttgaattttagattaaaaattataaatgtaaaatttgattttttaattgtatattaagttgtaattggttaaagtttttatgtttatttatttttttattaagtcgtgttttcggaataatttattttaaatatgttttttttttttttttatttatttagtttttgagtagtcgtgtttaagtttaagattatatagattaaaattttaattatttttttttagaaaaggttattaaatttagaaatgttttagaatttttttgaggtttgaagatagatgaagtattgagaataaatttgatttggaaaatagattttttttggatttagaaatatatttgtatttgtgttattaatattgtattttttataatatttataaaaatattttttaaggtgttatatgattagaaaattatttttatttataaatatagtatagaaaacgtttatgtaagttatttaaaagttatataagtaagaaatttatttaattgttttaggtaaaaggttataatattgtattttggaaatttgatagtaataaaataaaaattggtttttaagtaaaattatttttttatatgtttggtgggagggtatgtttttggttaagttttttaatttggattagttttagagtttatatattaacggatattttagtttaggttgatatttagttatttatttttatacgggttgttttgatagtagtatgtttttaagtttttagaaaagggatgtagttgaacgtgtttgtttgttcgtaggttgttatttatatttttatattttttattaatgggaaattcgagtgttttaggatagttttttttttattttatatcgtatttattagttattgaaaatgttgttaatatatttttatataaattaatggtgtaggaagtcgttgtttttattttttatttattaatagttttatgtatgttgaatggaaaggaagtttttcgttgaaaatgataaataagaatatttatttttatgtttaggtatagtttgtagaatgtattttttatagaaatgaaaagatattaatttattaaaagttttttattttttaaagagggtttatatataagggattgaaatttataagattataataggaaattttttagttttggggagggggggaagtatgtttagaattatttttaaaaaattaattatgtttttatatttagtttttaagtgattttagattatttaggaaaatttttatattattgaggtttttgaatgagaaaataatttttttatagttttttttttttttttttttttttaagtggttggaatttttttcgttaatggttttttatgaatggtgttgttaataaagtttattaatgagtttttacggcggagtgtgaataggtaaataagttttaatttgttgaggttttggggtaagggtagaaaagttagtaagaattaaaggtgatagtttgaattgaattgcgaacgttagtattaggttttagttgaaagaatcgttagataaggatatatttatagtttttttattttttattgaggtttttttttttcgtaatttttttttttttataaaatgttttgagtagttatttttttttttttttaaaagttttcgagacgtttttttttttttattttagtaatgatatattaatgggaaggaagaaaaatgaggatattagaatttcgatgtttttaaaagttttaagaaataaattgtgttgttagttcgttggtgatgggaagagaaaggagaagggggtgggagcgtttattattatgggttttttttttttgaagatttggaattttttttttaataatttgttttgtaatgggtggttgtttttttattttatggaaacgttagatgaaataaaggttgttgatatgaagtgtttatgaattttttcgggtggatttgagttttttgtaatattaggaattttattttttaagttatattttaatagtgttttcggtataaaagaagtatttaaatggaaggatatagaatagtcggaggattatgataagagtatttatttttgggtaaggggaggggttggatgttttgatagttttagtttatttttagggagtttgtggtatttaagtgaagtaaaattattgattttattattgaatagtattaatgattttaaatttagaattgggtttgaattttaaagttaaggttttttcggagataaagtttttttggaagtatagttttattttgaggtaaaggggaatggtttttttaaggtgagaggttggatgtagttttttttatttaatagttttgtgatttgtggtcgggcgtagtggtttacgtttgtaattttagtattttgggaggtcgaggtaggcggattatttgaaggtaggaagtcgagattaggttgattaatatggtgaaatgtcgtttttattaaaaatataaaaattggtcgtttgtggtggcgtatgtttgtaattttatatattttggaagttaaggtatgtgaatcgtttgaattcgggaggtagaggttgtagtgagttgagatcgttttattgtattttagtttgggtgatagagtaagatttttttttaaaaaataataaaaaaaggtttggtatggtggtttatatttgtaattttagtattttgggaggtcgaggtaagtggattatttgaggttaggagtttaagattagtttgattaatatggagaaatttcgtttttattaaaaatataaaattagttgggtatggtcgtatatgtttgtaattttagttatttaggaggttgagtcgggagaattatttgaatttaggaggtagaggttgcggtgagtcgagatcgtgttattgtattttcgtttgggtaataagagagaaatttcgttttaaaaaaaataaataaataaataaacgttgtgtgattttaggttagttgtttgagttatttgagttttttatttttttagttgtaaaatggggaaaataatggtttttattttttggatttttttttttttttttttttttgagatagagttttattttgttatttaggttggaatgtagtggtacgatttcggtttattgtaatttttatttttagggtttaaatgattttttttttttagttttttgagtagttgggattataggtgtttgttatcgcgtttagttaattttttgtatttttagtagagatggggttttattattttggttaagttggttttgaattgttgatttcgtgatttattcgtttcggttttttaaagtgttgggattataggcgtgagttatcgtattcggttttttttagatttttaataggattattaagaggatgaaatgagttaggacgtgataagtatttagtttttttttgtttttgtttttttatttgttcgggtttttttggttgttttgtttttgtttttgtttttgtttttgttttttggttttttttgagatggagttttgttttgttatttagagtgtagtagcgtgattttggtttattataatttttgttttttgggtttaagtgatttttttgttttagttttttaag

SEQ ID NO: 127 - DNA, 5919 bp, Artificial Sequence
  chemically treated genomic DNA (Homo sapiens)
tttttttttttgtttttttttattttttttttttttttgataaaatagtatgaatatggttatatgtagtgtggtttttttttgttttgggttatgtagatgttatattttgtgttttatattttttgacgttttagtatattggtttttagagagttaggtttggttagggttttggtttgtattaagtttggaagtgataagatttaagagttgtttatttttgtttgttgacgatacggttagttttgttagggttttttttgagtttatagagttttttttttagatgttgatagttttttttttttagttatattgggtatgtagaatttagggattttttttatttgatatagatatgttgtggtaatatatacgtgggtattattggaagtggtaatattgtatttgtgtgtgaatatgagagattgtataagtttatgtttttttatagaggagagttttatgtgggtttatgttatcggagagggttgtgtatatttgtgtgtgtgtgtgtgtgtgtgtgtgtgtgtgtgtgtgtgtatttttatatggggggtggggggatagtgtgggggtattcgtatttgtgtatgttagtaggaatggttgtatttgtttgtatttgtgataggtaatggagagaaatgtttgaaagtttagattttggagttaaatattaggatatattatgtttgtggtttttttttttgagatagagttttattatgttgtttaggttggagtatagtggtatgattatagtttattgtagtttttattttttggttttgagtggtttttttgttttagtttttcgaggtacgtgttattatgttaagttaatttttggagtttttttggtttttttttgttttttttttttttgagatagagttttattgttatttaggttggagtgtagtgataggcgtaagttatcgtgtttggttaatttttgtattttttgtagagatgggatttgttatattgtttaggttggtttcgaatttttggatttaagtaatttttttgttttggttttttaaagttttgggattatagatatgagttattgtgattggttaattttgggtaggtttttaaatttttttgtgttttagttgttttattagtaataataatatttaggttaggtgtagtggtttatttttgtaattttaatattttgggaggttaaggtaggtggattatttgaggttaggaatttaagattagtttggttaatatagtgaaaatttatcgttattaaaaatatagaaattagtttggtatggtgttgggtgtttgtaattttagttatttaggaggttgaggtaagagaatggtttgaatttaggaggcggaggttgtagtgagttgagattatgttattgtattttagtttgggtgataagagtgaaatttttttttaaaataaataaattaataataataatattatttaaattatagggttgtgtggataaaatgagataatataggtaaagtgtttaatgtagtggttagcgtatatagtaagcgttataaattttgtatttgttatttttttatagaggatgtgtgtgtgtgtgtgtgtgtgtgtgtgtgtttatgtgtatgtatatttatgtgtagacggatgagggttggaggtgtgtgtatatggggtgtgtgtatattagaagatgtttgtgttaggaatttgtgtagaggagtttggagtttgtgtatgaggtagttgaggtaatgtgttaattgagaaggggtttgaagggttgtgtggatttgggtattagtatggtgcgttatttgaggtgtgtatgtgtgtttttttgtgagaaggttttatttttatttttggtttttttgttttttttttaaaatagagatagggttttattttgttttttaggttggagtgtagcggtgtaattatagtttttgtagtttcgaatttttaggtttaagtaatttttttattttagtttttcgagtagttgggattataggtgggtgttattaggattggttaattaaaaaaagatttttttttatagagacggggtgtttttatgttgtttaggttggttttaagtttttgggtttaagtaattattttgtttcggtttattaaagttttgggatagtaggtgtgaattattgtgttcggttttatttttgtttttgtattagttttatttttttttttattagtttttgaaatttttttcgttgggttttggatggtttttagttttttatttttattttttgttttggttttaattagttttgtagtattttggggcgttttagatatagtggttttattttagggaggggtttcggggtaaaggttttaggtagggtttagtgaataggggttattttagggtaggttttttattatagttcgttttatagtttattatatgggtgtgatgtttttatttttatttaatatatatatgagagattatttagagtaaagggtgagaggggtaggtggggttagggtggagattaaagtattgatgtgacggaattattagttaggtaattggatttggtggatttaggaagattttttggaagaggtgagtggtgttaggtagaaaggataggatttagagagaagaggaagagaatatttgtaaggatgattggattggggatcgagagagagaagttgggggtttttttttttaggattttggggtttttttggggtaaattagggtttataaggttggttttattttaaattttttatttttatattttaggaaattaagtttttttattagtcggtttttttttgagtgttgtaatggtaatgtttttggtagggtgtgggggatttttgtttaatgattttttgttttgttgtttagaggatatcgttgttagaaaagggttggtttattgtggggttttttaaggtattttggtagttttagtttttgatttggttttttttttggtatggggataggaggagagtttcggaggtaggtatttatttttatttagttattatatggaattttagggtggttgggagtatagtagggtttagaggaaggattgttttttgtttgtttgtttgtttgtttttgagatggagttttgttttgttattcgggttggagtgtagtggtgcgatttcggtttattgtaagttttattttttaggtttaagtgattttgttgtttcggttttttaagtagttgggattataggcgtttatttttacgtttggttaatttttgtatttttagtagagacggggttttattatattggttaggttggtttcgaatttttgattttgtgatttatttatttcggttttttaaagtgttgggattataggcgtgagttattgcgtttggtcggaagaattggtttttaggagatggtgattggggattgtgagggagttgagtatggtttgatagaaattttgttagagagatgattataatgtttaaaattatgtgtgtttgagtgtgttcgtttgttaatttggtaggtattttatgtatatgtgtatgtgtatgtgtgtgtgttattgtgagtttgggtttgttagagtttgtattggcgtgtgatggggttggtacgtatatttatgtaaatatatgttgtgagtgttattgtgtgattgtgttggtgggttaggtgagtatgagtgtgaaagagagttggtgtgggtggtttgttttatgtgacgggggttgtgtaagtgtgttaggggtgataggaaggaaagtgaaggtagaagttatgttggggtagagtttaggttttttggttttttgaagagggtaggagttgggtagttgttgatagaaatattggtagagattttattttttttgtttttttgttttatttttaggtttttgattttttttaaggattatgtcgtagttttattgatttaggagtaggggtttaaggggtgagtggggtagattgagggtttttagggttaggaaatagggtgggggtggtttttttgaattttataattttttatagttttttttttttataaggattttgttgttaggtaacggatgggggagttagaatgaggtagtttgagaggttgaaggttggatttacgataggaaatggttttgatttttttttgtagtgattttttaggtgtagatatatagttttatatatatttatatataaatatgcgtagatatatagatatatatgtagagatatatatatttagagataggtatattgtttttatatagagataggtgtatatttatagatatatagatatagagatatttatttatatagataggtatatatatatttatatagaaatatatgtatataaatacggttttatagatatatatatatgtagttaaatatatatatagagatttttatatattttcgtatatatataaatttgtatatatagatagatatttataaagagttgtatatatatgtatatttatataggtaaatttatttatatttagagatatataaagacgtatatgtataagtatattgaaagagttatagaaatataatatattaaagtaataggatttaatttgagtaatatagtaagattttgtttttattaaaaattaaataaattagttaggggtattggtacgtatttgtatagttttagtttttgggaggttgagattagaggattatttgagtttaggagattaaggttgtagtaagttatgattgtgttattgtattttagtttgggtaatagagtgagattttgttttaaaataaaataaaaaaagtaaagtaataggaggtaaaaatatgtaaataagtatagtaatattttaatgtagaaagttagttttagagatatagatatgagttaatgggaagagaagtattgaggggggatatattgtgaggtagattgaacggtatagtaggtggtttagtttcgtttttattttttatagggaggattttaatttaggtttaagagggaaagttacgtgtttgtatgagcgtatgagtatgtgtatgcgcgtgtgtgtatagggtggtgtatttggtaggggtttttgagtgaggtatgttttattttgtagtagggaatttggaatgggttgtgtgttttgtaagaaattggagtcggtggttacggttaaggaggatgttggtttggaaggggattttagaagttacggggtagtagattattatgggtttgattttattaaggttcggtttgtatttttatttgtttatatttttaattatagtaatttttttttttaggttattaattttggtttttttgatagtggtattattaggggtgtgttaggtgagtttaaggggtcggaggtaggagttgtttggattttgggagaaattgagggaagaagaagagatgcgaatttgtttttaggagtttttaggaggatgtggtagatataatttcgtttttaagattatatgggttgagggagtttgtatagtttttttattagaaattatagtttgtaggggagggttaagaagttttatttttagtttgagaggggtaggattttgtgatagatgtaagtgataaagagaaattttttgtttttttaggtgttattttttagatgggaagtttttttggtggggaagaggaggagtgggtaataaggggattttttatggtgggaggaatgggtttgaagttgtgtgttttaagttgtggagattaaattagaaattttttggattttaaaggtttttgggaattagagtattaaaggagtggggaggtgtagtatttggttggggaataggaatttggggtgtagtttttttggtgtttttgttttatgttttattttgttgagtagttttgattttgtagg

SEQ ID NO: 128 - DNA, 5919 bp, Artificial Sequence
  chemically treated genomic DNA (Homo sapiens)
tttgtagagttagggttatttagtagggtagggtatggggtagaagtattaagggggttgtattttaaatttttgttttttagttaggtgttgtatttttttatttttttagtgttttggtttttaaaggtttttggggtttaaggaatttttgatttggtttttatagtttaggatatataattttaagtttattttttttattatggaggatttttttgttgtttatttttttttttttttattaagaagattttttatttgggaagtggtatttaaaagggtaagaagtttttttttgttatttgtatttgttataggattttgttttttttagattgggagtagagttttttgatttttttttgtagattgtggtttttgatgggagggttgtatagatttttttagtttatgtgattttgaaagcggggttgtatttgttatatttttttggaggtttttaagggtaagttcgtatttttttttttttttttagttttttttaggatttaggtagtttttgttttcgattttttggatttatttgatatatttttgatggtgttattattaaggaagttagggttgatggtttgagaggagaagttgttgtagttggggatgtgggtaaatgaggatgtaggtcgggttttagtggggttaggtttatagtggtttgttgtttcgtagtttttgaagtttttttttaggttagtattttttttggtcgtggttatcggttttaattttttgtagaatatatagtttattttaggttttttgttatagaatggggtatgttttatttaaggatttttgttaggtgtattattttgtgtatatacgcgtatgtatatgtttatacgtttatataggtacgtggtttttttttttgggtttagattggggttttttttgtaagggataaaggcggaattgggttatttattgtatcgtttagtttgttttatagtatgtttttttttagtgtttttttttttattggtttatgtttatatttttggggttggttttttatattgggatattgttatgtttatttgtatatttttgttttttattgttttgttttttttgttttgttttgagataagattttattttgttgtttaggttggagtgtagtggtataattatagtttgttgtagttttgattttttgggtttaagtgattttttggttttagttttttaagaattgggattatataggtgcgtgttagtatttttggttaatttgtttgatttttagtagagataaggttttgttatattgtttaggttgggttttattgttttgatatgttgtgtttttgtgatttttttagtgtgtttgtatatgtgcgtttttgtgtgtttttaagtatgggtgagtttgtttgtgtgggtatgtatgtgtgtgtagttttttgtggatgtttgtttgtgtgtgtaggtttgtgtgtatacgagagtgtataaaagtttttgtgtatgtgtttggttgtatgtgtatatgtttgtaagatcgtgtttgtgtgtatgtgtttttgtgtgagtatgtgtgtgtttgtttgtgtgagtgggtgtttttgtgtttgtgtgtttatgaatgtgtatttatttttgtgtgggagtagtgtgtttgtttttggatgtgtgtatttttgtatgtatgtttatatatttgcgtatgtttgtgtgtgagtgtgtgtgaggttgtgtgtttgtatttggagagttattgtagagggggattaaggttattttttgtcgtgggtttagtttttagttttttaagttgttttattttggtttttttattcgttatttagtaatagggtttttgtaggaggaggaggttgtgaggagttgtggggtttaggaaggttatttttattttgttttttgattttgaaagtttttagtttattttatttattttttaggtttttatttttgggttagtggggttgcggtatgatttttgggaggggttagagatttgagggtgagatagaaggataaggaagatgaagtttttgttaatgtttttgttagtagttgtttagtttttgttttttttaggaagttagaaggtttgggttttgttttagtatgatttttgtttttatttttttttttattatttttggtatatttatataattttcgttatatagggtaaattatttatattagtttttttttatatttatatttatttgatttattagtatagttatataataatatttatagtatatatttgtatgagtgtgcgtgttaattttattatacgttaatataggttttaataagtttaagtttataatagtatatatatatatatatgtatatatatatggggtgtttgttaggttaatagacgaatatatttagatatatatgattttgaatattataattatttttttaataggatttttattaagttatgtttagtttttttatagtttttagttattattttttaaaaattagttttttcggttaggcgtagtggtttacgtttataattttagtattttgggagatcgaggtgagtggattataaggttaggagttcgagattagtttggttaatatggtgaaatttcgtttttattaaaaatataaaaattagttagacgtggaggtgggcgtttgtagttttagttatttgggaggtcgaggtagtagaattatttgaatttgggaggtggagtttgtagtgagtcgagatcgtattattgtattttagttcgggtgatagagtaagattttattttaaaaataaataaataaataaataaaaaatagttttttttttgaattttgttgtgtttttagttattttagggttttatgtggtggttgagtgagagtggatatttattttcggagttttttttttatttttatattagagaaaggattaggttagaagttggggttattagagtattttgggaagttttataatgagttaatttttttttggtagcggtattttttgagtaatagggtaggaggttattgagtaagggttttttatattttgttagaaatattgttattgtaatatttagagaggaatcgattggtgagagggtttggttttttaagatgtgagaatggagagtttagggtggggttaattttgtgaattttgatttgttttagaggggttttaaggttttagaagaaagggtttttagtttttttttttcgatttttagtttagttatttttatagatatttttttttttttttttttgggttttattttttttatttagtattatttattttttttagaaagtttttttggatttattaggtttagttgtttggttgatggtttcgttatattagtgttttggtttttattttagttttatttgttttttttattttttgttttaagtgattttttatgtgtgtattgggtgggggtgggggtattatatttatgtggtgaattgtggggcgggttgtggtgagaagtttgttttaaaatagtttttgtttattgggttttgtttgagatttttgtttcgggatttttttttgggatgaaattattgtgtttaaaacgttttaggatgttatagggttagttagagttagggtagaaaatagaggtggaggattggaagttatttagggtttagcgggagggattttaggaattggtgaaaagagagatggggttgatataaaaataagggtgaggtcgggtatagtggtttatatttgttattttaggattttggtaggtcgaggtaggatgattgtttgagtttaggagtttgagattagtttgagtaatatagggatatttcgtttttataaaaaaaaatttttttttaattagttagttttgatggtatttatttgtagttttagttattcgggaggttgaggtgggaggattgtttaagtttgggagttcgaggttgtaggagttgtgattgtatcgttgtattttagtttgggagatagagtaagattttgtttttattttaaaaagaaaatagaaaaattaagggtgagaataaagtttttttataggaagatatatatatatattttaaatggcgtattatgttgatatttagatttatatagttttttagatttttttttagttggtatattattttagttgttttatgtataggttttaggtttttttgtatagatttttagtataaatattttttagtgtatatatattttatatatatatatttttagtttttattcgtttgtatatagatgtgtatgtatatgaatatatatatatatatatatatatatatatattttttataaaagaatagtaaatataaaatttatagcgtttattatatgcgttggttattgtattaagtattttatttatattattttattttatttatataattttatgatttaagtagtattattattattaatttatttattttgagagggagttttatttttgttatttaggttggagtgtaatggtatgattttagtttattgtaattttcgttttttgggtttaagttatttttttgttttagttttttgagtagttgggattataggtatttaatattatgttaggttaatttttgtatttttagtagcgatgggtttttattatgttggttaggttggttttgaatttttgattttaagtgatttatttgttttggttttttaaagtgttgggattataggggtgagttattgtatttggtttaagtattattattattgatgaggtaattgaagtatagagaggtttggaaatttgtttagggttggttagttatagtggtttatatttgtaattttagaattttgggaagttaaggtaagaggattgtttgggtttaggaattcgagattaatttgggtaatatggtaaattttatttttataaaaaatataaaaattggttaggtacggtggtttacgtttgttattgtattttagtttgagtgatagtgaagttttgttttaaaaaaaaaaaaaataaaaaaaaattaaaaaaattttaaaaattagtttggtatggtggtacgtgtttcgagaggttgaggtaggaggattatttaagattaggagatagaggttgtagtgagttatgattatgttattgtattttagtttgggtagtatagtgaaattttgttttaaaaaagaaggttatagatatgatgtattttggtgtttggttttagaatttgagtttttaagtatttttttttattgtttattatagatatagatagatgtagttatttttgttagtatgtataaatgcggatgtttttatattgtttttttattttttatgtagggatatatatatatatatatatatatatatatatatatatatatagatatatatagtttttttcggtgatatggatttatatagagtttttttttataggagaatatagatttatataattttttatgtttatatatagatataatattgttatttttaataatatttacgtatatattgttataatatatttatattagatggaggggatttttgaattttgtatgtttagtatggttggaagggagagattattagtatttgagaaggaagttttgtgggtttaggaagagttttggtaggattgatcgtgtcgttagtaggtagaggtaggtagtttttgggttttattatttttaaatttgatgtagattaaagttttggttaggtttggttttttggggattagtatgttgaggcgttaggggatgtagggtatagggtatgatatttgtatggtttaaggtagggaggggttatattgtatgtagttatgtttatgttgttttgttagaggaaagaaagagatggggaaagatagaaaaaggag

SEQ ID NO: 129 - DNA, 6316 bp, Artificial Sequence
  chemically treated genomic DNA (Homo sapiens)
atgtattatgttacgagttgtttttttcgattgtttagttaggttattgttggattaagttggtagggttttaagtaaagtagggatattgatgagcgtgtatgtgcgtgtgtatatttgattaaaaatattttagtgttaaattaagattattttggaattatttataatgtagaaattggaatgtttagtaagaggataatagtttgcggttattagttataatagttatgaaggttttatagaaatatggaaagataaaagtcgtttgtatggaaaaggttcgaatgaaatatattatagtgattatagtggttttgttgagatgatggaattatgatttattttttagattttttttttttttaatttttttaaaatgttatatttaatgattatgagtgtattaaaagtaataaaataggaaaaagagtaaggagaagagttaatggttggtagttaagtgttgagatataattgattttaggtaagatagtagtgatattgattagaggaggtttttagagattattttaattggttattttttttttaggttttatttgtttttttgatttgtcgttttttttgttttatgtttttttaattattttagtttggtttttttgttttttttttttttaatttttttagtatgtttttaataaaatgtatttgttttatttttttttgttaggattattaattatttttaaataatgatatggtaaatgtgaatgagttaatatgtagttttttttggtgaatatatagttagagataatgatataaaggaataatttgagtttttttttggtttgtttaatttttatagatttttatttttatttatttatttatttatttatttatttatttatttagttttgtttttgttagtgattttgatgatgatttagaaggtacgtttatcgtatttgtggattatttgaagcgggagttatagaaagtttataggatggtagaattagagattagaaagatttcgatatgttggaaagatagattaaaataaataaaaggtttaaataatacgtttagggtttgtagtttgagttaatttaagcggcggttgtataagggtagttagatagtagtttttatgagaaagttttggggttttaattaagaataagttttggaagagtttaaggtatgaaggcgttgatagaaaaggtttttttgattttaggttttaggaatagaagtaagtttttttcgtagtagtttttgggagtagtaggaggagaattttaagtaaagttaatggcgattttataaatattagtagcgtttatttatgttcgggagaaggtagttaggagtagacgggagtatgagtagtaggaataggaggagttagggagtttaggtcgggcggttttagaggtgttattagggtagtgttgttttgttttcggtggtattggttttatttttaggagggggttgttttttttgtttttttttttacgttgttttttttatttgaacgatttttttttttcgtttttattgggtttttttataggtttttttttttgtttgaaagaaaaattatttttaggagtagggaaatgataattgtgttgtatttttaattttaagcgtgttatttgtagggatattgatatgttggatggaatttttggagcgtgttagttgaagagtgattaaagggatgtggatgttgaggttggagataagatgtttatggtataggaggtgtttttaagtgtttaataaatttttatgtggagatattggagtattgaataggaattttacgaattgattcggtagatgggttgaatggtttttaaatttagtataagatgtttaagttttttgaaaatgggggtattttagttatagtggtagttttttatagtaagatttttgagttaatggggttattagtatttgataagtaaatttatatatgtgtttgtttggtgaatttcgtagaattttttagtagagatttgggagcgtgtgttttttagattaaggagtttgaattgtttagaggatatgtattgtgaagttttttaaaatataatatagaagggttttatgagattatttggtttttgtatttaattatatatatttgtattatgtagagtatgtttatagagtgtatttttttttttgtattaagttatttaatttaagtggaaaagaaatttttgattgatttttagtgattgtggttgattagttttatgtttggtttttggaggaaggtgagagtttgggtttttttttgttttttatattggtgttttaatatttttatttagtttcgaatattaaagttgatggatttagtaatagtgtgtttttgaataggggtgagaaagaaattttaagagaatgtttgtagttgataataagagagagtgtttggttttgttaattaaataggagatgaaatgtttttttgtatgtgagtaggaagtaagtagattgtttattttaatagttttttatatttattaggcgtgttgaattttattttttttattagtattatttataaaattttttttattagtgatttagttaggagagtgttatagtttatttttatttaaaggtattattttttttggggagaggattgggagttatatatttattttttatatttaagttaaaatttgtagtatttttgagttttttgtgagaacgttaatgtaattaataaagaagttatagttaataaattgttgattttaattaaaagtaattttttaaaagagtagttgggaaatgtggaagtttatttttattgtagtatagttttaatataaattttagattcgattgtgattttattaattttaaataattgagtaatatgttaatattattgattagtattttagattataaagattgttttagttgtttattaaatatttgttttggttttatagatataatgtagatttattgttggtagtaggtttggaaagtgttgtttttttatgagttaaaaatattaaaatggtatttgaaaaaatgtattagtaaattaaatttttgtatatggtattatggattatttttttttagagttaaatgtgtgttttttttgagaagttttttttgggttttttttgttaataaatgtgtttttatttttttgagttgatggaggattaaatatttttttagtattggaatgtcggttttgtagttattttaagtgtttatttttttattatagtttaagttttttagaaggtaaagatgatggttttttattagtgtttttagttttaatttaatgtttggtttttgttgaatgttgtagaaggataatgttgatagtttttttttgaaagagggtgtgggagtgataagtagtttttaggtgagattaatagatattgtggtttcgtacgtatgttttaggttgtgttttgggttgggggattagtaaggagaaggattagttgttcgtttttagttgttttgagggatgatgttgtgggttttagaggaggtaggggtgcgggaggtagagaaaggcgttaggaagagtggtgaggagaattggaaaaatagaaagcgttggtgaagttagtaggtaagtaatgatttcggtagttttttttgtttttgaagtagaagggatttagggatagttagtggtttaggttttgcggttttaggtgtttagacgtgtattttttgtgtggagtggtcggggtttttttttggtgtgtagtttagaaatgtggtaattttgggttatttaatttttttaggcggggaggtagtttagttttttaggaagagtttttggtttcgtttaagagttattatagttttttgtattatatttttttgacgggttttaataggattattttttaaatttgcggtatttatagagataagattgggttgtttcgtgtagttaggacgattttagtttttgaggtaatggagatataattgaggaataacgtggaattagtgttatagtaaatgatttagggttttaagttaattttagtcggttgtggttagagttatttattttgagtagtaagttgttattagaaagatttttttttcgagtatttagggaataaagtttaagtgttttgcgtttttaagttgtaggagtagttttacgttttagttttttaaaggtattataatgttattttttgttttgtttttaggaagtagaagattgaggaaatgatttgggcgggtgtattaatgcggtcgaaaaagatacggatacgtttttttgggatttgagttggttcgtagtttttttaaaggtgttaagtaagcgttagttttttttaggcgttttaggtttagtgttttgtgtcgagggttttcggtgtttttttagatttttcgggatagtttgaaggggttaggagcggcgggatagcgcgggaagagtaggtaaggggagatagtcggattgcgttttagtttttcgtgttaagaatatcgtcgcggaggcgcggttagttttttttggatcggatttttcgtttttagggttaggcggcggagttttagttttgttttttttttagtttcgggcggtttttagagttgagtaagtcgggtggagggagtttgtaaggattttttgagcgcgatgggtaggaggaggggtaagggtaagagggcgcggagtaaagattttgaatttgtcggggtcgcgttttcgggttcgcgtcgttagtatttttttacgcgcgttcggtttcgggttattcgttttcgtcggttttcgttttttttcgtagtcgtagggaagcgagtttgggaggaagaagagggtaggtggggaggcggatgaggggtgggggattttttgacgttattagaaggaggtgtcggggtaggaagtgggttggggaaaggttataaatcgttttcgttttcggttgttttttatcgaggttcgcgggaggttcggagcgcgttaggcggatatttttttcggttttttttcggtagcggcggcggttcggagcgggtttcggggttcgggtgtagcggttagcgggcgtttggcggcgaggattattcggggaagtggttgttttttggttggagtcgcgagacgggcgtttagggcgcggggtcggcggcggcgaacgagaggacggattttggcggtcgggtcgttggtcgcggggagcgcgggtatcgggcgagtaggtcgcgtcgcgtttattatggttagttattgggatatcggggttttgttgtgcgcgttgtttagttgtttgttttttataggtgaggcgcggttgggggtcggggtttgaggcgggttgcgatggggcggtcggagggtagagttttcgaggttagggcggggtgtacgcggggagacgaggttgtagttcggagaagttggttacggcgagaatttgggatattagttgtagcgggtacgtttggggtcgttgcgtttttttttcgagggagcgtttcgaggagtggttggtttggattcgcgagtattagcgtttagatcgggttcgcgttggggttgttcgtttgcgataggatcgttgattttttatttagttgtcgggttggggttttattgtcgaggttttgggtattaggagtagtacgtatcgggatttgtttggtatttagagtttatttttagaggatttggggtaggtacgtagggtttttcggagtcgggagtagaggtttttgaaagtttgttaggttgttcggggttgggttgaggtcgggattttggtgatattgggtattggtcgcgatttcgcgttacgagagtgtaggaggggagtcgatttggaggggattcgtgtttgcgggggagtaggaggattttaggagagggttagcgtcggtattttatgattcgtttgagtttttaagtcggattgtttcggggaacgttcggcgagcgttcgttttttttcgtcgttttcggatcgcggggttttagtgcgttgcgtttagttattcgggtggggtttttgtcgggagtaggcgtggtgcgcggtttagttcgtgtcgcggatattagtgattttgatttataagggtagtttagggtttaaatatcgttaatttattgatttataagtttagtttttaaaattcgagcgaagagagggcgggcgattttgattaaacgatgtggtttgaggaatcgatgaggttcgttcgttatttaagttagttttcgttgggcgtttgggagacgggcggtggaatagttaggggtcgggggttttattagtagttagat

SEQ ID NO: 130 - DNA, 6316 bp, Artificial Sequence
  chemically treated genomic DNA (Homo sapiens)
gtttaattgttggtaaaattttcggtttttgattgttttatcgttcgttttttaaacgtttagcgaaggttgatttaggtggcgggcggattttatcgattttttaaattatatcgtttggttaaaatcgttcgtttttttttcgttcggattttaaaggttaggtttgtaagttagtaagttaacggtatttgggttttgggttgtttttgtgggttagggttattgatgttcgcgatacggattggatcgcgtattacgtttgttttcggtagaggttttattcgggtggttgagcgtagcgtattggggtttcgcggttcgagagcggcggggaggagcgggcgttcgtcgagcgtttttcgggatagttcggtttggggatttaagcgggttatgggatgtcggcgttggtttttttttgagatttttttgttttttcgtaggtacgagttttttttaaatcggttttttttttatattttcgtgacgcgaggtcgcggttagtgtttaatattattaaagtttcggttttagtttagtttcgggtagtttggtaggtttttaggagtttttgttttcggtttcgggggattttgcgtatttgttttaggttttttgggaatgggttttgggtgttaggtaggtttcggtgcgtgttgtttttagtgtttagggtttcggtagtgagattttaattcgatagttggataagggattagcgattttgtcgtaaacggatagttttagcgcggattcggtttgagcgttgatgttcgcgggtttaggttagttatttttcgaggcgttttttcggagaaagggcgtagcggttttaagcgtgttcgttgtaattagtgttttaggttttcgtcgtagttagttttttcgggttatagtttcgttttttcgcgtgtatttcgttttggtttcggaggttttgtttttcggtcgttttatcgtagttcgttttaggtttcggtttttagtcgcgttttatttgtgagaagtagatagttgagtagcgcgtatagtaggatttcggtgttttagtagttgattatggtgagcgcgacgcggtttgttcgttcggtgttcgcgtttttcgcggttaacgattcggtcgttagagttcgttttttcgttcgtcgtcgtcggtttcgcgttttgagcgttcgtttcgcggttttagttaggagataattattttttcgggtaattttcgtcgttaggcgttcgttggtcgttgtattcgagtttcggagttcgtttcgagtcgtcgtcgttgtcggggaggagtcgagaggagtgttcgtttggcgcgtttcgagtttttcgcggatttcgatgaagagtagtcgagggcgggggcgatttataatttttttttagtttattttttatttcggtatttttttttggtgacgttaaggggttttttattttttattcgtttttttatttattttttttttttttttaggttcgtttttttgcggttacggagaggggcgggggtcgacgagggcgggtggttcggggtcgagcgcgcgtggggaggtgttggcgacgcgggttcgggagcgcggtttcggtaggtttagggtttttgtttcgcgtttttttgtttttgtttttttttttgtttatcgcgtttaggaaatttttgtagattttttttattcggtttatttagttttgggggtcgttcgaaattggggaagggataaggttgaagtttcgtcgtttggttttaggggcggaaagttcgatttaagggaagttggtcgcgttttcgcgacggtgtttttggtacggaggattgaggcgtagttcggttgtttttttttgtttgtttttttcgcgttgtttcgtcgtttttgatttttttagattgtttcgagaagtttaggaaggtatcggagattttcggtataaggtattgaatttggagcgtttgaggggaattgacgtttgtttggtatttttgggaagattgcgaattagtttaggttttaggggagcgtgttcgtgtttttttcggtcgtattgatgtattcgtttaagttatttttttagttttttgttttttagaagtaaaataaggaataatattatgatatttttaaaaagttgaggcgtgaaattgtttttgtaatttggaagcgtagggtatttgaattttattttttaaatgttcgaaaaagaaatttttttggtggtagtttgttatttaagatgagtgattttgattataatcggttgaaattaatttgaggttttagattatttgttatgatattaattttacgttgttttttaattatgtttttattattttaaaggttgaagtcgttttggttgtacggagtagtttagttttgtttttgtaaatatcgtagatttgaaaaatagttttattggaattcgttagagggatgtaatataagggattgtgatggtttttgaacggagttagagattttttttgaaggattggattattttttcgtttaggaaggttgggtaatttaaagttgttatatttttgggttgtatattaaggagaggtttcggttattttatataggaaatgtacgtttgggtatttggagtcgtaggatttgagttattaattgtttttggattttttttgttttagaggtaaggaagattgtcggagttattgtttgtttgttggttttattagcgttttttgtttttttagttttttttattattttttttggcgtttttttttgtttttcgtatttttgttttttttaaaatttatagtattattttttagaatagttggaagcggatagttgatttttttttttgttggttttttagtttagaatatagtttgggatatacgtgcggagttatagtgtttgttggttttatttgagagttgtttgttatttttatatttttttttaaggagaagttgttagtattgtttttttgtagtatttaataggggttaggtattgggttagggttgaaaatattgatggagagttattatttttgttttttaaagggtttggattgtgataagaaggtggatatttgaagtggttgtaggatcggtattttagtgttggaggggtgtttagttttttattagtttagagaagtaaaggtatatttattggtagggaaaatttaaggagggttttttaggagagatatatatttgattttgggggaaagtggtttatagtattatgtataaaggtttaatttgttaatatatttttttaaatgttattttgatatttttaatttataaagagataatattttttaaatttgttgttagtaatgaatttatattgtgtttgtaaagttagaataggtatttgatggatagttgaaataatttttataatttaagatgttaattaatgatattaatatgttgtttaattatttaaggttagtagagttatagtcgaatttaagatttatattaaaattatgttgtagtaagggtgggtttttatattttttaattatttttttgaaaagttgtttttaattagagttagtaatttattgattatgatttttttgttagttgtattagcgtttttataaagaatttaaaaatgttataaattttagtttagatatggggaataaatgtatagtttttaattttttttttaaaagagataatatttttgaatgagaatgggttatagtatttttttaattaaattattaatgaaagaggttttatagataatattgatggagaagatggaatttaatacgtttggtgggtataaaaagttattgaagtaggtaatttgtttgttttttgtttatatataaaagaatattttattttttgtttggttagtaaaattagatatttttttttgttattagttataaatatttttttgaggttttttttttatttttatttagaagtatattgttgttaaatttattagttttaatattcgagattgaataagagtgttggagtattagtgtgagagataggagggagtttaggtttttatttttttttaaagattaagtatggagttgattagttatagttattgaggattagttaggaattttttttttatttgggttaggtagtttgatataaaaggaaaaatatattttatgggtatattttgtataatgtaaatatgtatggttgaatataagaattaaatgattttataaaatttttttgtgttatattttaaaaagttttatagtatatattttttggatagtttaggttttttggtttaaaaagtatacgtttttaaatttttgttaagaagttttgcggagtttattaggtaggtatatgtatgagtttatttattagatgttgatgattttattggtttaaaagttttgttatgggaagttattattgtggttgaaatgtttttatttttaaagaatttaaatattttgtattgggtttaaaagttatttaatttatttatcgagttaattcgtggaatttttatttaatgttttaatatttttatatgaaaatttattgaatatttaaaaatattttttgtgttatgggtattttgtttttagttttaatatttatatttttttggttattttttagttgatacgttttagaaattttatttagtatattagtgtttttgtaggtgatacgtttaggattgaaaatgtagtataattattatttttttatttttagaggtagttttttttttaggtagagagaaaagtttgtgggaaggtttagtgggagcgaggaaggaaaatcgtttaggtgggaagagtagcgtggagaaggaagtaaaggggatagtttttttttggagataaggttagtgttatcgagagtagggtagtattgttttggtggtatttttggggtcgttcggtttgggttttttggttttttttgtttttgttatttatgttttcgtttgtttttgattattttttttcgggtatgggtgggcgttgttggtgtttataagatcgttattggttttatttggaattttttttttgttatttttaggggttattacggagagaatttgtttttgtttttgggatttaagattaaaggagttttttttgttagcgtttttatattttggatttttttagaatttatttttggttaaagttttaaggtttttttatgagagttgttatttggttgtttttgtgtagtcgtcgtttgggttgatttaggttgtaggttttgagcgtgttgtttaagttttttgtttgttttagtttgtttttttagtatgtcgaagtttttttggtttttgattttgttattttgtggattttttatagttttcgttttaaatgatttataaatacggtaaacgtgttttttgggttattattaaaattattgataaggataaagttgagtgagtgaatgaatgaatgaatgaatggatggatgaaagtagagatttgtggaggttgagtaaattaaggaaggatttaaattatttttttgtgttattatttttagttgtatgtttattaaaggaggttgtatattaatttatttatatttattatgttattatttaggaataattgatggttttagtaagagaaaataagataggtatattttattgaaggtatattagaaaagttgaaaggaaaaaaaataaaaagattagattgggatagttagagaagtatggggtaggggaagcggtaaattagagaagtaaataaggtttaaaggaaaagtggttaattagagtaatttttaggaattttttttaattagtattattattattttgtttaaggttagttgtattttagtatttaattgttagttattgatttttttttttatttttttttttgttttattatttttaatatatttatagttattaaatataatattttagaaagattaaaagaagggaaggtttggaggatgagttataattttattattttagtagagttattgtgattattgtggtgtattttattcgagttttttttatatagacggtttttatttttttatgtttttatagagtttttataattgttgtagttaatagtcgtaaattattatttttttgttagatattttagtttttgtattgtaaataattttaaaataattttaatttgatattggaatgtttttagttagatgtatatacgtatatgtacgtttattaatatttttgttttatttaaaattttattagtttagtttaatagtgatttggttgagtagtcgaaggaaatagttcgtagtatggtgtat

SEQ ID NO: 131 - DNA, 5270 bp, Artificial Sequence
  chemically treated genomic DNA (Homo sapiens)
ttttaggatttaagttattaaggaagaggttgtttttagtaataggggtttgagagttgtttagtttaaagatttcgttttaggggatagttcgttgttaaggattatattttagatttggaggtttatagtttacgttttgtttttttattttgagatagaattttattttgttatttagatgtaattatattttattgtagtcgtaattttttaggtttaagttatcgttttattttagttttttgagtagttgggattataggcgtgtattattatgtttagttaattttttttttttgtagagattggggtttttttatgttggttaggttgattttgaatttttgggtttaagtgatttgttcgtttcggttttttaaagtgttgggattataggtgtgagttagtataattggttgagtttattgtttttttttttattttattttattttattttattttttttgagatagagttttattttgtcgtttaggttggaatatagtggtacgattttggtttattgtaatttttgtttttcgggtttaagtgatttttttgttttttaagtagttgagattataggtatttatcgttatgtttagttaattgttgggggtttttttttagtagagatggggtttcgttatattggttaggttggtttcgaatttttgatttcgcgtgatttgtttgttttagttttttaaaatgttgagattataggcgtgagttattgtgtttaattaatttttattttttaaatggagacggggtttcgttatattgtttaggttggttttaaatttttgaatttaagcgattttttcgttttagttattttaagtgttgggattataggagcgagttatcgcgttttatcgtttatttttttaaattttttgttgataatagatgtgaatttgttgataagagttttggggtttattttttttaatatgggttgttaagggagaggaaattttttaattattgggtttagtgtttttttttattatttggaagttttgtttgggaggagttgggtattgtagttgtagagtttgggtttagtttgaagtttttcgttagtaatagtttttatcgcggaggaagtaggtgtttagtaataagtttgtagaagtgtttattttcgtttttttttttttttagggtttttagtttgtcgagtgggtttcggtaggaaattttaaatcggtgtgggcgagtaggggttgttcgcgggtttgggattaggaggtcgagggggtaggtttagagttggggttgcgagtggcgcggattaaggttttgtggttgtttatgggggattgatgtttgagcgttatttattgtattttggatattttatattaaggggagatgtattttatagatatttgggattttttttttttggtttttgtgttttttaataaattttttgattaattttagttgtgtttttgcgagaagaaagggtgtagtaatttttggtagatatgaggttttttttttttttttttttttttttgagataacgtttggttttgttatttaggttggagcgtagtggtataatttcggtttattgtagtttcgatttttggggtttaagggatttttatgttttagttttatatgtagttggggttatagatatgtattattatatttggttcgaggttattttagttttgaggttgagtagtttaggagtcggttttagtacggtgttgtgtttgtgaaatagagaaaggggattttcgaggattttagatagggttttaggatttttatatttttttgttttttttatttggtggtttttgttttttggttttttttatttttttatggttttagaatttatatgtagtaaaggaattttttggaataaaattaaagtttttttatatgatttttgttaatttttatgatgtaaatgtttttatcgtgtcggattttaaggtataggtgattaaataattgtttgcgagattttgaattgttaataggttagtttttatgagttaatacgagtcgttttagtatattattgttttaggattttggttgtgggtgggtttttttggtttgttttttgttttttcgagatagagtttttttgtcggttaggttggagtgtagcggggtgatttcggtttattgtaattttcgttttttaggttcgagcgatttttttgtttcggtttttagagtagttagaattataggttcgcgttattatatttagataattttttgtatttttagtatagacggggttttattattttggtttggttggttttaaatttttgattttaagcggttcgtttgttttggtttttttaaagtgttaagattatagatttaagttattgcgtacgattgttgatttttaaataaaggattttgtttaaaaaattagttgggtatggtggcgggcgtttgtagttttagttatttgggaggttgaggtagaagaatggcgtgaattcgggaggtggagtttgtagtgagtcgagatcgagttattgtattttagtttgggcgaaagagtgagatttcgttttaaaaaaaaaaaaaaaaaatttttttattttagttttttgagtagttgggattataggtacgtattattatgtttggttaatttttttttttttaataggtagagtttatttacgttgtttaggttggttttgaatttttggttttaagcgattttttcgttttagttttttaaagtgtgggattgtaggtattagttattatatttgaagtagaattttttttgatgtaagaaatttatttttattagtttaggataaaagggagtttttagaggttaggttcggtgatttaggtttgtaattttaatattttgggaggtcgaagtaggcggattatttgaggttaggagtttgagagtagtttggttaatatagtgaaattttgtttgtattaaaaatataaaaattagttgggtgtggtggcgggtatttgtaattttaattatttaggaggttgaggtagaagaattattcgaatttaggaggtagaggttgtagtgagttgagagtatatattttattttagtttgggtaatagagtaaggttttattttaaagaaaaaaaaaatgagagtttttcggattaggtgtggtagtttatatttgtaattttagtattttgggaggtcgaggtgggtggattatttgttagaagtttgagattagtttgggtattatggtgaaatttcgtttttattaaaattataaaaattagttaggcgtggtggcggtatttgaaattttagttatttgggaggtaggagaattgtttgaatttgggaggtagagggggagtttgtagtgagttaagatcgtgttattgtattttagtttgggtaatatagcgagattcggttttaaaaaaaaaagagagagagagaggagttttttggaaggttatagagattttttagaggtaatagggcgatagggtaggatatatattgaggggttttaggatttggttaggaaggagttagagtaggttttttgtttatgggttatatgagttattggggtttgtatttttgtttttttgttttatttaaatttttttagttagatggaaggtttgattattgggtgcgataaggtagttaatttaggttgaataggaagtgaggtaggtagagggattagggaagggaaatggatgatgaaggttaggacgggcgaggttttgttgtagtaatatataattttcgaatttgcgtgggttataattataatattagtttgttgtttatattttttgtgtttattcggggttggtaggatttttgtgttttttcgagtggtataggaaatttggttgatagaggcgttttttttatgtattttttattatttatttttcggttttttagatttttatttagaagtgatatttgttatttttatttttatgtgattggttaaagtgagtgtggttatgttcgagttttttaggatgggatttcgaatttttttgttgggggggtgggggtagtagatgttttaggatagtttgttacggattagatgggtgagtaagagatttaggatgggcgtgatgggttatatttgtaattttagtattttgggaggtcgaggtaggttgattatttgaggttaggagttcgagattagtttggttaatatagtgaaatttcgtttttattaaaaatataaaaattagtcgggtatggtggtacgtatttgtaattttagttatttgggagtttgaggtataagaattgtttaagtttaggaggcggaggttgtcgtgagtcgagattgtgttattgtattttagtttgggtaatagagtgagattttatttaaaaaaaaaaaatgttttagagatttagagatttatagatgtggaagagagtttttattttgttttatgtattattttattttttagtttggagttggagaagtcgaggtttagagaggttaaggggttggttaagtttttatagtgataaagttagtgttagggcgatatttgttaggtttaatgtgataagatgtattttgagttttgtgtgttaagttttggcggggtaaagttggggttcggaggacggtaagatatagtaattgcgagtttttagagatagattcgggttttagttttagtttattatgtattgggcgtgttatttagggagttagttttattgtagttttcgttgcggggcgttcggagaacgcgttatttgcggcgtgagcggtcgttttttattattagggggcgcgtttcgtttgggtttagattttattttttgattgtttgtttttaaaaatttttttttattttcggtttttggttgttattcggtttggttttttttatatttaattggggtaagtttggtgcgtgaggagatttggattttaggtttttaaggggcggagttagggtttttatttttggggtagggggagtagagggtggggggttgggttttcgggtttttaatttggggagggttttggggattagacgtcgaggtttttagaagtggagatgaagagtttttatcgtaattggggtagacgtaggaagtttgggggaggaaggggcggaaatttagttatattaatgggacgcgggaggggcggggaggtaaaggggcgggtagggtaggggttggggtatgagggttcgagatttgtttttttgttttttttaaga

SEQ ID NO: 132 - DNA, 5270 bp, Artificial Sequence
  chemically treated genomic DNA (Homo sapiens)
ttttggaagggatagaagaataagtttcggatttttatgttttagtttttgttttgttcgtttttttgttttttcgtttttttcgcgttttattgatgtggttgagttttcgttttttttttttttaggttttttgcgtttgttttagttacggtgaaaattttttatttttatttttaagaatttcgacgtttggtttttagaattttttttaggttagggattcgggaatttagttttttattttttgttttttttgttttaggagtggggattttggtttcgttttttggggatttagagtttaagtttttttacgtattaggtttgttttagttgggtgtggaaggggttaagtcgggtgatagttagagatcgaaagtgaaaggaaatttttgggggtagatagttaaggggtggaatttgggtttaggcggagcgcgttttttggtggtgagaggcggtcgtttacgtcgtagatggcgcgtttttcggacgtttcgtagcgggggttgtagtggggttgattttttgggtggtacgtttagtgtatggtgagttggggttggaattcggatttgtttttgggaattcgtagttgttgtgttttatcgtttttcgggttttaattttgtttcgttaaggtttggtatataggatttaggatgtattttgttatattgggtttggtaggtgtcgttttagtattagttttattattgtgggagtttggttagttttttgatttttttaagtttcggtttttttaattttaaattgaggggtgaggtggtatatgagataaaatagaagtttttttttatatttgtggatttttgaatttttgaagtattttttttttttagatggggttttattttgttgtttaggttggagtgtagtggtatagtttcggtttacggtaattttcgttttttgggtttaagtaatttttgtgttttaggtttttaagtagttggaattgtaggtgcgtgttattatgttcggttaatttttgtatttttagtagagacgaggttttattatgttggttaggttgatttcgaatttttgattttaggtgattagtttgtttcggttttttaaaatgttgggattataggtgtgatttattacgtttattttgaattttttgtttatttatttgattcgtggtagattgttttgaaatatttgttgtttttatttttttagtaggaggattcgaggttttattttggggaattcggatatggttatatttattttggttagttatatgagggtggaggtgataggtgttatttttgaatggaagtttaagggatcggggagtggatggtggaggatgtatggagagagcgtttttattagttaagttttttgtgttattcggaggagtatagggattttgttagtttcggatgagtatagggagtgtaagtaataaattaatgttgtggttgtggtttacgtagattcgggggttatgtgttattgtagtaaagtttcgttcgttttggtttttattatttattttttttttttgatttttttgtttgttttattttttgtttagtttgggttagttgttttgtcgtatttaatggttagattttttatttggttagaaagatttaaatgaagtagagaggtagagatataagttttaatagtttatgtggtttatggataaaggatttgttttagtttttttttgattaagttttggggttttttaatgtgtgttttgttttatcgttttattgtttttagggaatttttgtagttttttagaagattttttttttttttttttttttttttgagatcgagtttcgttgtgttgtttaggttggagtgtagtggtacgattttggtttattgtaagttttttttttgttttttaggtttaagtaatttttttgttttttagatagttgggattttaggtgtcgttattacgtttggttaatttttataattttagtagagacgggattttattatggtgtttaggttggttttaaatttttgataagtgatttatttatttcggttttttaaagtgttgggattataggtgtgaattgttatatttagttcggaaaatttttattttttttttttttgagatggagttttgttttgttgtttagattagagtgaagtgtgtgtttttagtttattgtaatttttgttttttgggttcgagtgatttttttgttttagttttttgagtaattgggattataggtgttcgttattatatttagttaatttttgtatttttagtatagatagggttttattgtgttggttaggttgtttttaaatttttgattttaggtgattcgtttatttcggttttttaaagtgttgggattataggtttgagttatcgagtttggtttttgaaaatttttttttattttaaattagtaagagtgggttttttatattaaaaagaattttattttaggtgtggtggttgatgtttgtagttttatattttgaaaggttgaggcgagaggatcgtttgaggttaggagtttaagattagtttgagtaacgtaggtagattttgtttattaaaaaaaaaaaaattagttaggtatggtggtgcgtgtttgtggttttagttatttaggaggttgaggtgggaggattttttttttttttttttgagacggagttttattttttcgtttaggttggagtgtagtggttcgatttcggtttattgtaagttttatttttcgggtttacgttatttttttgttttagttttttaagtagttgggattataggcgttcgttattatgtttagttaattttttgagtaagattttttatttaaaaattaatagtcgtgcgtagtggtttaagtttgtaattttagtattttggggagattaagataggcggatcgtttgaggttaggagtttgaaattagttaggttaagatggtgaaatttcgtttgtattaaaaatataaaaaattatttgggtgtggtggcgcgagtttgtaattttagttattttggaggtcgaggtaggagaatcgttcgaatttgggaggcggaggttgtagtgagtcgagattatttcgttgtattttagtttggtcgatagagagattttgtttcgaaaaaataaaaaataaattaaaaaaatttatttataattagaattttaaggtagtggtgtgttgaagcggttcgtattggtttatgggagttgatttgttaataatttaggatttcgtaggtagttgtttaattatttgtattttgaaattcggtacggtgggagtatttatattatggaaattgataaaagttatataggaggattttaattttattttagagagtttttttattgtatatggattttggggttatgaaaaggtagagaaaattagagagtaagagttattagatggagaagataagaagatatgagagttttaaggttttgtttggggttttcgggggttttttttttttgttttataaatatagtatcgtgttggagtcggtttttgagttgtttaattttagaattaaaatggtttcgagttaggtgtggtggtgtatgtttgtggttttagttatatatgaggttgaggtatgaggattttttgagttttagaggtcgaggttgtagtgggtcgagattgtgttattgcgttttagtttgggtgatagagttagacgttgttttaaaaaaaaaaaaaaaaaagaaaaaagttttatatttgttagaagttgttatatttttttttttcgtagaagtatagttagggttggttagagagtttattgggagatataggaattagaaggggaaagttttaggtgtttgtggggtgtatttttttttggtgtgaggtgtttaaaatgtagtaggtggcgtttaggtattagttttttataggtagttatagggttttggttcgcgttattcgtagttttagttttgggtttgttttttcggttttttggttttaggttcgcgggtagtttttgttcgtttatatcggtttgaggttttttgtcgaggtttattcgataaattgggaattttgaggggaggaagagacgggggtaagtatttttgtaggtttgttgttgagtatttgtttttttcgcgatgaagattgttattgacgaggggttttaggttggatttaggttttgtagttataatgtttagttttttttaagtagaatttttagatggtagggaaaagtattggatttagtggttagggaatttttttttttttaatagtttatgttgaaaggaatgggttttaaggtttttgttaataagtttatatttgttattaataggaggtttaagagagtggacggtggggcgcggtgattcgtttttgtaattttagtatttggggtggttgaggcgggaggatcgtttgagtttaggagtttgagattagtttggataatatggcgagatttcgtttttatttaaaaagtaaaaattggttgggtatagtggtttacgtttgtaattttagtattttgggaggttgaggtaggtagattacgcgaggttaggagttcgagattagtttggttaatatggcgaaattttatttttattaaaaaaaaatttttaataattagttgggtatggcggtgagtgtttgtagttttagttatttgggaggtaggagaattatttgaattcgggaggtagaggttgtagtgagttaaaatcgtgttattgtattttagtttgggcgatagagtgagattttgttttaaaaaaaataaaataaaataaaataaaataaaaaaaaaaatagtagatttaattagttgtgttggtttatatttgtaattttagtattttgagaggtcgaggcgggtagattatttgagtttaggagtttaagattagtttggttaatatagagaaattttagtttttgtaaaagaaaaaaattagttgggtatggtggtgtacgtttgtggttttagttatttaggaagttgaggtgggacggtggtttgagtttgggaggttgcggttgtagtgaggtatgattgtatttgggtgatagggtgaggttttgttttaaaatagaaaaataaagcgtagattgtgggtttttaaatttagggtgtggtttttagtaacgggttgttttttgagacgaggtttttgggttaggtagtttttaggtttttgttgttaaggatagttttttttttagtaatttgagttttaagg

SEQ ID NO: 133 - DNA, 6794 bp, Artificial Sequence
  chemically treated genomic DNA (Homo sapiens)
attatattaagtatataaagagattagaattatatatggaataaatgataaaaatgggtataggttatgttgggagggtataaatgagagagtggttaattttgtttaatgaagtagttgggaaagaattaataaagatagagatattttattcgatttttaaaagatagataagaatttatatttatttggtaaataagttggaagatggttaatgtaggaaaagggagagaagttggggttattatattaggtaaaagaaggggattgagtaaaggttaataggtatgtagaagaagtgtatatttgtagattatatgggtttatagtaagagtttggaggaagattatgtggtggagagttttgtttttattttttatggttttttaggttataatttttttttttatgtgtgggggaatatgttattgtgtgagttggggagatagagtttaatttttttttatgatagttttttttaagttttagtgttgaggtttagtagggtttggggattattaattcgttttggtataaaattgaatagttgttggattttttgtagtagtatttagtatattaggtataggagtatggtttaatttatttaatattgtgtatattaggagtggggattgtgggagttagaaaatttaaggaagatagaagtgatttttggttggaatggttaaggaaggtttaaggaggtgagggatttttatttagattttgaaatgtaggtaggagtaagtagatttattgggaggggaagttagtagtggaaggaatattgagtaaaagaatggtaaaggatataggattagatgtgggaatagatgaggtatatgggagatttaataaattagtttggttaatataaagttataatggagggggtgttgaaagggtatatttgataaagtttggataaagtataaattttttagttttgaattttaagttatattttttaagtaatgaggatttgttgaaggttattgtgtaggagagtgattaagattaatgtggtggtaatttgttataaggatgagaagaaaattgattttaggtaggaaaattgggttaggaggttggtaaaggaatttaatatttagggagtaataagagaggaaaggaagggattgagaagtaatagatagaatgtatttttttttttgtgtttttggttttttttatattatagaatttttatttttaattatgaatatttatataaatgtttatttttttttaattgtttttttttgtttttattttttttttatttttatttttgttttttttatattgtttttttttttttatttttgtgttaattatttaatttattaaatatttattatttatataatggatattgtataagatattaaaggtttagagaagggaatttagttttttttggaaaattaaagaggggtttaattataaattaagtagaagtttttgttagaatttaggggtgtatagaggttttttatttatatttatgtatcgtttgaatttaatttagaaaaatgataaggaagttattaggggagtaggtagaggaggatgtagaggtgtagtagggaattgttggttatttggcgaattatgttataggatttgtgtgtaggagtgatgaattatgattggagaagttagtagggttttgtgtattatgttgaagaattaaggtttattttaaatgtgttggaggtttttttagaattttatatagaagaataatattagatatttttagagttagtaaaattgaggatttatatttttaggttttggagttagattgagaatagagtgttatttagggttagttatttggtggtcgtgtgattttggataaattatttagttttttagttttagttttttttttaaaatattttttttaaaaaaaaatattattttttttgtaggtattgttttttatttggtgagaattaaatgatatgttatttgtaatatttttttatttttatttgatattgataaattattattgtatattttatggggtataaagtaatgttgtgatatatgtatatagtgtagaattattgatttaagttaattaatatatttatagtttcgaatggaatatttattatttattttttttgtttaattgaaatattgtattttttaattaatatttttttatttttttgattttttagttttcggtaattattattttgttttttgtttttatgtgttggattttttttttttttagtttttatatataagttagaatatgtagtatttgtttttatgtttggtttattttattagtataaagttttttaggtttatttatgttgttataaatgataagattttttgtttttttgaggttgaataggtttttaatgtgtatatatattatatttttttgtttatttattaattgatgaatatttagattgattttataatttgattgttttgaatagtgttgtaataaatataggagtttaatattttttagattttttgattttaaattttttggatatatattttggagtagaatttttggatgttatttttaatatttttagtatagtgtttggtatatagaaagttttttaaatagatagttatttttattagtaatgattaggaatgatttattattttagttattgttattattataaaaattattttataaattattatgaatattatttattttggtgtgtaagatgagttagagatgggaataagttggaggaagggagattagttaggaggtttttggaataatttaggaaagaatattttgttttttgtttggtgtttagttgtcgtttagaaggagttttaaaaaaagtttgtggaataaatgaaaaggaagattgagtagaatttagtgattgattagtttaaagaaattagggagtaaacgaaagataattgtaagatttggagattgagtgattggagaattttggtattatggatataaagaaattttttttttttttattttttagttttgcgtttttaggttattgtttatttgatatttttggatggttggtcgttttttgaattttatttatttgtttaatgattgtggtgtgtaggtttgttgttttgtttttttttagaatgttttgttataattatagtaaaggtatatttgaatttagaatttcgataatttaaaaatttaaaattttatttataaattgggtttgaatatattttttaggttgtttttaaattttttttttttttttttttttttttttttttttatttttagattatgtagatgttttagggaagattttagtatttgtgtttttgttggggtattaatagaattttatgtttttatatttattattgtatttggaataaaatattttttatggttatttggtattatatattttttgttttgtatataatatgaaattatatatatagtttattttaggttttatattattataaaataaaataataatagtaataataaaaatttggtttagtttttggtttttatatttttgttaatttgttatttgtattttgattttaaagataattggagaaatttgggagtataatataagattttattttaattaattgatttgtttattgttatggattgatttttgtataaagtaatagtaggttgggttgatgttatggttttttgatttttttttttttttttttttttttttttttttttttttttttttttttttttttttttttttttttttttttttttttttttttttttttttttttttttttttttttttttttttttttgagtttgattattttgattattaaatgttttgtaatttgaaaaagaatagaagttatgagtttgtattaggaataggttagttaggtttaagggttttataatatttagaaagattgtttttaagaaagaaataaaaaaaaagttttatagagagattagtgatattttataaataagtttgtaatgttgtttattagtataaatgatcgtacgttgatttgttagatttattgttcggttgtttttgttagggtatatatttgtgagatagttgtttcgaattagggaaggttaagtaaaaattattgtttgtttagagatggttgttttgatgttagttttattagtttttgagtttttgttaagttagtaagaattagtatagatttggaggttaaagtttagtagaaagagtttttatagtagtgtgtaaagagttttttttttgttttattttttttttttttattggttatttagttggtgtgtagcgtgtgtgtgtgtgtgtgtgtgtgtgtgtgtgtgttttttaaatagtatttgaaggataggaaattaaatgtttgtgggaaaaagtaatattttgggtttttagtattttagttagttgtttttttatttttttagattgtgattattttttgaagttattaaaatttatttttggtaatgagaaaagggagtgatttgatggtttttttttaattgttttgtgtttgataagaaatatttaaatattttaatttgtttttttaaattttttttagtggtggtaaaataattttatttttatttgttagggaaaaaaatttttgtcgtgaattttagtgttgggaatataataagataaaaagttatttgggttagtttgtttttttaggatgaaataaaaggaatatagattttagcggttgttttaatagtttggtaaaggatttggtttattttgggtgtgggagatgggaggggtaaagaggttagaatattatttagattatagatagaaagaaattaggaagtaaggggaaattattatagtttgtttatagtttagaatgttaaaggtaatagtttttgttggttggttatttattagtaaaaaggagagagtcgtttagattcggattggtcgaaagataggaatagatttgaaatagggggagagtttttggcgaaagtaagacgtggaggttttattaggggttagtagtttttttttgttaattttttattgggataaaaggtaagatggtattattttgtttttagatatttgtttaaataaagtttttttaattttattttatttttgttgtgggatttttaagtagataagaagaaaagatatttttttagtgagtagttgtttagtttttgtttagttttgtttcggggtagtatttttagttatagaaagtaagtcggtaagtttttttaggtaggatttgttgtaatttagttgttggattgatttgaaacgggattttgtatatttttcgaagtatggtgagttggtgttgattttaaagttgtttggtgaaggaagataaggtggatcgtagagattaaggggagagggagaagttttgttttttttttttttattaaggtataatgagtaatatttgttagaggttttgggagtatttagaattttattttttttgtttgtttacggaggtagataagttaatcgtgattgaaaatttaggggttttttgttttttttagttatagaggtatggttattattttgtggttttgtttgattattaggttcggattgttgaggatttgagttttcgagtaggtgataaattttaagttttggatattttgtatgagggttggtggtttgttagatatttggagaaaagacgagatggttttagttagtaattataaggttatattttttttaattacgtggttgaggatagaagtttataggtagagtcgtgagtagtataaatttatatttaatttttgaattttttgagggttgggtaatgagtttttttttttatttttttataattttttaatgtttaaagagttgtttaaaaagtatgaggaagtattggtaagaaattattaattgaaatatatttttttcgttaagtgagtgtgaaattggttagtaattgttgttgagatgattttaattatagtatgtatatttataggtttagggtgtatttttaaaataaataaatgatgtgtttaatattgtattttttttttggttgtaaaataatttatgttttattttagtaataaaattgtattttgtttgaaggtaaattataagattttttttaatgatatttttaaatttaaattttagatttttttttttaaaaaaaatttttgaaatattttagggtaatatattaattttagttttagttttaattttaattttttttattttgatgggaatatatagggttaatgtagaagataatatttagaagatattaatgtttttagtgatattatgatatagatttttttttaatttttagattttgagatatgttatttaaattatgatattttttggtttttattatgattagaaattggttagttatagatatttggtaaattttgataggaaaaaggataatatttttttgaagaggagataaagattttattttggtatttgaatgaaatatgaattatattgtaataaaagaggaaagtttttatgtatttatttatttatttatttatttatttatttatttatttattatttttttaagtgttaggtatagatagtagtgggtttggtgagttggggagggtaaaggagattattttagtagtgattgaatataaagtggataaaatatagttttgataatggatatttggggtttggtgggttgggaagtaaatggagattgttattggttttgattttattgttttttgaatttagtgaaattt

SEQ ID NO: 134 - DNA, 6794 bp, Artificial Sequence
  chemically treated genomic DNA (Homo sapiens)
aggttttattggatttaggaagtaatgagattagggttaatgatagtttttatttgttttttaatttattagattttaagtatttattgttaagattatgttttatttattttgtatttagttattattagaataattttttttattttttttaatttattaggtttattattgtttatgtttggtatttggaggggtggtaggtggatggatggatggatggatggatgggtgaataagtatataaaaattttttttttttgttgtaatataatttatattttatttaaatattaggataaagtttttattttttttttaaggagatgttgtttttttttttattaaaatttattaaatgtttgtagttggttagtttttaattataataaaaattaaaagatattataatttgggtagtatattttaggatttgggaattaaaaaaaaatttatattatgatgttattgagaatattagtattttttaagtgttgttttttatattagttttgtatatttttattagaatgaaagggattaggattagagttagggttagagttgatatattattttggaatgttttaaaagttttttttaaaaaaaagaatttgaagtttagatttgagaatattattaagggaagttttataatttatttttaaataaaatgtaattttattgttaaagtgaggtatgagttattttatagttaaagagaaggtatagtattaaatatattatttgtttattttgaaaatatattttggatttgtggatgtatatattgtaattgaagttattttaataataattattggttagttttatatttatttagcgggggaggtgtgttttaattagtggttttttgttagtatttttttatattttttaggtaattttttggatattagggggttgtagagaagtagaaaggaaaatttattatttagtttttagagagtttagaaattaagtataagtttgtattatttacggttttgtttgtaggtttttgtttttagttacgtagttagaaggaatatagttttgtagttgttgattggagttatttcgttttttttttaagtgtttggtaaattattagtttttatgtaaagtgtttagaatttgaagtttgttatttgttcggaagtttaagtttttagtagttcgagtttggtaattaaataaagttataaagtagtggttatgtttttgtgattggggagagtaaagggtttttggatttttaattacggttgatttgtttgttttcgtggataaataggggagatagggttttaggtatttttagagtttttgatagatgttgtttattgtgttttggtggggagaagaggagtagggtttttttttttttttttagtttttgcgatttattttatttttttttattaggtaattttgaagttagtattaatttattatatttcggagagtatgtaaagtttcgttttagattagtttagtagttgggttgtagtaagttttatttggagagatttatcggtttgttttttgtggttggaggtgttatttcgaggtaaaattgagtaggagttgggtagttgtttattaggaaggtgttttttttttttatttgtttaagaattttataataaaaataaaataaaattaaaagggttttatttagataaatatttgagaatagaatggtgttattttgttttttgttttaataaaaagttagtaagaggaagttattaatttttggtaaaatttttacgttttgttttcgttaggagttttttttttgttttaagtttgtttttgtttttcgattagttcggatttggacggtttttttttttttgttaatgaataattaattagtagaggttgttgtttttaatattttgagttatgaatagattgtaataatttttttttattttttggtttttttttgtttgtgatttaaatggtattttgatttttttattttttttattttttatatttaagatagattagattttttattaaattgttaaagtagtcgttaaaatttatattttttttgttttattttggagaaataggttagtttaggtagttttttgttttgttatgtttttagtattgaaatttacggtagagatttttttttttgataaataggagtagaattgttttgttattattaggggaaatttaaaaaggtaaattaaagtatttaggtattttttgttagatatagagtaattggaaaagaattattaagttattttttttttttattattaagaatagattttaatagttttaaagaatagttatagtttggaaaagtaagaaagtagttgattaaaatgttgagaatttaaaatgttgtttttttttatagatatttaattttttattttttaagtattatttgggaaatatatatatatatatatatatatatatatatacgttatatattaattaggtgattagtagagaaaaaaagagtagaatagaaaaagagttttttgtatattgttgtgggggttttttttgttaaattttgatttttagatttatgttagtttttattaatttggtaagaatttaggaattaatgagattgatattaggatagttatttttagataggtagtggtttttgtttgattttttttagttcggagtagttgttttataaatatgtgttttggtaaaaatagtcgggtaatgagtttggtagattaacgtacggttatttatattagtagatagtattgtaaatttgtttatgaagtgttattgatttttttataagattttttttttattttttttttaaaaataatttttttaaatgttgtgagatttttgaatttggttaatttatttttagtataagtttataatttttgtttttttttaaattgtaaggtatttagtaattagaataattaaatttaagaaaaaggaagaaagaaaggaagaaagaaagaaagaagaaagaaaagaaagaaaaagaaagaaaagaaagaaagaaggaaagaaagaaagaaagaaaagaaaagaaaagaaaaagaaaattagagaattatggtattagtttaatttgttattattttgtgtaaaaattagtttatagtagtggatagattaattggttaaaataaaattttgtgttatgtttttaagtttttttaattgtttttggagttagagtataaataataagttgatagaagtataaaagttaaaagttgagttaaatttttgttgttgttgttgttgttttgttttataatgatatgagatttaaaatagattgtatatgtaattttatattatatataaaatagaaaatatataatattaaatgattataaaggatattttgttttaaatataataatggatgtaaaagtataggattttattaatgttttaatagaggtatagatgttgaagttttttttgagatatttatatgatttaaaaatgaaaaaaaaaaaaagaaaagaaaagaaagaaagatttggaagtaatttgagagatgtatttaaatttaatttgtaagtggggttttagatttttgaattgtcggggttttaaatttagatatatttttattatagttatgataaggtattttggaaaaagataaagtagtagatttgtatattatagttattgagtaagtgagtgaaatttaaaaagcggttaattatttaaagatgttaggtgagtaatggtttgagaacgtagagttgaggggtggaaagagagaaggtttttttgtgtttatagtattagaattttttagttatttaatttttaagttttgtagttatttttcgtttgttttttggtttttttgagttaattaattattgaattttgtttagtttttttttttatttattttataaattttttttaaagttttttttgagcgatagttgggtattagatagaaaatagaatatttttttttagattattttagaggttttttaattgatttttttttttttagtttatttttatttttggtttattttgtatattaagatgagtggtgtttataatagtttatagagtagtttttataatagtaataatgattgaggtgataagttatttttagttattattagtaagagtagttatttgtttggaaagttttttatgtgttaggtattgtattaagaatgttagaaataatatttaggaattttattttagggtatgtatttaaaagatttgaaattaggaagtttgagagatattgaatttttatgtttattgtagtattatttaaaatagttaagttatggaattaatttgagtgtttattaattgatgaatggataagaaaatatggtatatatatatattagaaatttatttagttttaaagaagtagggaattttgttatttgtgataatatgaatgaatttgaaggattttatgttaatgaaataaattagatatggaggtaaatattgtatgttttgatttatatgtggaagttaaaaaaaaaaaaaatttaatatatagaagtagagagtagaatggtggttatcggaagttggggaattaggggaatggggagatgttggttgaagggtataatgttttagttagataggaggaataaatgataagtattttattcgagattgtggatatgttaattagtttgagttaataattttatattgtatatatgtattatagtattattttgtattttataaaatatataataataatttgttaatattaggtaaaaataagagaatgttataaataatatattatttaatttttattaaataaaaaataatgtttataaagaaggtagtatttttttttaaaaaaagtattttagagaagaaattgaggttgaaaggttaggtaatttgtttaaggttatacggttattaagtggttaattttgagtaatattttgtttttaatttgattttagagtttgagagtataaatttttagttttgttgattttaaaaatatttgatattatttttttatgtaaaattttggaagaatttttaatatatttggaataaattttagttttttagtatgatatataaggttttgttaatttttttaattatggtttattatttttgtatataggttttgtgatatagttcgttaaatgattagtagttttttgttgtatttttgtatttttttttatttgtttttttgatgatttttttgttatttttttaggttgggtttaggcgatgtatgaatatagatgaaaggtttttatgtatttttaaattttggtagaaatttttatttggtttgtggttgagtttttttttggttttttaaggagaattgaatttttttttttgaatttttagtgttttgtataatgtttattatgtaaataataaatatttgatgaattaaataattaatatagaaataaagaaaaagaaatagtgtgggagagatagagataaaaatggggaggaaatggaagtaggaagaaataattggggagagataaatatttatgtgaatatttatgattgagagtgaaagttttatagtgtgaaaagagttaggagtatagaggagggaatatattttgtttattgttttttagtttttttttttttttttttattgttttttgaatgttagatttttttgttagttttttaatttagtttttttgtttggagttaattttttttttatttttatagtaaattgttattatattaattttaattatttttttatataataatttttaatagatttttattgtttggaagatatgatttggaatttaaggttaaggaatttgtattttatttaaattttattagatgtatttttttaatattttttttattatggttttatgttagttagattggtttattagattttttatatgttttatttgtttttatatttgattttgtattttttgttatttttttatttagtattttttttattgttaatttttttttttagtaagtttatttatttttgtttgtattttaagatttgaataaaaattttttatttttttagattttttttaattattttagttaaaaattatttttgttttttttgaattttttagtttttataatttttatttttaatatatataatattaaatgaattgaattatgtttttatatttggtatgttgaatattgttatagaaaatttaatagttatttagttttatattaggacgaattaatgatttttaaattttgttaggttttagtattagggtttagagagagttattataaaggaaaattggattttgtttttttaatttatatagtaatatatttttttatatatagaaaagaggattatggtttagggagttataaaaaataaaaataaaattttttattatatagtttttttttaaatttttgttgtgaatttatataatttgtaaatgtgtattttttttgtatatttgttgatttttgtttaattttttttttttgtttgatgtgatgattttaatttttttttttttttttatattaattattttttaatttatttgttagataaatatgggtttttgtttattttttaagaatcgaataaaatgtttttgtttttattaatttttttttaattattttattagatagaattgattatttttttatttgtgtttttttagtataatttatatttatttttgttatttattttatgtgtgattttgatttttttatgtatttaatgtagt

SEQ ID NO: 135 - DNA, 6223 bp, Artificial Sequence
  chemically treated genomic DNA (Homo sapiens)
ttgaatttaaggtggaggttttattacgaggtttgaaattgtttttttgttgaaattgtggattttattttttgattagatttttagagtaagattttgtatttatgatattggttgaaaatgtatattttgtgagatattattaattagttaaaatgaattataaaagagtgaagaatttataatgatgaaagagatatttagaatttttttgggtggtttattttttgagtttagttaggaaaatggtattttttttttttagattttggaagggtattcgatttggagtattgtttatttttaattttaaaaggtaacgtgattgattaataaattatttttttagtgtttgatatttgtaatatatgaaattgaatagatgtggggaataatgttgtagatgatagtaaagattatttttagggaggagatttttgattgtgggttgattaggatttattgtttttaatgtttatagttgagtttgtgtgtagatggggtggtggtagtgatgtttttttatatttattttgagaggtatatagtatttttttattaattgattaattattattttggggtagtatttttttttatatgaagaaaatttggaataatttattatttattgtattattaatatatttatttgtttttttcgttgttttttgtttttttttaatgatttagagttttataaaatatttttattttgttatagaattgtttttcgttttgggataggttaatagaagttttattttggtatatttttgatggtgattatttttattttgttaataaaaaatatatcgaatattaaatatatgttaagtattggtataaatatttaatttttataattatttttaagtttttagttttcgttgtatatagtagaaaatataggtataaagaggaaaatttatatgattagaatagagtagttattaaatggttaggtagtggatttattatttgattttggatttttgattttagttttaatattttatttattatttaggtttttaagtgaaattttatagtcgatagaagtgtatattattttatgttttttgtttttttagttgtttttttatgtaatgttgtaatgtattttttttaatatgttagtaaagtttagagataagttagaaattattttggttatagttaaagaatatttttaggtggtatggaagaatattttttttttagagttaaaattatgatgtttttagttgggattttgggataataaattagatagagtttttaaatatgtgatattttatttataaagttattattttttttttttttttttgggttattttaagttttattatatttataattgttattttagaattatttttattatggaaagaaagaaaaaatatatatatatatagtttttgaaggatttagtattaagtttttgtatgttttttttttgaagttttatttttttggatttttagatttaagggttggttatttattttaggtagatcgagaaagtttggaggagttatagaagtatttgagtatttattttttttttaaaagtgattggttttgtttaatagttattaaagttatttattaagtttttaaaatatttggattatatatattttattggaaatattatttagtgtttaggtatattatataaaaaagtttttttttttttttaatttattgttttttttaagtttagtggattattagttattttattttttatttttttaaaaagttattttttggtattttttgtggttttgaatatttttgaatgaatttaagagaattgaaatgatttttttgtgtagtttgttttttacgatgtaatttatttgatttatattgattaaatatttttttaaaaagttataaggagggtaaaattttatagtgatttttttatgggaataagataaattaatttgatttttttttattataatataattattttagttggaaattattttattatggggtaaattttttatattttaaattttgattatgttagttgaatttattttttatgtttcgtatttatggattagttaaatttaaatttaagatttgtaggtattgatttttagttaaatcgttgagttatttaagtttggtagtgatttgaaatgtgaaaaaaaggattatgagaaattggattgagaatttgaatttttttaagaaggggtttaaatagaagagtttttatttatgatagtgattttaggtttttatatatttgatatatgtttaattgtgtaatttttattgtatgttaattatttattaagtttttttttttttatttttgttttttggggaaatgtaattgtgtttttgttttttttttatcgttaaaattttgattgtatataaagtaataaaataaaaattgtttaattatttttattgtttttatttaatgtttatttttaattattagaaggtagtttgagttatttttttggtaaaatataggatagagtatatgagaaataaatgtgttattgttaaagaaaataaaaattttattgtttagaggttttgagggaaaggattgtgtttttttggtttattgaaattgttatatgttattaggtttattgtaaattattttttgataaattatttgttggataatgagtttaagaatttgaggtgtttttttgtttttatagagtaaaataggattttgatgtttaaatggaagttatagagtatataatagggtgtaggtaaagttattgaatagttatattttatttttaggaaagtagtggaagagattgtgttttgagaagataggtattttagaggtaatttttttaagattttaattagttatttaagtatatgaattatgtgtttatatgtattatttaaatgtttttgaggttagtaggtatataggaattttaattagttatagggagaagttttgtttttttaggattagatatattttttttttaattggggtagaaaatgttttgggttttttatgtttaattatagaatttggagaaaattttaggattttatatggataatattattattaattatgaaataataaaaagtggtgttttgatttttataatgataatttaataatgtatgataaggtgtattgaaagtagtttatatttttaatggttgattttagatagatatatataagatgtttttagagaaaatttatggtattttttttaaaaattattcgatagtaatttaattagaaatgaaattgtgtttttaaatattatatttatgatattttttaggtatttatttatatttttaatagttttttttattattatagtaaaatatttgagagatgtttttattttgtatttttttaaatattagtgttttatttgttttttaaaagtaatatttaaaataaattaatttatgttaagtgaattagagtttgaggttaattggaaaggaatattgtgtagagttttaaataataaaattaaaaggagaatatattatttattggtaattttaaaatgttataaatattgtaatattattgaaaattttatgatattatataaatattattttttgtttattgtaagtatttttatttttattgttatatagttataatgtatttggttattttataagtatatttatatatagcgtagaattttgtatgttattaaatatgattattatattaattgttttattagttttttcgtagttttatattttataaataatgtatataaaagtgttatattttgttcgggtatggtggtttaacgtttgtaattttagtattttgggaggtcgaggtaggtggattatttgaggttaggagttaaagattagtttggttaatatggcgaaattttatttttattaaaaaatataaaataaataaataaaaatgttatatttaaggttaaatatatatttaaatattttttttataatttaagtaggggattgtattgtttataatatgattaggttaatgaaagtatttttgtttttatagatgtaagatatttaagtatttttattttaaagatatttttaaataaaacgtagtatgtaaaataaataaagtggaaagataaaaaataagaaagagaaagagattgttgtagtaatagtataggataaaataatatttttggtagtattttggtagtaatttatgaagttatcgttttgggaatagttaataaagatcgggatgtttgggttattgtaattttttaaaaatgggtatttacgtaaagaatagtgggtttgggaatatgaagatttaggtttaagtttagttttgttatgatttagttgtatgattttggtgaagttatttattttttatttttttatttttttttttatttttttttttttggtttttttgattgtaagagagaagtgtggtagagagtttttgggtgtatttttttttttgttttttatttagttttttaaattgtgagtttatgattgtttggtcgtttttaaaaaagaagtattttgtttaattttttaggttatatttttaagggtaatgattatgtgtttatagtgagttgtaaaaatgttgttattgttagtgtttagttataaaatttggtgaaaatttatggttttaaatagtttaaataatgggagttaataaattgggtattaatattttaattttttttcgtgttttaatatgtggaattttttgtttagaagttggttttttttaagtatattgttttatataaatttggagttttttgtttgattttttatttgatttttgattgttgttgtttttttattaagtgtttggttaaaagtgagagggttagtatagataaagtaaatagtgttttatggggttaataattaataaattgaattgttattagaaaattcgcggatttagtttattataatgttatgatgataatattttgtgagagaagtttgtataaaaagtaattgtttttttgtttttaaaataggtattataagtggataaataatgtgtattgttttgagtttaaaggtacgtagtggatttggtttttttgatatgtattagtatagttaatggttagttagtagatatgaagttaatttgttattaatgaaagaagatttggttttgtggttaattaatttattaggtaaggttataagattttattttgtgagtaaagataatagtttttgttttatttttttttttgtagtgttttttatttaagtatgtgatagtattttggaaagaaagatttttattatttgatatttgtatttgggaaatttgaagtaggtggaaaatttaagtgaattttttaatgtttgttatattaattgtgtttagtaattttaatatgatgtatttaaatgtggaaatatgtagttagattgtttattttatttatatgttggtttgatttatttttggttttttttttatgtagttgattaatttgatttatttttttgatattgtatataggttatagtgtttgtaaaatttggtttttaaatttggatttttttgttttatttttatagtatattttttaaaattgttgaatatttaaatttaggaataaaattatgtattttttttttaaatgagttgattagagttattttattttgaattaaaattttttttttttatttgtttttgtttttaaggtttagtttaatagtatttttgttgattttatgttattttttggtaaagatttttttttttttgttgttgttgtgtttttatatttttaggataaaattttaattatgtgaaaaatagaattatatgtttaaaggattattatatatagtagtattatttttattaagttttttatagagaataaatttaatttaaatgtgagaaaaaagatttttgtagattttataagatataagatttgagtatattatttgtaggggagattttattaatattattttattatttaaattatttgttaaggtaagagttgttatttttattttttagttaatgaaattaagagtttagtaaggtgtattttgtttatttgaaattttagtaaggtttggtagaagtttagtatattttattagggttttgtttgttttttatggttttggatttttgtatggtttttgtatttatttattttttagtttttat

SEQ ID NO: 136 - DNA, 6223 bp, Artificial Sequence
  chemically treated genomic DNA (Homo sapiens)
ataaggattaaaaaataaataaatataaaagttatgtaaaaatttagagttatggagagtaagtaaaattttgataaaatgtgttaaatttttgttaaattttgttaaaattttagatggatagggtgtattttattaagtttttagttttattagttagaaaatgaggataataatttttattttgatagatgatttaaataataaaatagtgttgatgaaattttttttgtaaatgatatgtttaaattttatattttataaagtttatagggatttttttttttatatttaaattaaatttattttttataaaaaatttagtggaaatagtgttgttatatatgatgattttttaaatatgtgattttattttttatatagttgaaattttattttgggaatatgaaagtataatagtaataaaaggagaggaatttttattaggaggtagtatgaggttagtaaaagtattgttagattagattttaaaaataaaagtaaatggaaaagaaaaattttagtttagggtgggatgattttagttagtttatttggaaaaagaatatatgattttgtttttgagtttgggtatttagtagttttagaaggtgtgttgtaaaagtagggtaaagaaatttagatttagaagttagattttatagatattgtggtttgtgtataatgttaaaagagtaggttaaattggttagttgtatgaaagaaaagttaaaaataaattagattagtatatagataaaataagtaatttgattgtatatttttatatttgagtgtattatattggaattattaagtatagttaatatgatagatattgggaaatttatttaaattttttatttgttttaggttttttaaatgtaaatgttaaataataaaagtttttttttttaaggtgttattatatgtttaggtgaaggatattataggaggaaaaataaaataaaaattgttgtttttgtttataaaatgagattttataattttatttaatagattggttaattataaggttagatttttttttattggtagtaaattagttttatgtttgttggttagttattggttatattgatgtatattagagaggttaggtttattgcgtatttttgggtttagagtagtgtatattatttatttatttgtaatatttgttttggaaataaaagagtaattgttttttatatagattttttttataaaatgttgttattatgatattataatgaattggattcgcgggttttttgatgatagtttagtttattaattattaattttatgaaatattatttgttttatttgtattggtttttttatttttggttaaatatttagtaggaaaatagtagtaattaaaggttaaatagaaaattaaataagaaattttaagtttgtatgaaataatatatttggaaagagttagtttttaagtaagaaattttatatattgaaatacgagaaaaagttaaaatgttagtgtttaatttgttaatttttattgtttgggttatttaaaattatagatttttattaaattttatgattgaatattggtaatgatagtatttttataatttattgtaaatatatgattattatttttaaaaatatagtttaaaaggttaagtaaagtattttttttttggagacggttaagtaattatggatttataatttagagaattgggtgagaagtaggggaagaggtatatttaaagattttttattatattttttttttgtagttaaagaaattaaaaaaagaaaaataaaaaaaaaaataaaaaaatagaggataagtgattttattaagattatatagttaggttatgatagaattaggtttgaatttgagtttttatatttttaagtttattattttttacgtgagtgtttatttttaaaggattgtaatagtttaagtatttcggtttttattaattatttttaaggcggtggttttataggttgttattaagatgttgttaaaggtgttgttttgttttatgttattgttataataattttttttttttttttgttttttatttttttattttatttgttttatatgttgcgttttgtttgaaagtatttttagagtagaagtatttaaatattttatatttataaaaataaggatgtttttattaatttgattatattgtgagtagtgtaattttttatttgggttgtagaaaaggtatttgaatatatatttggttttgaatatggtatttttgtttgtttgttttgtattttttagtagagatggggtttcgttatgttggttaggttggtttttaatttttgattttaagtgatttatttgtttcggttttttaaaatgttgggattataggcgttgagttattatgttcggatagaatatagtatttttgtatgtattatttataggatgtaagattacggaagaattaatgaagtagttaatgtaatagttatgtttaataatatgtaggattttacgttgtatataaatatgtttatgaaataattagatgtattatgattgtatgataatgaaaatgaaaatatttgtaataggtaagaggtaatgtttatatgatattatgaggtttttagtgatattgtagtatttatggtattttaaagttattaataagtaatatattttttttttggttttattatttgaaattttatatagtatttttttttagttaattttaaattttaatttatttaatataagttaatttattttaaatattgtttttgaagaataaataagatattggtgtttagaaaaatgtaaagtgggagtattttttaaatattttgttgtagtaatagaaaagattgttgggagtatgagtaagtatttaaaaggtattataaatatagtatttaaaagtataattttatttttaattaaattattgtcgagtaatttttgaaaaaaatattataaattttttttgaaaatattttatatatatttatttaaagttaattattgaaaatgtgaattgtttttaatatattttgttatatattattagattgttattatgggaattagaatattattttttattattttatagttaataatgatgttatttatataaagttttaaagttttttttaaattttgtgattaaatatgaaaaatttaaagtattttttgttttagttaaaaaaaaaatatgtttagttttagaaaaataaaatttttttttgtagttggttaagatttttatatgtttgttggttttagaaatatttaagtaatatatataagtatatgatttatatatttaaataattaattgaaattttaaaagggttatttttaaaatgtttgtttttttaagatataattttttttattatttttttgaaagtgagatgtggttgtttagtaattttatttatattttattatgtgttttgtgatttttatttaagtattagagttttattttgttttataaaagtaagaagatattttagatttttaagtttattgtttagtaaataatttattaagggatagtttatagtaagtttaatggtatgtaataattttaatgagttagaaggatataatttttttttttaaaatttttaaatagtgaagtttttattttttttgatagtggtatatttattttttatgtattttgttttgtgttttgttagaaaagtaatttaaattattttttaataattagagatgaatattaagtaaaaataataagaataattaagtaatttttattttgttattttgtatatagttaaaattttagcggtgagaaaaaagtaaaaatatagttatatttttttaggagatagaggtgagagaaagaaggtttagtgagtaattaatatgtaatagaagttatataattagatatatgttaaatatgtagaaatttaaagttattgttatagataaggatttttttgtttaagtttttttttaaaagaatttagatttttaatttaattttttatgatttttttttttatattttaaattattgttaaatttaaatgatttaacggtttggttgaaagttaatatttgtaggttttggatttagatttggttaatttatgaatacgaaatatgaaaaatggatttagttagtatgattaaaatttggagtatggagaatttattttatggtgaagtagtttttaattaaaatgattatattgtggtgaagaaagattaaattaatttattttatttttataaaaagattattatggaattttattttttttgtaattttttaaagaaatgtttagttaatatggattagatgaattatatcgtaaagaataagttatataaaaagattattttagtttttttgaatttatttaaaagtgtttaaaattataagagatgttaaggggtaattttttaaaaaggtgggaaataaagtgattgatgatttattagatttgaagaaagtagtaggttagggagaaagaaaaatttttttgtataatgtgtttaaatattgaatgatgtttttaataaagtgtatatagtttaagtattttaaaagtttgataagtaattttagtaattattaaataaagttaattatttttaaaaggggagtaagtatttaaatatttttatggtttttttaagttttttcggtttatttaaaatggataattaatttttaggtttaggaatttagaaaaataaaattttaagagaaaaatatgtagaaatttaatattaaattttttaaagattgtgtgtgtatatattttttttttttttttatagtagaagtgattttggaataataattatgaatatgatgagatttgaaatagtttaggagaaaaagaaaaaaataatgattttgtaagtaaaatattatatgtttaaagattttgtttagtttgttgttttagaattttagttgaagatattatagttttgattttgaagaaaaagtatttttttatgttatttagaggtgttttttgattatgattaagatgatttttggtttatttttaggttttgttgatatgttagagaaaatgtattgtaatattatatagaaaagtaattggaaagataaaaaatatgaaatgatatatatttttgtcggttatgagattttatttagaagtttgaataatggatagaatattggaattggaattagaagtttagggttaaataataggtttattatttaattatttagtagttattttattttagttatatgaatttttttttttgtatttgtgttttttattatatataacggaggttgaaaatttaaagataattgtgaggattaaatatttgtgttaatgtttggtatatatttaatattcgatatattttttattagtaaaatagaaatgattattattagaaatgtgttaaaataaaatttttattgatttattttaaaacggaaagtaattttgtgataaaataggaatattttatagaattttaaattattaagaaaagataaaggataacggggagaataaataaatgtattaatgatatagtagataatggattattttaagttttttttatatggagaagaatgttgttttaagatgatgattaattagttaatagggaaatgttatatattttttaaagtaagtgtgagaggatattattattattattttatttatatatagatttaattgtgaatattgaaaataatgaattttaattaatttatagttaaaggttttttttttaaaggtaatttttgttgttatttgtagtattgttttttatatttatttagttttatgtgttataggtgttaaatattgaggaaatagtttattggttaattacgttattttttaaaattaaaaataaatagtgttttaaatcgaatatttttttaaaatttggaaagagaaaatgttatttttttagttgaatttaaagaataaattatttaggaaagttttagatattttttttattattgtgagttttttatttttttgtgatttattttggttaattaatagtattttataaaatatatatttttaattaatgttatggatataaaattttattttaaaggtttaattagaaaataaagtttataattttaatagaaaggtaattttagatttcgtaatgggatttttattttgggtttag

SEQ ID NO: 137 - DNA, 8979 bp, Artificial Sequence
  chemically treated genomic DNA (Homo sapiens)
gttatcgggtttaattttaatatgtatttttatgggattaagaggtgagaagaaattataaatattatttttagtggttttgtaaggtaatttttttatgtgtatatagtgttttgtggtgttttggaaattggatttattattttcgtatttatgattagatatttttgaaaaatagtaattgaggttttttttaaatttattagatttaaagttatatttattattatagttattatagttattatagtttttatattttttattataggtattacgttttatttttttaaatttagtttttttgttaatgttattatattttttgttagttttcggtttattatagggatttggtcgttgtatagttatgagttttcgagggggattatagtgggttcgaattttagttcggttatttttgaagattttaatgtatttgtgttttattttttttttgtgtttttttaaggtttttttagttattttttgtgaagtaaattgtataaaggttttttttgtgtttcgtttttgaaagtttattggtagtgttattttatttggtataatttttaattttgaaaagaattgaataattttttttttgttatagttaaatgggagttttttaagtcggacgaagttatcgttggtagtattagggttattcggatttgtatgttttaatatttaatttattttaatattgttagatttgaatattttaacgtatttgtgttttatggtttttttgtttttttttaaagttaattttattttttttttagatttaagtttaataaatgttttattatttggtttgttttttttggtgtagatgaaacgaatatttgatgtgttattttggattttgtaattagagaagaagcgtattattttatcggttgagtaggattagggtaggtttttgatttttattacgaatttttttttgtttttcgtgtttagtattatggtgattgttgggtttttggtggtaagtttggtttaatgtaattttggtgtagttgaaaaaaaaaaaaagaagattattgttatggaaaaatgttcgtgatatagtaagagaaaaaagtaaattattaatagaaaatttaattatgttgatagtttttttgtaagacgtttgtataaatagagagtttattaaatttttaatttatttattttttagtagttatttatttaatgtttattacgtgttagatattattaaaaattaatagtaatcggtcgggtgcggtggtttacgtttgtaattttagtattttgggaggttgaggtgggtgtattatttgaggttagtagttcgagattagtttggttaatatggtgaaatttcgtttttattaaaaatataaaaaattggttgggcgtggtggtaggtgtttgtaattttagttattcgggaggttgaggtaggaaaatcgtttttatgtatttaggaggtggaggtgagttaagattacgttattgtattttagttttagcgattagagtaaaatttcgttttaaaaaaaaaaaaaaaaaaaaaaaaaaaattaatagtaataaattagtgggagatgttaataaataaaagatggttatatttgaatatataaatataaaaaattttattagattaaaagattaaataataattaaaatataaataaaatataggttatgtaagttttttatataatatttttattatataaaaatgtatgtaaattaataaaattagggaaatatttgggttttagagataaatgaaaaaaagatattattgggaatttatatatttattttagaaatattttttagttgttatgtttaatattcggttttggtatataagaattaataagtttagaatgggtttatggttttataggagtatcgaatgttattattaaagatgtaaatgtaaatatatattatatttgttatgattttttgagtggagtgtaagtatagtattaaagagggattagttgattagttttattggttggaggttaaatggttaaatgaaatagattaatttgtttagggatttataaatattttttttttttaattatgatgaagtataaataggagagggaaaagtaagtgaaaagattggtaaggtatagattagattttaaagattttgatatataaatattaagcgttttttaagatttttaaatcggggagtatgtagggtgattttattaaaatttttttagatagattattttggtaatagcgtggtatttaaatagaagggggtcgacgtggaattagggagattagttagaatttgttttataaatatatgttaaaggaatcgtttaaggtaataggagtaaaatggagaaaagatgtatttatatatattaaaaaaagtggaatttgcgggatttgataatagattaagtatgagagaatataggtataggaggatataggagaggaatttgggaaatgtttaaatttaattaattttttagtaagttaaaattagaattaatcgttattttttatttattaagataatggaaattaaatagtaatagtaaattagtgttatgtagtttataaattaatatattattagaagagtgataattgatataaattattttttttttgataaattttattatattttgaaagtaatttgataatatgtattacgttttttgatagtaaatatattttagttatgtgttttaaggagatgatttgaaatttagatagatttatggagttatatattttttgaaaagtattttattaagaaaacgaatattatgtatttaattttaaaagttataaaaatatttaataatatgagaaattatttatgttataattgtaagtgatttaagagtataattgttttataatattaattgtgtataaaatatatgtttttatattttttgatattgttagaatttttttaggaatttagttaatagaaatatttataaatgttttttgtagtattgttagtaatggtagaaaattggaaatttaaatagttattattagaggaatggttgaatgaattatattttatttttaaattggaatgtaatgtagttatttaaaaaaaatttatttgttttgatttagaaagatttttaaaatatattaaataaaagaatatatatagtatgattttatttatagtaaaagattggtatgtatgtatatacgtatgtaaataaataaaagatttggaagtaaatttgtttttgagagaattgaagggtgggggggtgaagtgggtttttcgttttttattttatatatttttatatagttttaattttttatatttgttgtattgggattttttttttttaagttagaaagaatatattagtggttattttgagtgggaggtttatggattttttatgttatttttttaatttttttatgtagttttaaatttttatagaaataattatttttattttagtaaaaaaagtaatataaaataaattaaaatgtttgtatttttgggatttggtataggaaattttataaaattttttaattttgtatgtggatggtttatttgaaatggtttgggagtattgggttttttggaaataaagtataaagtgtaataacggttataaaattatattgaggaaacgatttaataaatatttattgattgtcgattatgtgtttagtatattgtatttgtagtgataatagtttttttattaattattttaaggttttagtgatagatttataagttgtttttttattttattttgtaggatttttttttttttttttgtttgttttatttttgggataattcgttttatttaattttttgtatcgttttattttttaagagtttttttgtaggggtagagaggttttattttattattgcgttttttgggaaggttattaggattgttggttaaagtgggaattaggattttttgtgagttaagaatttgtgtatttatatgtgtgttatatatattttttaaaaaattgtaacgatattaggttgagtagtcgttttcgggtggtgaattatgtgtatttttaaattttatattatattgttattttttaaatgttcgaaattgaatatgtagattgttgttattagtagaaaaataaatattatttaaatattttatttagtaaagtaatttattgggcgtttttgttaagtacgtatttgtttagatgtgattttatagataaaatttatttggggtttttttttatagataattaggtagtggagattgagtgtttgaatggatagattagtatttagattattatttttagtatttgttttttttaatttagggtcgtggtttttaaacgtttttcgttttacggttatttttaggggtttttcgagatcggtttagatagatagatatataaaaatatatatatagttatgagcgtttattatttttttattaggcgtagtataggcggtttttcggtattgagatgggggggaggagggagagagcgcgaggggggaggggaaagtagagaacgaaagaggcggaggcggttttcgaatttcgttttggtttttattattattatttttgggtttttagtttttatttatatattaatttttaacgatatcgggtaatttttttttttttttttttaaacggttatagcgagacggtagacgacgattagaattatttttgtttacgtaagcgagtaattacgtgagcgtttacgttatgtgagatttcggttacgtgagtaattttcggtttaaattcgggattattaaggtgtcgtatttttttttggtatggaaatagggcgggttaatattaagaaaggaagagggtgattggttagcggaacgttttacgtgattgattattggtttatttttggggataatcgttttagttgttagagaaataataacgttattatttaataagttatcggtgattggttcgtttttgaggttaattttaaaagtttaggttattcgcggaaatttatgttgttcggttatcgtgataatgtagttgaggaatttagaattatatttgggttgcgcgtttgcgtttcgttttttggttttcgttttttgggatatttttggggttagagtattggataatggattggtaaggacgtttattatgggttggttgtattgggagcgttttatgtgtaattttgattgttaggaagagttagatttttgtattaggtattagatattgggtatttttttttttttgtttttttatgtgtttgggtgtgtttggggaattggagagttttaacgggaatagttgagttcgagggagagtttttttattcgattttgttgttgtttttttatttttagtaaattgtttcgaattaggattagttttaaattttttttgtgtgattttttttgggatgggagttcggttagcggtttttgtttttttttttttttttttttttttcgttttttttttttttttttttttttttttttttttttttttttttttttttttgttcggttttttttttttattgttttttgtagagtagggttattttataggtagtgtgtttaaagtagttttgttcggttttatttagattttttttgtgaatttttgttttttttttgtcgggtgttaatcgttagaatatttagggtgggtaggaggaatggggaattaagattcgtgttattttttttttttttggggtcgtggatttttcggtagtatttcgagggagttagagagattataaggtcgttgagattttttttatttcgtttatgagcgtggtattaggttggaaggttgatatggaggaattttatatatttatatttttgcgtgagggttgaggttggattagataggtattgaatatatttgatttttataatttttatttgtaaattgggattataattttttaattttagggagttgataaaaaaaatttgaaaaatagtttttattttatataggtgagtttttaaggagataatttatttaaagtatatagtatagcgtttgattatttaattgcgtttatagagtaaatgtttaatgggaaaatgaatgtaaatttataaatttgaatgaatatgtgtatttttttggagagaggatatttatttttttttaaatttttaaagggttttgtgatttaaaaaaggttaggaattattgatagatgttggtaaaaggtggtagttatagtatatttttgtgtttataagttatttttatgaatatttttatagataaagttaggatgttggttagatattatagaagaaattggttttgtaagttttatgtgattttgtggtatagtatgtgtggtaattttgtttattacggatttttttttattggtatttgtatttgattataaaattaatgtatgattattgtaaaaaatgtagataaagaagagtaaaatgaaaataaagatttttttttatcgttttattatttagaaataattatggtttaaatgttaatatataattttataattgttttttatataaatgaaaatatagatttttttattttattattttttataaaaaatggattatgtttatgttatgtttggttaatggtaagattttggtatttagtttgggtttaaattttgttttattgttatttagttttgtgatattgggtaaattatattttttttttttttttttttttgagacggggtttcgttttgtcgtttaggttggagtgtagtggtacgatttcggtttattgtaagtttcgttttttgggtttacgttatttttttgttttagtttttcgagtagttgggattataggcgtttgttattacgtttggttttttttttttttttttttttttttagtatagacggggttttattatgttagttagggtggttttaattttttgatttcgtgattcgttcgttttagttttttaaagtgttggtgtgagttatcgtgtttagttttatttttttttttgagagggggttttattttgttatttaggttggagtgtagtggcgcgatttttgtttagtgtaaattttatttttcgggtttaagtagtttttttgtcgtagttttttgagtagttgggattataggtatattattacggttagttaatttttgtatttttagtagagacgggttttattatgttgtttaagttggtttcgaatttttggttttaagtgatttgttcgttttggttttttagagtgttgggattataggtgtgagttatcgtattcggtttttttttttttttttagtttattatattttgtaaatatagtggttttttttatgtgttggttttgatatttatgtaattaaatatattagttttttttttttgatttttgattttggggttatgttgagaaagtttttttttatttgaagataatatagtatatacgttttttattagtatttttgtggatttttaaaatatttaaatttttagtttatttgaattttgtttttttattagaaatgttatatttaataaataataagttttatggtattagatggttggaaggatttttttcgaaattttgtttaattttattaatttgtgtatttttattttaatgttaatagttttatattagttttttttattttttttttttttttttttttttttttgagttggagtttcgtttttgttgtttaggttggagtataatgttacgatttcggtttatcgtaattttcgttttttaggtttaagtaatttttttgttttattttcgcgagtagttggaattataggtatgcgttattacgtttagttattttgtatttttagtagagatggggtttttttatgttggttaggttggttttaaatttttagttttaggtgatttgtttgtttcggttttttaaaatgttgttattataggcgtgagttattacgtttagtttttattttttaatgaatgtatatgtatgtaattttttaggtgaattttttgtaatgttgtgttaagttttttaaaaagtttttttggaagttgggtaggtggtttacgtttgtaattttagtattttgggagtttgaggtaggtggattatttgaggttaggagtttaagattagtttagttaaaatgtaaaattttgtttttattaaagatataaaaattagtcggatgcgatggtatatgtttgtaattttagttattcgggaggttgaggtagaagaatcgtttgaatcggggaggtagaggttgtagtgagttaagatggcgttattgtattttagtttgggtgatagagggagattttattttaaaaaaaaaaaaaaaaaaaaagataaaaaggaaatttaagtatttttgggttttgttaaggattttgttaaatatataaaggattgtagggaaaattaatttatttttaatattgagtatgtttatttaagagtaaaataatatttttttatttatttaaattatttaggagtattatagttttaatatatgggttttgtacgtattttaaatttatttttaggtattttaggttgtttagttgtttttgtgaatgggatttttttttttaaataggattattgttgatatttgttgattatgttaattttgtagtttttgattttattgaattgtttttttagatttaatattttttttaattttattatatattttttatttttattttgtttggggtttttagggcgggaatattaacgggataagagagataaaagaaaatttggaaaaataatttattttattttatattgtttgtgattattattatattattattgggttggaaaaaattgtgaaattttaaggtgtttaataaatgggaggtatttaagtgtttatttaatgaattgtaatgattattggaattttttttttagt

SEQ ID NO: 138 - DNA, 8979 bp, Artificial Sequence
  chemically treated genomic DNA (Homo sapiens)
attgaaagagaaattttaataattattataatttattaaatgaatatttaggtattttttatttattaggtattttgggattttataattttttttaatttagtaatagtgtggtagtaattataagtaatgtaaggtaaaatgaattgtttttttagatttttttttgttttttttatttcgttaatattttcgttttaaaaattttaaataaaataggaatgagaaatatatgatgaaattgaaaagagtattagatttaagaagatagtttagtaaagttagaaattataaagttaatataattaatagatattaataataattttatttggagaaaaagattttatttataagaataattgaataatttaaaatgtttagagataaatttaagatacgtgtaaggtttatatgttaaaattatgatgtttttaaatgatttgaataaatggagaaatattattttgtttttggataagtatatttaatattaaaaataagttaattttttttgtaattttttgtatatttaataaaatttttaataaagtttaagagtatttaggttttttttttatttttttttttttttttttttttgagatggagtttttttttgttatttaggttggagtgtagtggcgttattttggtttattgtaatttttgttttttcggtttaagcgatttttttattttagtttttcgagtagttgagattataggtatgtgttatcgtattcggttaatttttgtatttttagtagagatagggttttgtattttggttaggttagttttgaatttttggttttaagtgatttatttgttttagatttttaaaatgttgggattataggcgtgggttatttgtttagtttttaaaagggttttttaaggaatttggtataatattataaaaagtttatttaaaagattatatatatgtatatttattaaaagatgaaggttgggcgtggtggtttacgtttgtaataatagtattttgggaggtcgaggtaggtagattatttgaggttgggagtttgagattagtttgattaatatggagaaattttatttttattaaaaatataaaatagttaggcgtggtggcgtatgtttgtaattttagttattcgcgaggatgaggtaggagaattgtttgaatttgggaggcggaggttgcggtgaatcgagatcgtgatattgtattttagtttgggtaataagagcgaaattttagtttaaaaaaaaaaaaaaaaagaaaaaaaagataaaggaagttagtgtggaattattagtattagaataagaatatatagattaatggaattaaataaagtttcgaaagaggtttttttagttatttgatattatgggatttattatttattaaatgtggtatttttgatagaagaataaagtttagatggattaaagatttaaatattttaaaaatttataaaaatattagtaagaaacgtatatattgtattatttttaggtaggaaaggatttttttagtatgattttaaagttagaaattagaaaggaaaaattgatgtgtttgattatataaatattaaaattaatatataggaagaattattgtatttgtaaggtatgatagattaaaaaagaaaaaagaggtcgggtgcggtggtttatatttgtaattttagtattttgggaggttaaggcgggtagattatttgaggttaggagttcgagattagtttgggtaatatggtgaaattcgtttttattgaaaatataaaaattagttggtcgtggtggtgtgtttgtaattttagttatttaggagattacgataggagaattgtttaaattcgggaggtggagtttgtattgagtagagatcgcgttattgtattttaatttgggtgatagagtgagatttttttttaaaaaaaaaagtaaggttgggtacggtggtttatattagtattttgggaggttgaggcgggcgaattacgaggttaggagattgagattattttggttaatatggtgaaatttcgtttgtattaaaaaaaaaaaaaaaaaaaaaaagagttaggcgtggtggtaggcgtttgtagttttagttattcgggaggttgaggtagaagaatggcgtgaatttaggaggcggagtttgtagtgagtcgagatcgtgttattgtattttagtttgggcgatagagcgagatttcgttttaaaaaaaaaaaaaaaaaaaaagtgtaatttatttaatgttatagggttaagtaataatgaggtagaatttgagtttagattgggtgttagggttttgttattagttaaatatgatataaatatgatttattttttatggaaaataatgaaataaagaaatttatgtttttatttatatagaaaataattgtaaggttgtatattaatatttaaattatgattatttttgggtggtggaacggtggggggaaatttttatttttattttgtttttttttatttatattttttgtaatgattatgtattagttttataattagatgtaaatattaataaaaaaaaattcgtgatgggtaaaattgttatatatattgtattatagggttatatgaaatttataaggttaattttttttgtgatgtttgattaatattttgattttatttataaagatatttataggaataatttatggatatagaaatgtattgtgattgttattttttattaatatttattagtgatttttaattttttttaaattatagagttttttgagaatttgaagaaaggtaaatattttttttttagaaaaatatatatatttatttagatttgtagatttatatttatttttttattgaatatttgttttgtaagcgtagttgaatggttaagcgttgtgttatgtattttaaataggttatttttttgaaaatttatttgtgtgagataagaattattttttagattttttttgttagttttttgaaattaaaaggttgtaattttaatttatagataaggattgtgagggttagatatgtttaatatttatttaatttagttttaatttttacgtaaaggtgtaaatgtataaagtttttttatgttaattttttagtttgatgttacgtttatgggcgaggtgggagagattttagcgattttatggtttttttaattttttcgagatattgtcgagaaatttacgattttaaaaggagaaaaaatggtacgaattttagttttttattttttttatttattttagatgttttaacggttagtattcggtagaggaagagtagaagtttataagaagggtttgaatagaatcgggtagggttattttgggtatattgtttatggggtggttttgttttgtaaggagtagtgaaaaaagagaatcgggtagggagagagagaaagagagaggaaagaagagaaagagaaagagaaggagaacgagagagagagagagagagaaagaaataggggtcgttggtcggatttttattttaggaaaggttatatagagaaagtttagggttagttttgattcgggatagtttgttggggataaaaaagtagtagtagagtcgggtgggggagttttttttcgggtttaattgttttcgttgagattttttagttttttaaatatatttaaatatatggaaaagtaaagggaagggagtatttaatatttgatatttgatgtaggaatttggttttttttggtagttaaggttgtatatgaagcgtttttagtgtagttagtttatggtaggcgtttttgttaatttattgtttagtgttttagttttagggatgttttaggaaacgagggttaggaagcgaagcgtaagcgcgtagtttagatgtagttttgggttttttagttgtattgttacggtgatcggatagtataaattttcgcgggtaatttgggtttttaagattaattttaggggcggattaattatcgatgatttattaaataatgacgttattgtttttttggtaattgggacggttatttttagaggtagattaataattagttacgtaagacgtttcgttaattaattatttttttttttttttgatattgattcgttttatttttatattagaaggaagtgcggtattttagtgatttcgagtttaagtcgagagttgtttacgtgatcgagattttatatgacgtaggcgtttacgtgattattcgtttacgtgagtagaagtagttttggtcgtcgtttatcgtttcgttatagtcgtttgagggaagaaggaggaaaattattcggtatcgttagaggttggtgtgtgggtgggaattggggatttaggggtggtgatgatgaagattagagcggggttcgggggtcgttttcgtttttttcgttttttgttttttttttttttttcgcgttttttttttttttttttttattttagtgtcgggaagtcgtttgtgttgcgtttggtggggaaatggtggacgtttatgattgtgtatgtgtttttgtatatttgtttgtttgggtcggtttcgggggatttttaagggtgatcgtaaggcgaaaaacgtttgaaaattacggttttgagttaagaaaaatagatattgaaaatagtggtttgagtgttggtttatttatttaggtatttagtttttattgtttgattgtttgtaaggggaggttttaagtgaattttatttgtagagttatatttaggtaaatgcgtgtttgataaaggcgtttaataaattattttattgaatagagtatttgaataatgtttatttttttgttgataataataatttatatatttaatttcgaatatttgaaaaataataatatagtataaaatttaaaaatatatataatttattattcggagacgattgtttaatttgatgtcgttatagttttttaaaaaatgtgtataatatatatataaatatataaatttttaatttataaagagttttggtttttattttagttagtagttttgatggtttttttaggagacgtagtaatgaagtagaatttttttgtttttatagaagggtttttaaggaatagagcggtgtagggaattaaatgggacgggttattttagggataaggtaagtaaaaaaaaaaaaaaaaattttgtaaaatgaaataaaaaaatagtttgtaaatttgttattgagattttaggatggttaataggaaaattgttattattgtagatgtagtgtgttaggtatataatcggtaattagtaaatgtttgttaaatcgtttttttagtgtagttttatggtcgttattatattttgtattttgtttttaagaggtttagtgtttttagattattttagataaattatttatatataaaattagaaaattttataaaattttttatattaaattttagaaatgtaaatattttaatttgttttatgttattttttttgttgaagtaaaagtaattatttttgtagaaatttaaggttgtataaaaaaattggaaaaataatatggaaaatttataaattttttatttagagtaattattaatatgttttttttaatttaaaaagaaaaaattttagtatagtaaatgtaaagaattaaaattgtatagaagtatatagggtaaaaagcgaaaagtttattttatttttttattttttagtttttttaaaaataagtttgtttttagattttttatttatttatatacgtatatatatgtatgttaattttttattataagtaggattatattatgtatatttttttatttaatgtattttggagatttttttgggttaaggtagatagattttttttaaatggttgtattgtattttagtttaaggataaagtataatttatttagttatttttttaatgatggttatttaggtttttaattttttgttattattaatagtgttgtaaggaatatttgtaagtatttttgttgattagatttttggaaggattttagtagtgttaaagggtatgggaatatgtattttgtatatagttgatattgtaaagtagttgtgtttttgggttatttataattatagtataagtaattttttatgttattaaatatttttgtaatttttaaaattaaatgtataatattcgtttttttaataaagtattttttaaagaatatatagttttataaatttgtttgaattttagattatttttttagggtatataattgaaatgtatttgttgttaaaaggcgtgatatatattattaaattgtttttaggatatagtggggtttattaaaaaggaaatagtttatattaattattatttttttggtagtgtattagtttgtgaattgtatagtattgatttattgttgttgtttaatttttattattttgatgggtgaaaaataacgattagttttgattttaatttgttggaagattgattaaatttgaatattttttagattttttttttgtatttttttatatttgtatttttttatatttaatttgttattaagtttcgtagattttattttttttggtatgtgtagatatattttttttttattttatttttgttgttttaggcgatttttttaatatatatttatgagataagttttaattaatttttttagttttacgtcgatttttttttgtttgagtgttacgttgttgttagggtgatttgtttgaaagagttttggtgaagttattttatatatttttcggtttaaaagttttaaaaggcgtttagtgtttgtatattaaagtttttgggatttgatttatgttttgttagtttttttatttgttttttttttttttatttgtgttttattataattaagaaaaaaaaatgtttatggatttttgggtagattagtttgttttatttaattatttggtttttaattaatagaattgattaattagtttttttttgatattatgtttatattttatttagagggttatggtaagtataatgtatatttgtatttatatttttaataatgatattcggtgtttttgtaggattataagtttattttgggtttattgatttttgtatgttagagtcgaatattggatatggtaattaaaaaatgtttttaaaatgaatgtgtgaatttttaataatgttttttttttatttatttttggagtttaaatatttttttgattttattgatttgtatatatttttatataatgaagatattatataaagaatttatataatttgtgttttgtttgtgttttaattgttgtttaattttttgatttagtgaagttttttatgtttatatatttagatatagttattttttatttgttgatattttttattgatttgttgttgttaattttttttttttttttttttttttttttgagacggagttttgttttggtcgttgaggttggagtgtagtggcgtgattttggtttatttttattttttgggtatataaaagcgatttttttgttttagtttttcgagtagttgggattataggtatttgttattacgtttagttaattttttgtatttttagtagagacggggttttattatgttgattaggttggtttcgaattgttgattttaggtgatatatttattttagttttttaaagtgttgggattataggcgtgagttatcgtattcggtcgattgttgttaatttttaatggtatttaatacgtaataggtattgaataaataattgttaaaaaatgaatgagttaaaaatttggtgaattttttgtttatatagacgttttatagaaaagttgttagtataattgaattttttattaatagtttgttttttttttttattatattacgagtatttttttatgatagtagtttttttttttttttttttagttatattaaaattgtattgagttaaatttgttattaagagtttaataattattatgatgttgagtacggaaggtagggaggggttcgtggtgaaggttaggggtttattttggttttgtttagtcgatgaagtgatgcgttttttttttgattgtaagatttaaaatggtatattaggtattcgttttatttatattagagaaggtagattaagtggtgaagtatttgttgaatttgaatttgaagaggaagtgaaattggttttgaagaaggatagagaaattatgggatatagatacgttgaagtatttaagtttaatagtgttgaaatggattgggtgttgaagtatataggttcgaatagttttgatattgttaacgatggtttcgttcggtttagaggatttttatttggttgtagtaaggaagagattgtttagttttttttagggttggaaattgtgttaaatgggatgatattgttagtggatttttaggggcgaagtataggggaagtttttgtgtagtttgttttataggagatagttgagaaggttttaaagaaatataaggaaagaatagggtataggtatattgagatttttaagagtagtcgagttgaagttcgaatttattatgatttttttcgaaagtttatggttatgtagcggttaggtttttatgataggtcgggggttggtagagggtataatagtattggtagaggagttgggtttgaaaggatgaggcgtggtgtttatggtggagggtatggaggttatgatgattatggtggttataatgatggatatggttttgggtttgatagatttggaagagattttaattattgttttttaggaatgtttgattatagatacggagatggtgggtttagtttttagagtattatagggtattgtgtatatatgagggggttattttatagagttattgagaatgatatttataatttttttttattttttaattttatgagagtatatattgaaattggattcgatggt

SEQ ID NO: 139 - DNA, 9087 bp, Artificial Sequence
  chemically treated genomic DNA (Homo sapiens)
  unsure (1563)
tttattttagttttttaagtagttgggattataggtgtataatattacgtttggttaatttttgtatttttagtagagataggtttttattatgttggtcggtttggttttaaatttttgattttaggtgatttattagttttggttttttaaagtgtagggattataggtatgagttattatgttagtttttttttttattttttgaaagttatttgtggttatgtggtttgttttgattaatgaaatgtgagtagaagtgatttgtgttatttttgggtgcgagttttaaggattattgtatgatttattaaattttttatttttttttattatttgttattgtagaagtataaattgtaatgaagtttttattacgttggggttttgagtgattattatgtgtagtgttattttattatttaataagttgtgttagatatgtggtgtatgtaggaaatgaatttttgttgttttaggttatttaaatttgggattgtttgttattgtagtagaatttaatttatttagatttttttttttttttgagatagagttttattttgttatttaggttggagtgtaatatttttgtttattgtaatttttattttttgggtttaattaatttttttgttttagttttttgagtagttaggattattatttttagttaatttttgtgttttttagtagagatgggttttttttatgttggttaggttggttttgaatttttgattttaggtgattcgttcgttttagttttttaaagtgttgggattataggttgagttattgtgtttagtttagatattttttatgtaagttttatatattgttttgtattttgattttttttatttaataatatattttggagattgtttatattagtatataagtatttttacgttttttttttaaatagttatatcgtatttttgggtaggaaaggatattttatttaattagtttttattaaggataattagtatgatttatttttttggataatgttgtaatgaatagttttaaatatttttttttttttttttttttttgagatagagttttattttgttatttacgttggagtgtagtggtataattttcgtttattgtaatttttgtatttggttaagttttggatttttagtagatatggggttttgttatgttggttaggttggttttgaatttttggttttaagtgattttttcgtttttgttttttaaagtattgggattataggtgtgagttattaggttttattagttttaagtattttttattttgtttgagtgtaacgatatttgttttttttgagatagagttttattttgttttttaggttagagtgtaatggtacgattttagtttattgtaattttcgttttttaggtttaagcgatttttttgttttagttttttaagtagttgggattataggtattcgttattatatttggtgaatttttttaaattttagtagagataggttttgttatgttggttaggttgtttttagattttttttttcgtgatttatttatttcggntttttaaggtgttaggattataggcgtgagttatagtattcgattaagtggtatgatatttgttagatagatttttagatgtgtatattttagatggttggtggtcgattttttttttaattaattaatttatttttaagatggagtttcgttttgttatttaagttggaatgtattggtatgattttggtttattgtaatttttatttttagggtttaagcgatttttatgttttagttttttaagtagttgggattataggttcgtattattatgttcggttaattttttatattttagtagagatggggttttattatgttggttagggtggtttcgaatttttgagtttaggtgattagtttgttttggttttttaaagttttgggattataggtatgagttattatgtttagttaatttttttttttaaaaatattattttggttgtaggtggaaaatggtttaaagagttggaacgaaattttttgagtgatattttttttttattttttatttattgttatgttttgtttatgttagttatatgttaggtttttatttgtttatttgtttgtatgttttggttattgttttagtatagggtattattatttttttttttaaaagttttttttaaaaggttttttatttgttttaggatatttggtttgtagataaggaagttaattttgagtaattaagtagatgaggaatggatggggtagtttggggggtttgttgaattttttttttttaggaagggtttagtttgattgttttttttgttttttttaatttttacggtttttatagtgaattttaaatgatttttttgatgttttgtgtcggttatatgttttagatttaaagatttggttggaaatattggaattgtgttttagttattagagatttgggagaaaaaattttattttttttttttgattttttgagttgaaggtagggtttgtttttatattttataggattttttttaaacgggaagggttttagatgttgggaattaaaataataataagttagttttttttttttagtttattttttatagtgtagtttagagttttttatgaaagtaaatttgattattttatttaaaattttcgtgagagttttttattatttttaagacgaagtttaaaattttttaggtggtttttaaggttttttttgatttaggttttttttgagattttagttttattttttgtttttatgtcgattttattgtgtattattgtgtatttttaaattttagttggatgtttaggtgttgaacgtaggagttttttttgattttttttacggaatttcgaatatgtgatatttttttgtttagaaggttttttttttttttattttagtaatttgtatatttttattgaatttttagattttatttggatataatagtttttattaagtgaggtatttgttttatgttttattgggttttgggttttttttttttttttttttttttgagacggagttttattttgttgtttaggttggagtgtattggtacgatttcggtttattgtaagttttattttttaggtttatattatttttttgttttagttttttaagtagttgggattataggtgttcgttattatgttcggttaattttttgtatttttagtagagacggggttttatcgtattagttaggagggttttttttttttaaggtatttaattttttagattttagatttatttattttttttcgtttttattgttattttgtaggtttaggttattattatttttttattggaattttgtaaatttttgattgttttgttgttatttttggttttttaggaatttattagagtgatatttttaaaatataaattatttttttaaatgttttatattttatttagtaaaaatattttagttttttggacgtgtttatagttttttatgatttagttagtgtttttgttttttttgttttattttagattattgggtttagaagttgcggacgtttttttttattttttgaatatattatttagtttggtttagagtttttgcgtttgttgttgtttttattggattcgtttaaatgttatattttgagagtgttatatatttttttaacgttcgaagagtagttgttattttttgaaattatttatttgtttatttatagaataattatttttattttattttgtttttatttgttttttttatttttagtaagtaagtagggagtttggttattttgttgttattattgtgttttttagtatttggtttggtgtttggtatagaggtgttgttttgtattttcggatgaatgaatgtataggaattagagaagtttagatggattcggttttgttttattcgcggagtttgggtaagtttgttttttgttgcgtgaagtagggggtggaggaagcggggtgttaagttataaggtgttgattagttgtaagattttagttttgtttttttcgtagttttcgggttggagttagttatttgacgttcggcgttttagttttttatttgtataatgggtgtgaatttatttcgaggtttaggggtggtagcgttgttttataaggcggtagaggtcgagggaaggcgaggtcgagtgggtggagagaaattataatattcggttgcgggggttgggcggggcgtttgcggcgatcgggtaagaggtcggggaacggttgcgaggtcgtagttttttttttgtttttttttttttcgatgtgcgtttttttgattggggtcgatttaagggaatacggttatataagtggattaaataaattcgttgttagttcgtaggaggtttaggatacggagcgcgttttcgataaaattttagaaaagtcgtttgcgagttaaaggtcgtcgggttatatttttaggcgacgatttaattaaaatgtagtatttgagatgacggacgttttttttatttaattatatattcggttttttgggcgtgttttagagtatttatttttattgtttcggttgagggttcggttttaattggtagtttggtattttacgaaagtttagaaattcgaatttaggggttgaatttcgtttttagattaattaggaagaggtgacgtgattggtttcgttttcgtatttttttgagcgagtttttagttgggggggcgggggaaaaaatgaagaggaagattaatgggaagacggcgcggggagtttttgttcggtgattggttaaatgaggtaaatagagggcggggtagggcgggttagcgtcggggtggttttcgggagggggcggagagtgcgcggttggttgcggcggtcggggaggtcggggaggtcgcggcgcggttattgcgagtcgagtcgagtcgcgtcgagtcgcgtcgatcgttattcggtttcggtattcgcgcgcgatttcggtcggcggcgcggttcggcgggttaggcggcgttatagtttatggagttcgagaatatcgtagcgaatacggtgttatttaaggttcgggaaggtgaggcggtcgggtgggcggtcgggttcgggtgcgtggagcgcgagtgcgttgcgtttgagtttcgtagggttatttagtcgtcggattttttaggttcgcgggttttgcgttttatatttcgtttagatacgagttttttcggttcgtcgtttttttttttcgtatttgttttcgggattcggggtttaggaaggggcgggggttaggtcgtcgttttcgcggcgggtgggggtgaaggagtgaaagaaggtgagacgaagagggaagggtgggatcggagttttaggagagtttgtttgagaggtaagttttttttaggggagaggtgtaaagatgttttacgtgttaggggtttagattttagtattttagtttaatttcgcgtaagttggcgatagaaagttggagaatgaataaacggattttttgcgtagtatagtttatttgatttggggaaatttttggttataaatgttatttataggattgttatttgtttcgtgttttaggatattgagggtagaggtgaatggatatttgtttttagggagtttatggtttagtggggttagcggatatagaaagaagtgggagtagagtatgttgttttgttagtattgtaagtttagaggtttggttggggaaattagtttggtggatcgagtgtgtgtgtagtttttcgtggtttttattttagatgttattaggtatttgttttgtgtaggttttgggagatatagaaggattagatcgggtttttattgttttgtggttagtttgtttttatttgttatattttattttagtaatatgattattgattatttattttgttttattttttttagggtgttggggaagtagtagtaaataagatttatttttttggaattttagggtaaggagggagattgtgatagtttttttattttttgttgggtttttaggtttaaaaagttatttgttttatttttttattatattttatatgtgggaagttgaggtttaaattagggattagtattagttatatagtaagattgtgattgattcgggtttaagatataggatgatcggtatagtttataggaagtttagaggaatttttagttgggtgttatatttggtatttcgtgtttattaagtgttttggcgaggtgtagtttagaaatggtatggtaggttgggtttttattgtttggggagtttgttttattttttgttttttatcgagtttatgggttaggttttttttttagtttttgggggtatttgtcgattttgttttgtttcgttatttaattagttagggaggaggggtggggagggtcgaaataggtttttttttttagggttgtagttagttaaggttttaggtttgttgatggtattgtttggtcggagagtgtgggtatttttggataagttttgttaggttatgggtaaggtatagggtggtatggttagattggggattggtatttttattagagaatttttacgataatttggttttgttttttttatttgtatggtttttttttgagatagagttttattgtgttatttaggttggagtgtagggtttattgtaattttcgttttttgggtttaagtgattttttttttttagttttttaagtagttgggattataggtgtatgttattatatttagttaatttttgtatttatagtatagatgggttttattatgttggttaggttggttttgaatttttgattttaagtgattcgtttgtttttggtttttttaattgttgggattataggtatgagttatcgcgtttggtcgatttgtatgattttaaatatgtttttttttttttaattttagtatttttttttgtggaacggttgggggtgggatataaagattaaaggaaattttgattgttattgagttttgagtttaggcgtttggacgggttgtattagaattattttatgaattggttttttatgagtttgaggttggggtttttgacggttttttaagtgatttgaggttttaggtggggtttgggaatttttggtgtgtgtatatagttggtatttaatagatgttagttatgtttggggtgggaaaggagtttgggttgtggttatagggagttgggtacgaattttgtatttaggattggtttttgggtttggttattttgggtatattttgggtttggttattttgggtgaattgattttttattttagaattttagtttttatataaaattgggtttgttttggtagagttgttgtgaggatggagtgggataacgttggggtttgagattttttttagtattttttttttttttaggtatttagaggtatggggagggggtttagggatattgaaaggggatagggagggtggggaagagttttattgattgggtagtttaggataggatatttgtatgtgattttttgttgttgttttgatgtggttgggaggggggaggaggaagtaattgagggtgggaggttggcggatggagggttgggtgagggatttgtgggtgtgggggaggagttttttttttgggaaggttttgttttgggttgaggggtgggtgtttgttgtttatttatagtgaagtaatgattgtagggtatgttcgtaggaggtttttagtaagttttttaatgggtttttgtagtatttttttttttaggtagtttaggtcggggagttatttagggatttagttttgttttttttttagaaggtaatttttgtttttgtattatttgtttttatttaggttagatggatataggattagaaagttagaggggaaattgaggtttagtatgagaaagtggttgtttaaggttgttatggcgttgttggagttggggtttattttttgatttagttttatttgatgtggatagtgttttttatttattacgtaatatatatggagaagttgaggtttatagatagcgagtgatgggttatagtgtgaattagagatttagatttagttttgggaggtttaggttttttttattttttttaatttggtggtttataggttatatatatttggttagttttttgatatattttatttggttgtagtgagttttttttttttttaaataaaatgggggttaatattttatgttagagtttgtaatttcggttgtttttgaaaaaattagaagagttggttatattgagttagaaatttttttagtagtaattaagtaattagttggcgtttttttgtagttggttttgttagagaggttttcgttgtttttggttattttatatttggtttacgttttttatatttgttgggttttgtaggtaatcgaattgttgtcgtgattttagttgttgtagatggggtgtttgcgaggttaagtaagataggtaggggatcggggaagttttagtgtgtaggggacggggagttttgggtgttagtttttttgtttttgttttatttgagcgtttgatatttttgatgtggggtttggtgatagaggtttgggagtttttttgtttttatgttgttttgtgcgttttttaggtttgttttattggtttagaattttttttttttgggttttttgtattttttagtattgtgacgttttttttttttttttttatcgggggaatttttatttggcgggaagtaattggggttggatttattgttggagttatttggaatattgttttttcgtagcgattttattgttttttttggtttttttagtgtaggagtttgaagtaggagaagtacgtgtgttttggaacgtagtaagggcgtgttggagcgtgtagagggaaggtttgaggtgttgttttgtttcggttttgttttggttgggttttagaggtcgtggatcgtattgaggatttagaggtagttttgaggtagtgggattcgagatttagtgttttattgtttttatagg

SEQ ID NO: 140 - DNA, 9087 bp, Artificial Sequence
  chemically treated genomic DNA (Homo sapiens)
  unsure (7525)
tttgtgggagtaataggatattgggtttcgagttttattgttttagaattgtttttgggtttttagtgcggtttacggtttttagggtttagttaaggtagagtcgaggtagaatagtattttaggttttttttttgtacgttttagtacgtttttgttgcgttttaggatatacgtgttttttttgttttaggtttttgtattgggagagttaagagaggtagtgaggtcgttgcgggaggatagtgttttaagtagttttaataatgggtttagttttagttgtttttcgttaggtaggagttttttcggtgaagaaaggggagaaggacgttatagtgttgagaagtgtagaaggtttaggagggagagattttaggttagtggggtaggtttgagagacgtatagggtagtatggggataaggaggtttttaggtttttattattaggttttatattagagatattagacgtttaaatgaggtaggggtaagggggttggtatttaggatttttcgttttttgtatattggggttttttcggttttttgtttgttttgtttgatttcgtagatattttatttgtagtagttgaggttacggtagtagttcgattgtttgtagagtttaataggtgtgggaaacgtgggttagatgtgagatgattaggaatagcgaaggtttttttgatagggttagttgtaggagaacgttagttgattgtttgattgttgttaggagggtttttggtttaatgtggttagtttttttgatttttttaaaagtagtcggaattgtagattttaatataaaatattggtttttattttgtttaaaaaaaaaaaaaatttattgtagttaaataaaatgtgttagggagttagttaaatgtgtgtggtttgtgggttattaggttgaggagggtggaaggggtttgagttttttagagttgggtttgaatttttgatttatattgtggtttattattcgttatttgtgaattttagtttttttatgtgtgttacgtagtgaatgggagatattgtttatattaagtagggttgagttaagaggtgaattttaattttaataacgttatggtaattttagataattatttttttatgttgggttttagttttttttttggttttttagttttgtatttatttggtttgggtgagggtaggtggtataagggtagaagttgttttttagggagggggtaaggttaggtttttagatgatttttcgatttaagttgtttggagaaggaagtattgtaggggtttattgagaaatttgttagaggttttttgcgaatatgttttgtagttattgttttattgtgagtgagtaatagatatttattttttaatttagggtaaggtttttttagaaggggaattttttttttatatttataggttttttatttaattttttattcgttagttttttatttttagttatttttttttttttttttttagttatattaaggtagtagtaaagagttatatgtaaatattttgttttgggttgtttagttagtggagtttttttttattttttttgtttttttttagtgtttttgggttttttttttatgtttttgagtgtttgggaagagaaggggtattgagggaggttttaagttttagcgttgttttattttatttttatagtaattttgttagagtaggtttaattttatatgaaaattgagattttgaagtgaggaattaatttatttaagatgattaagtttagagtatatttaagatgattaagtttagagattaattttgggtataggattcgtatttagttttttatggttataatttaagttttttttttattttaaatatggttggtatttattaggtgttaattgtatatatatattaagggtttttaaattttatttggggttttagattatttgagaagtcgttaggggttttagttttaagtttatgaaaagttagtttatgaggtggttttgatgtagttcgtttaggcgtttgggtttaggatttagtgataattagggttttttttagtttttatgttttatttttaatcgttttataaaaaggggtattgaagttgagaaagaagagatatgtttaaagttatgtaggtcggttaggcgcggtggtttatgtttataattttagtaattagggaggttagaggtaggcggattatttgaggttaggagtttaagattagtttggttaatatggtgaaatttatttgtgttataaatataaaaattagttgggtgtggtggtatgtatttgtagttttagttatttgggaggttgagggaggagagttatttgaatttaggaggcggaggttgtagtgagttttgtattttagtttgggtgatatagtgagattttgttttaaaaaaaagttatgtaggtgggaggggtagagttaggttgtcgtaagggttttttagtggaggtattagtttttagtttggttatattattttgtgttttgtttatggtttgataaagtttgtttaaaggtatttatatttttcggttaggtagtgttattagtaggtttgaggttttaattggttatagttttagggaagaaggtttgtttcggttttttttattttttttttttggttggttggatgacgaggtagaatagaatcggtagatgtttttagaggttgggaggaaggtttagtttatgggttcgataagggataggggataagataggttttttaggtaatgaggatttagtttgttatgttatttttgggttgtatttcgttagagtatttggtgggtacggggtgttaggtgtagtatttagttgaaagtttttttgggttttttatagattgtgtcggttattttgtgttttaggttcgagttaattataattttgttgtgtgattgatgttaatttttggtttgagttttagttttttatatgtaaaatatggtagaaaggtgaagtagatgattttttaagtttggaagtttagtaaagggtggaaaaattgttataatttttttttttgttttggagttttaaaaagatgggttttgtttattgttgtttttttagtattttggaaaaggtggggtagagtgggtggttagtgattatgttattgaggtggagtgtggtaggtgggggtagattgattataaggtagtgaggattcgatttggtttttttgtgttttttaggatttgtatagagtaagtgtttgataatatttggggtgggagttacgaggagttatatatatattcggtttattagattggtttttttagttagatttttgagtttataatattgatagagtagtatgttttgtttttatttttttttgtgttcgttagttttattagattatgggttttttgagggtaaatatttatttatttttgtttttagtgttttgaggtacggagtaagtggtagttttataagtagtatttgtggttaggagtttttttaagttaggtgggttgtgttacgtagagggttcgtttatttattttttagttttttatcgttaatttgcgcgggattaggttagggtgttggggtttgggtttttggtacgtggggtatttttatattttttttttggaggaggtttgttttttagataggtttttttggggtttcggttttattttttttttttcgttttatttttttttatttttttatttttattcgtcgcgagggcggcggtttgattttcgtttttttttgggtttcgaatttcgggggtaggtgcggaggaggaagacgacgggtcggaaaggttcgtgtttgggcggggtgtaaggcgtagggttcgcgggtttaggggattcgacggttgggtagttttgcggagtttagacgtagcgtattcgcgttttacgtattcgggttcggtcgtttattcggtcgttttattttttcgggttttgagtagtatcgtgttcgttacgatgttttcgagttttatgggttgtggcgtcgtttggttcgtcgggtcgcgtcgtcggtcgggatcgcgcgcgagtgtcgaggtcggatggcgatcggcgcggttcggcgcggttcggttcggttcgtagtgatcgcgtcgcggttttttcggttttttcggtcgtcgtagttagtcgcgtatttttcgttttttttcgggggttatttcggcgttggttcgttttgtttcgttttttgtttattttatttgattaattatcgggtagaagtttttcgcgtcgtttttttattagtttttttttttattttttttttcgtttttttagttggggattcgtttaaagaagtacgggggcgggattaattacgttatttttttttggttggtttgagggcggggtttagtttttaggttcgaatttttaggttttcgtaggatattaaattgttaattagggtcgagtttttagtcgggataatggaggtgggtattttggggtacgtttaggaggtcgaatatgtgattgggtgaagaagacgttcgttattttaagtattgtattttgattgggtcgtcgtttgaaggtgtggttcggcggtttttggttcgtagacggtttttttagggttttgtcggggacgcgtttcgtattttgggttttttgcgggttggtagcgagtttgtttggtttatttgtgtggtcgtatttttttgggtcggttttaattaggagggcgtatatcgaaagagggagagatagggaggaggttgcggtttcgtagtcgtttttcgattttttgttcggtcgtcgtaggcgtttcgtttagttttcgtagtcggatgttgtgatttttttttatttattcggtttcgttttttttcggtttttgtcgttttataaggtagcgttattatttttagatttcgggatgagtttatatttattatataggtggggagttgaggcgtcggacgttaagtggttggttttagttcgaagattacggagaaaataaggttgaaattttatagttaattaatattttgtagtttaatatttcgttttttttattttttattttacgtagtaggaaataggtttgtttaaatttcgcgagtaaggtagagtcggatttatttaggtttttttagtttttatgtatttatttattcgaaaatatagagtaatatttttgtgttaggtattaagttaggtgttggagaatatagtgatggtagtaagatagttaggttttttgtttatttgttagaagtggagggagtaagtgagggtagggtgagataaaggtaattattttgtaaataaataaatagatggttttagagagtgataattgtttttcggacgttaagagagtgtgtgatatttttagggtgtgatatttgagcggatttagtagaagtaatagtaaacgtagaggttttaagttagattaagtggtgtgtttagggaataggagaaggcgttcgtagtttttgggtttagtggtttgagatgagatagaaggagtaaaggtattagttaggttatggaggattgtgaatacgtttaggaggttgaagtgtttttgttaagtgaaatgtgaaatatttgaaagaatgatttatattttaaaaatattattttggtggatttttagggggttaagagtggtagtagagtagttaggagtttatagaattttagtaaagagatggtggtggtttggatttataaggtggtaatagagacggagaaaagtggatggatttaggatttagggagttaagtattttaaaagagggaaatttttttggttaatgcggtgaaatttcgtttttattaaaaatataaaaaattagtcgggtatggtggcgggtatttgtagttttagttatttgggaggttgaggtaggagaatggtgtgaatttgggaggtggagtttgtagtgggtcgagatcgtgttaatatattttagtttgggtaatagagtgagatttcgttttaaaaaaaaaaaaaaaaaagggaaatttagggtttagtggaatatagggtaggtattttatttagtgaaggttgttgtgtttaagtgaaatttgaagatttagtgaaaatgtgtaggttattggagtagggagggaaagagttttttggatagaggggtattatatgttcgaagtttcgtagaggaagttaggaagggtttttgcgtttagtatttaagtatttagttggggtttaaaggtatatagtggtatataatggggtcgatatgggggtaagaaatgaggttgaagttttaggaggggtttggattagggagggttttgagagttatttaaggaattttggatttcgttttgaaggtggtagggagtttttacggaggttttgagtagggtgattagatttgtttttatagagagttttgggttgtattgtgaaggataagttgaggggagggggttggtttgttgttgttttagtttttaatatttgaagtttttttcgtttgagaagaattttatgagatgtggaggtagattttgtttttaatttaggaaattaaagaagggaggtagaatttttttttttaggtttttggtagttggagtataattttaatgtttttaattaggtttttgaatttagagtatgtgatcggtataagatattagggggattatttagaatttattgtggaggtcgtggaggttgggggaggtaaggaaggtagttaagttaggttttttttgggggagggggatttagtaagttttttaggttgttttatttattttttatttgtttagttatttagaattggtttttttgtttgtaagttaagtattttaagataggtgagagattttttagaaggaatttttagagagaggaatgatggtgttttatgttggggtagtggttaggatatgtagataggtggatagatggagatttggtatgtagttggtatgaataggatatggtaatagataagaggtgaagaggagatgttatttaggaaatttcgttttagttttttaagttattttttatttatagttaaagtgatatttttaaaagggaaaattggttaagtatggtggtttatgtttgtaattttagaattttgggaggttaaggtaggttgattatttgagtttaggagttcgagattattttggttaatatggtgaaattttatttttattaaaatataaaaaattagtcgggtatggtggtgcgggtttgtagttttagttatttgggaggttgaggtatgagaatcgtttaagttttggaggtggaggttgtagtgagttaagattatgttagtgtattttagtttgggtgatagagcgagattttattttaaaaataaattaattaattagagggaaaatcggttattaattatttgagatgtgtatatttaggaatttatttgataaatattatgttatttagtcgggtgttgtggtttacgtttgtaattttagtattttgggagntcgaggtgggtggattacgagggaaggagtttgagaatagtttggttaatatggtaaaatttatttttattaaaatttaaaaaaatttattaggtgtggtggcgggtgtttgtaattttagttatttgagaggttgaggtaggagaatcgtttgaatttgggagacggaggttgtagtgaattgagatcgtgttattgtattttagtttgggggatagagtaagattttgttttaaaagaaataaatatcgttgtatttaagtaaaataagaaatgtttaaggttggtggggtttggtggtttatatttgtaattttaatattttgggaggtagaggcgggaggattatttgagattaggagtttaagattagtttggttaatatggtaaaattttatgtttattaaaagtttaaaatttagttaggtgtagaggttgtagtgagcggagattgtgttattgtattttagcgtggatgatagagtgagattttgttttaaaaaaaaaaaaaaaaaaagaaatgtttaaggttatttattgtagtattgtttaaaaagatggattatattaattgtttttaatagagattgattaagtaaaatgtttttttttatttaggaatacgatgtagttatttaaaaaaaaagcgtggaagtgtttgtatattgatataaataatttttaagatatattgttaagtggaaaaaattagggtgtagaatagtgtgtaaggtttgtataagaagtgtttgggttgggtatagtggtttagtttgtaattttagtattttgggaggttgaggcgggcggattatttgaggttaagagtttaagattagtttggttaatatggggaaagtttatttttattaaaaaatataaaaattagttgggaatggtaattttagttatttaggaggttgaggtaggagaattggttgaatttaggaggtagaggttgtagtaagtagagatgttgtattttagtttgggtgatagagtgagattttgttttaaaaaaaaggaagggtttggatagattaggttttgttgtagtaataaataattttaagtttaagtgatttaaagtaataaaagtttattttttgtatatattatatgtttaatatagtttgttgggtggtggggtggtattatatatagtagttatttagggttttagcgtagtaggggttttattgtagtttgtgtttttataatggtaggtggtgaaaggaaatgggaaatttggtaaattatataatagtttttaaagttcgtatttaaaagtgatataagttatttttgtttatattttattggttaaagtaaattatatggttataagtagtttttaaggggtggggagaagggttggtatggtggtttatgtttgtaatttttgtattttgggaggttaaggttggtggattatttgaggttaggagtttgagattagatcggttaatatggtgaaaatttgtttttattaaaaatataaaaattagttaggcgtggtgttgtgtatttgtagttttagttatttgggaggttggggtggg

SEQ ID NO: 141 - DNA, 6585 bp, Artificial Sequence
  chemically treated genomic DNA (Homo sapiens)
ttagaaggatagggtttagagagtttttgggttgttgaatacgtggaggatttttgaggatggtatatttggagatagaataggaattgtatgtttttttttagttttgtgtattttttttacgtggttgtttttttgtattttttgtaatgttttttatgggtaattgtaagtaaagtgtttttttgagtttttttttttgagacggagttttgttttgttgtttaggttagagtgtggtggagtatttggtttattataatttttgttttttatgttcgagcgatttttttgtttttagttttttgagtagttgggaatataggtatttattattataatcggttaatttttgtatttttttggtagagatagggttttattatgttggttaggttggttttaaatttttgattttaggtgattcgtttgtttcggttttttaaagtgttgggattataggtatgagttatcgtgtttgttttgtttttttgagttttgtgagttattttggtaaattttttgaatttatggagggggttatgggaatttttaatttatagttagttggttagaagtataggttataatgtggaatttgttattggtattggaagtgggggtagttttgtgggattgattttttaatttgtgggatttgttttaattttggttaatgttagaattgagtgaaatgattgtttattttgttggtgtttgttgaagaattggttggtggtgggtagaaatttttttatttattggtggagtataattggtttttaaataatgtgagtttgaattgcgagggttttatttatatatggatttttttttttaattaaatgaggattaaaaagacgggatttttaggatgtaggaatttaagtgtagggagggttgattttttatatatatagtatagattgtgggattttagtatggttggatttttgtatttgaagggtttttggaattaattttttttttttatttagagaggattgtattttgtgttgagcggtgatttgtgtgtgagagtaggaaaaattttgattttttttaagttttttaaattattagttttggggtggggtgtggtggtttatgtttgtaattttagtacgttgggaggttgaggtaggaggattatttgaggttagtagttttagattagtttgggtaatatggtgaaattttgtttttattaaaaatagaaaaattattagggggttggggagggggggtggcgggtatttataattttagttatttaggaggttgaggtaggagaattgtttgaatttgggaggtagaggttgtagtgcgtgaagattgttttattgtattttagtttgggtaatagagtaagattttattttaaaaaataaaattaaattaaattaaaatagttaagtgcggtggtttatatttgtaattttagtattttaggagtttaaggtaggtagattatttgagattaggagtttgaaattagtttggttaataaggtgaaattttgtttttattaaaaaaaaatataggttaggcgtggtggtttacgtttgtaattttaatagtttgggaggttaaggagggtagattataaggttaagaaattgagattattttggttaatatggtgaaatttcgtttttgttaaaaatataaaaattagttgggcgtggtggtgtatatttgtaattttagttatttaggaggttgaggtgggagaatcgtttgaatttgggaggtggaagttgtagtgagttgagattatattattgtattttagtttgggcgatagagcgagattttgttttaagagttttaagttatttaaaaaataaataaataaataaaattattagttttatgtgttagtagttttaaatgagtattaaaggatagtattattttagttaaattgattaagtattttttatatatcgggtattatattaggtagtggaaatgtaaagaagattaaggtaagattttgtttttaagtcgtataatttatatataatttagtataattaataagaaagatttttttttttttcgttggagttttgtttggtaggttaaagttttggaaaattaatggagtggatttttttttgaatatttataattattttatttagagataaggaaattaatgatattaattgtttttttaagtagtagtttgagtagtttttgtttttgtttttagaaaaagtattaggtagaaggaaattttgttaatttaattagatgtgaagaattaatttatgagaaagtgattatttagtgttgtaggagtgttatatggaggagagtagtatttaaagataaaatgtttagagaaggatgtgtagtttattatttgagttagttgattgtgttgatatttttttaggggtgggtgggtggggagtgaaaatttggaaagagaaggtattttatttagaatatattgtatttttttttgtgaatataagatgaaaattttttatttaatagtaatataggtttcgtataaatgaagttttaatttttataatagttgttaagttttttgtaaatttgatagttatttaatattaattttaaaatggatattgttaagtatgatttagtgaggtttttaggtataataataggttataattaaaattttttattaagtagaggtaaattttgtcgggtgtggtggtttatatcgataagtttagtattttgggaagttgaggtaggtggatcgttttttttgtttgttttttgagatagagtttcgttttgtcgtttaagttggagtgtagtggcgcgatttcggtttattgtaggtttcgttttttggttttacgttatttttttgttttagttttttgagtagttggtaatatagacgttcgtatattacgttcggttaattttttgtatttttagtagagatagggttttatcgtgttagttaggatggttttaattttttgatttcgtgattcgtttattttggttttttaaagtgttgggattataggcgtgagttatcgcgttcggtttaatttgtatttttagtagagacgggggttttattacgttggttaggttggtttcgaatttttgattttacgtgatttatttgtttcggttttttaaattgttgagattataggtgtgagttattgcgtttggtcggtatgtgtttttttaatttttaaagtttggtagtttaatattaaatttaaattattgtagtttaggatttttttgaaaaatatttgatagtttcgtttttgatttattttattaggttgagtttttttttatttttataatatagatgtttaaaattaaaatatagatcggtcgggcgcggtggtttacgtttgtaattttagtattttgggaggtcgagacgagcggattacgaggttaggagatttagattattttgtttaatacggtgtaaatttcgtttttaataataatataaaaaaaattagtcgggcgtgatggcgggcgtttttagttttagttatttcggagattgaggtaggagaatgttgtgaattcgggaggcgggtttgtagcgagtcgatatcgcgttattgtattttagtttgggttatagagtaagatttcgttttaaaaaaaagaaaaaagaaaattaaaatatagatttagatttggattttgttaggttttttttttttttaataatttaaggttgtttagaaatatttattttatgtatgtgtttttttagtttgtaatttttaggtagattagttgtattttgtttagattttttttagaaaaatattaataatatgtttttttttgttttgggttttatatgggtgaattataggaaagtttaataggtatttagagtaatatttttttttattttatgaagggtttaaatgcgaatttttaagtatttttcgtttgtttttgttttttttttaggtttatttaatttgtaagtgtaagatgtagtcgatgaaaagtattatgggaatttttgagtaaattagattatttaaaaggaaattattttacgtaatggtgtataaggaagttagatttattaaaataattttgttaggtaagtcggatatattatggaatacggtaattttttgtttaatttgtaaattttttggcggggaggaggaaaggatggaaaaatttgggtgaaggttttatatgattagttaaataaacggtgagttattgaaattttttagttaataattttttttgtttgggtagagtttgggttttagcgttttatgagttatattgtagttttaagtcggaatattttacggttttattgttttttttacgaaatgattatataaaatgaaattagttttgtaatttgtatcggttttgaaatgaagggtaaaatttggttgggggtgaggagaaagaaggtggagagagaataaggtacggagattgtgaggtagagaacgtaggaaaggtggtgaaaagagagtataagaattttcgggagttgagtgtattttttttttttatgttatagatgttgttcgtttttttttagtttgtgtttagtaggttagagtggattttttttatgggttaaaatattttcggttttcggtttagtatagagttgtattaattagggtttgtcgttgtttttttattaggtgataggtggggtcgtcgagcggttattagattttcgttttttcgcgttgtttgtcgggagtcggagtcgttttcggttgcgttttgtttttgaatttcgattttcgtcggttttcgggaaaatcgtagcggggtagcgcgggcgttgtcggaatttgtagttttatttttcgtcgcgttaaatagtcggaaacgggggcggttagaatagagaattatcgaggcgaaggtacgggtggcggcgaggggttaattcgcgtcgggggtggggttggttgtgaggtcgtcggaggtggttgggtgggaggagattcgtttatatatacgaggaggagggttgagttgtcgtcgtcgtcgtttttgtcgtcgtcgcgagtgtggagtcgggattggagttgttgtcgcggcgacgtcggggatttttgtcgttagttttcggtttttttgtttcgtcgtttttttttagttagcgttgtttattttttttcggtcgggcgtttttgtttttatttttcgttttttgtttattatatatacggttttttcgattatggattcgggtagtggcggcggcggcggcggcggcggcggcggcgggagtagtagcggtagtagtagtagcgattcggcgtttgattgttgggattaggcggatatggaagttttcgggtcgggtttttgcggcggcggcggttttttggcggcggcggtcgaggtttagcgggagaattttagcgcggtttttagtcggtaatttaacgttaacgttaagtttttcgtgtttaacgtttacgtcgtcgagttcgtgtcgttttttttgcggggttcggtagcgtcgttatttttagttggcggcgtcgttaataattacggagtcggtagcggcgcgggaggtcgtgcgggtaaaggttcgggacgcgggaggaagttcggtcgggcgtcggagtttatatggcgtaggggtgcggttcgggggcgcgcggttttggggttcggtcggtacgtggggcgttgatagtggcgtcgtttgtttgggtggggcgtttcgagttcgggagtcggttttcgcggggcggttcgcggcggtggtcgggcggggagcggatagcgggtagcgcgtttaaagattcggattcgagtgtcgttttttcgcgtttttgttttgttttggagttcgtagttatttatttgagatgggaatcgtatggaacggagtgggggtcgcggcggatttttgttacgaggcgtagaatgaggatagatggagttaggagttatttgggtgggcgtttagagattttaggagttggggaggacgaatggtcgagttttttttttattttaggtttagtcgagagagcgttttttgttgcgttttttattattgaaattgtaattacggtttaaattgttcgtggtttttaatcgttttgaaggaattttaagatgtattgtagttttgtgatcgggtagaaatttggttattaatattaagatttgttttatttttagtattgtgtacgtttttaaagtttataaagtgttataaagttaggattttttatttaatgtgtgataggagattatattgatttgtgtttttttaaagtgaagtttatatttttattttttgttagcgatacgtttagagaatttttattgttgtaaaatcgttgattttatttagattgtttggaataatttattgtgttcgtgtattagtagtttagtttatttttttagatatttgagtatttgttataatttaatagtttttacgtgtttttttgatcgtagttagtagatatatattttttaatttataaaatttcgagttaattttggtttttaaatattttttcgtatttaggggttgtttaagtcgtaggtagtatgtttgta

SEQ ID NO: 142 - DNA, 6585 bp, Artificial Sequence
  chemically treated genomic DNA (Homo sapiens)
tgtaagtatgttatttacgatttaagtaatttttaagtacgggaagatgtttaaaaattaaagttaattcgaaattttatggattagaaaatgtatgtttattagttacggttagaaagatacgtgagaattattaaattataataaatgtttaagtgtttgaagaaatagattgaattattgatgtacgaatatagtgagttattttaagtaatttgaataaggttaacgattttatagtaatgaaaattttttaaacgtgtcgttgataaaggataaaagtgtaagttttattttaaaaagatataaattaatatagttttttattatatattaagtgaggaattttaattttgtggtattttgtaaattttagaagcgtatataatgttaagggtaaaatagattttggtattgatagttaagtttttgttcgattataaggttgtaatgtattttgggatttttttaggacggttgggggttacggatagtttaaatcgtaattatagttttaatagtagaaaacgtagtagaagacgttttttcggttgggtttaaggtgaaaggaaaattcggttattcgttttttttaatttttgggatttttaaacgtttatttaaatgatttttggttttatttgtttttattttgcgtttcgtggtagggattcgtcgcggtttttatttcgttttatacggtttttattttaagtgggtaattgcggattttagagtagggtaggggcgcggaggggcggtattcgggttcgggtttttgggcgcgttgttcgttgttcgtttttcgttcggttatcgtcgcgggtcgtttcgcgaaggtcggttttcgggttcggggcgttttatttaggtagacggcgttattgttagcgttttacgtgtcgatcgggttttagggtcgcgcgttttcggatcgtatttttacgttatgtgggtttcggcgttcggtcggattttttttcgcgtttcgggtttttattcgtacggtttttcgcgtcgttgtcggtttcgtggttattggcggcgtcgttaattgggggtggcggcgttgtcgggtttcgtaggaaggacggtacgaattcggcggcgtggacgttgggtacgaagggtttggcgttgacgttgagttgtcggttgaaggtcgcgttgaggttttttcgttgggtttcggtcgtcgtcgttagggagtcgtcgtcgtcgtaagggttcggttcgggggtttttatgttcgtttggttttagtagttaggcgtcgagtcgttgttgttgttgtcgttgttgttttcgtcgtcgtcgtcgtcgtcgtcgtcgtcgttattgttcggatttatgatcgggggggtcgtgtgtgtggtggatagagagcgggaaatggaggtaggggcgttcggtcggagaggagtgggtaacgttgattgagggaaggcggcggggtagaagggtcgggagttagcgataaagattttcggcgtcgtcgcggtagtagttttagtttcgattttatattcgcgacgacgatagaggcggcggcggcggtagtttaattttttttttcgtgtgtgtgagcggatttttttttatttaattattttcgacggttttatagttaattttattttcggcgcggattgatttttcgtcgttattcgtattttcgtttcggtagttttttgttttggtcgttttcgttttcggttatttagcgcggcgggaggtggaattataagtttcggtagcgttcgcgttatttcgttgcggttttttcgggggtcgacgggagtcgaagtttagggatagggcgtaatcggaagcggtttcggttttcggtaggtaacgcgaggaggcggaggtttggtggtcgttcggcggttttatttgttatttggtgggggggtagcggtaggttttggttggtgtagttttgtgttgggtcgaagatcgagagtattttagtttataggaggggtttattttggtttgttggatataggttgggggaaaacggatagtatttataatatggggaagaaaaatatatttagttttcgaaaatttttgtattttttttttattattttttttgcgttttttgttttatagttttcgtattttattttttttttattttttttttttttatttttagttagattttgttttttattttaaagtcggtgtagattgtaaagttgattttattttatgtaattatttcgtggaagaaataataaaatcgtgagatatttcggtttaaaattgtagtgtggtttataaagcgttggggtttaggttttgtttaggtagaagggattgttaattggaaaattttaatgatttatcgtttgtttgattagttatataaagtttttatttaaatttttttatttttttttttttttcgttaaagggtttgtaaattaaatagaggattgtcgtattttatggtgtattcggtttatttaatagggttattttggtgagtttagtttttttatgtattattacgtgaagtggtttttttttgaatggtttgatttgtttaagaatttttatagtattttttatcgattgtattttatatttatagattaggtaaatttgggaaaagaataaaagtaaacgagaaatatttaagagttcgtatttaggttttttatgaagtaggaaaaaatgttgttttgagtatttgttaagtttttttgtaatttatttatgtggagtttaagatagagaaaaatatattgttagtatttttttgaaaggagtttagatagggtgtaattaatttgtttagaaattatagattaaagaagtatatatatagaatagatgtttttgaataattttaggttgttaaaaaaaaaaaaaatttaataaaatttagatttagatttgtattttaattttttttttttttttttttgagacggagttttgttttgtagtttaggttggagtgtagtggcgcgatgtcggttcgttgtaagttcgtttttcgggtttataatatttttttgttttagttttcggagtagttgggattagaggcgttcgttattacgttcggttaattttttttgtattgttattagagacgaggtttatatcgtgttagataggatggtttggattttttgatttcgtgattcgttcgtttcggttttttaaagtgttgggattataggcgtgagttatcgcgttcggtcgatttgtattttaattttaaatatttgtattgtaaagataaaagagaatttagtttaatgagataggttaaaaacgaagttgttaagtattttttaaaagagttttaggttatagtaatttgaatttaatattaaattattaagttttagggattaaaaaaatatatatcggttaggcgtagtggtttatatttgtaattttagtaatttgggaggtcgaggtagatggattacgtgaggttaggagttcgagattagtttggttaacgtggtggaattttcgtttttattaaaaatataagttaggtcgggcgcggtggtttacgtttgtaattttagtattttgggaggttaaggtgggcggattacgagattaggagattgagattattttggttaatacggtgaaattttgtttttattgaaaatataaaaaattagtcgggcgtggtgtgcgggcgtttgtattgttagttatttaggaggttgaggtaggagaatggcgtgaaattaggaggcggagtttgtagtgagtcgagatcgcgttattgtattttagtttgagcgataaagcgagattttgttttaaaaaataaataaaaaaagcgatttatttgttttagttttttaaagtgttgggtttatcggtgtgagttattatattcggtagagtttgtttttgtttaataggaagttttggttatagtttattattatatttgaagattttattgaattatatttaataatgtttattttaaagttggtattaagtgattgttagatttatagagaatttaataattgttatgaaaattagaattttatttatgcgagatttgtattgttattgaataaaagatttttattttatatttataagaaaaaatataatgtgttttaaatgaaatgttttttttttttagatttttattttttatttatttatttttaagaaaatgttaatataattagttgatttaaataatgaattatatatttttttttaagtattttgtttttgaatattatttttttttatgtagtatttttatagtattgaatgattatttttttataggttagttttttatatttaattgaattagtagagtttttttttgtttggtattttttttagggataaaggtagaaattgtttagattgttgtttagaaaagtagttgatgttattaatttttttgtttttgaataggataattatggatatttaggaaaaaatttattttattggttttttaaagttttgatttgttaaatagagttttagcggaaaagggaaaagttttttttgttagttgtgttaagttgtgtgtaagttgtgcgatttgagggtagggttttattttaattttttttatatttttattgtttagtgtaatgttcggtgtataaaaggtgtttaattaatttagttgggatgatattgttttttgatatttatttaagattgttgatatatagggttaataattttatttatttatttattttttaaataatttgagatttttgagatagagtttcgttttgtcgtttaggttagagtgtagtggtatgattttagtttattgtaatttttattttttaggtttaagcgatttttttattttagttttttgagtagttgggattataggtgtgtattattacgtttagttaatttttgtatttttaatagagacggggttttattatgttggttaggatggttttaattttttgattttgtgatttgttttttttggttttttaaattgttgggattataggcgtgagttattacgtttggtttgtatttttttttagtagagatagggttttattttgttggttaggttggttttaaatttttgattttaagtgatttgtttgttttgggtttttaaagtgttaggattatagatgtgagttatcgtatttagttattttaatttaatttaattttattttttgagatggagttttgttttgttgtttaggttggagtgtagtggagtaatttttacgtattgtaatttttattttttaagtttaagtaatttttttgttttagttttttgagtagttgggattataggtgttcgttattttttttttttaattttttggtaatttttttatttttagtagagatagggttttattatattgtttaggttgatttggaattattgattttaagtgatttttttgttttagttttttaacgtgttaggattataggtatgagttattatattttattttaggattaataatttagaaaatttaggaaaaattagagttttttttatttttatatataagttatcgtttaatatagagtatagttttttttgggtagaggaaggggattagttttaggagttttttagatataaaaatttaattatattaaaattttataatttatattgtgtgtatgaaaggttagttttttttatatttgagtttttgtattttgagaatttcgtttttttgatttttatttgattgaaaaaaaaaatttatgtgtaagtgggattttcgtagtttaggtttatattgtttaagggttagttgtattttattagtaagtgagggagtttttatttattattaattaattttttaatagatattaataggataagtaattattttatttaattttgatattaattagagttaggatagattttataagttaagggattagttttataagattgtttttatttttaatgttaataataggttttatattgtgatttgtgtttttgattaattggttatgaattgggggtttttatgattttttttatgggtttagggaatttgttagagtggtttatagaatttaaggaaatagggtaaatacggtggtttatgtttgtaattttagtattttgggaggtcgaggtaggcgaattatttgaggttaggagtttgagattagtttggttaatatggtgaaattttgtttttattaaaaaaatataaaaattagtcggttgtggtggtgggtgtttgtatttttagttatttaggaagttgaaggtaggagaatcgttcgaatatgggaggtagaggttgtagtgagttaagtgttttattatattttagtttgggtaatagagtaagatttcgttttaaaaaaaagaatttaaggaaatattttatttatagttatttataaaggatattataaaggatatagaggaatagttacgtggaagagatgtatagggttgggaaggggtatatagtttttattttgtttttaggtgtgttatttttaagggttttttacgtgtttagtaatttagaagttttttgaattttgtttttttgg

SEQ ID NO: 143 - DNA, 7890 bp, Artificial Sequence
  chemically treated genomic DNA (Homo sapiens)
agaaaataaattgtgttgttagtaggaggatttttttttattatgagatattgtattttttgttaattatatttgtgttttatttgttgatagaataaatatataatgagaaatagttattgtgtttttagaagaatatatttgaaagaatttgtttttaataaattatatttgtatttggatttatatgaagaaatacgttttttttatttaggcgtggttattttaaaataaaatttgggtcgggtacggtgatttacgtttgtaattttagtattttgggagttcgaggtaggcggattacgaggttaggagatcgagattattttggttaatatagtgaaattttatttttattaaaaatataaaaaattagtcgggcgtggtggcgggcgtttgtagttttagttatttaggaggttattaggaggaagggaaatagtatgtatagtgggtgaaatagtatgtgtaaagtgggtggtgggaaggtttagtttaaggtttttatatggggtcggtggggaattgcggtgatgagggtagatggataggttgggtcgtggtgtgggggtttgattaggtggggttgtttcgtttttatcgtgatattttttttcgtttttttatgttgttatggttttgttttatttttaggtttttgtttttagttttggatattttttttattattatttgtttttttttattttattttttcgataattagttgtttattttgattttgtttttgaaggttagatttggaggggtgtgtgttgggagtttgtggttagtttgggattagtatttgttttaggttttttaaagtttacgttaattgtgtttttttttaaagttttattagttggattttatttttttagaggtttaggttatttttttttgagggtttataaggtttgggatttttaagttttttttatttttttcgtttttattttaggttaggtgttttatacgggaatttgtattggtggttttagttgtgtttttatagagggattttgtttttttttttttatttatttatttttagaatgtggtgtgttgagtatttttattattttttatttttgtaagtatgattaggtggtagttgtagttttttatttttttttaggttttggggtagtaggattgtagtttttataatttgtagtagtttggggaggtggggtttgggttgtaggtttagatttggaggttagatgttgagatttagattagggatttggatagttttttattatatttagttttttttgggtttatgggtgggtttattttataggatggtttgtgttattttttataaatgttaagttgtgaggaggagaggagggtgtttgagtttgaggttggtttaatttttaaagagttagtaaggttgggtcgagggcggtggtttacgtttgtaattttagtattttgggaggttaaggcgggtggattacgaggttaggagatcgagattattttggttaatacggtgaaatttcgtttttattaaaaatataaaaaattagttgggtgtggtggtaggtatttgtcgttttagttatttaggaggttgaggtaggagaatggtatgaatttgggaggcggagtttgtagtgagtcgagatcgtattattttattttagtttgggcgatagtattattttaaaaataaaataaaataaaaataaaaaataaaaaaagagttagtaaggttgagattgagtatagattggttaagttatagataacgtatttgtttttgttggttggtaggaagaataatggtttggttgattattttttgttatttattaaaattggttttattttggtcgggtatagtggtttatgtttgtaattttagtattttgggaggttaaggcgggtagattataaggttaggagattaagattattttggttaatatagtgaaatttcgtttttgttaaaaatataaaaaaattagttggcgtggtggtaggtatttgtagttttagtgattcgggaggttgaggtaggagaatggcgtgaattcgggaggcggagtttgtagtgagtcgagatagtgttattgtattttagtttgggcgatagagcgagatttcgttttaaaaaaaaaagttagttttattttttagggaaggttttgttggggtggagggagatattttggggtaaagtgggtgttaggtgaggaagttagtttgtgatatagttgggattagttttatttagtaagatttgttgtgtgtttttgagtaaagtgtagttttttttggaatttttgatttttaatttgtaaaatgggaggatttgaattttatatgtggttttaaattttttttttttttaagttgtggagttattttttataaaaggattttataaaatttaagtaaaattttacggaaaagtttaagagagagaaaagtaaaattttgtttgaaatgaggtagggattttggatgggtttaattggtattattttgtttatattttatatttaattagtggttttgaaggaagatggtttggagtaatttagagttttttgtagatgtatttacgttgagattgtatgttgggatggagggttttggtaggttttgattagatgattgaatgttattagtattatagttattttttggtttatgaagggggttggttttaggattttaatttgtattgcgaatatttaagttttattgttggttttgtggaatttgtagatattaaaagtcggttttttgtatatgtgggtttttggatttatgttggattgaaaaaaaatttttaaatttttatatgagtggatttatatagtttaaacgtgttgtttaagggttaattgtgtatgaagattgttttatttgtggtggatagtgaggttttagaaagaggagataggtaggttaatggatggtttttatgggtgtgggaaaggaggagtggttattgggcgtaggtagttggtttgtgggattagtgaggtatgggttgtggttggtagtaggaaagcgggagaggttgagtgtagtggtttatgtttataattttagtattttgggaagttaaggtaagaggtttgagtttgggaggtttaggttgtagtaagttataattatgttattgtattttaggttgggtaatagaataagattttgttttaaaaataataaaataaaataaaaacggggagaggaaaggatttaagagatgttttaaaaaagaattttaggaaatagtgaaaagttgtaaatggggtattaggagttaggagtagagattaggtggtaggtagggggtgtagaaatgataagttttgtttggaatagatgaaatttgaggtgtttgtgggatttttgagtgggtagaagcgggggttggagataagggtgtgggaaaattgtgatgggggttgagggtggaaatcgggtcggtagagttttcggggtagagaaagttttatggggtgattagatgagttgagaattgggtgggtgggtgtaggtttaatggaagtagaaatttatggatattgatttatatgggagaaggggaatggatgggggtcgtagtggggtggtagggtttttttttttttgtttttgtttttttgtttttttttttttttttattttttcgtgagggttttttaggtttaggagagattagggtggaagggtgacggttaaattagggaaggttttaggtggttgaagtttggtttgtgtttagtagggttttggcgggttgttttatattttatcgggtaggtgataattggttagagttgtttttttataggtgttggaggtaggttgggagggtcggtgttttttgatgtggatagggggaggggtattgataagaggcgtggagagatttttagagatgtagtttgtggttttgggttttaatttagtgtgttattatttggttgtgtgatttttagtaagtgttattatttttttgagtttgtttgtttataaaatgaggaagagttggtataagtttgaaaagattttttaggttttattcggttttgaaattcggtaattttttaattagggtgtattttttttgtaaggggttggggaggggacggtgcgaaattaagtttagtttgtggagcggagttagagttgttggtcgagtttgggtttggttaacgtttgttttcgggaaggttttgtgtagggagattgtttggagggattaagcgagggttttaattgacgttttaggggtagttttttagtttgagattttgttggggaagtcgcgttttgtgtattagttgcgtttagggttgaggtgagggcgtaggttttttagggtgtgttcgaattgttcgttttagttcgcggtttgttttgatcgtttagtagcggtagtagcgatattttagggttttaggaagggtttgggaaggtgtaaaggcggggttaggttcggagggagtcggagggatcgggcgcggttggttttcgggagtaattggagggtgaggagatttttattcggggaagtttcgcggtcgcgtttttatagcgttttttttcgggttttggttttttcgttggttattttggatttgggggtttttagttgggattcgagttcggtgcggggagtttagtgggtttgggagttgttatttttagcgggcgcggcgggcgcgaggagtttatttatagattaaataattcgcgttttttgcgttaatggaatttcgcgtgcgttacgcgcgtagatattttaggtttttttttttcgtttcgttttttcgggtttttcgggtcgtatttttttttggtcgtttttcgtcggaatcgtatcgtttttcgcgtttttgtatggttaaagttcgacgggcggtttgcgttagtggcgttttcgttttttttcgtgcgttacggagcgtttaagaggagggtcgggttcggtcggggagttttagtggcggaggttacgaaatttgggggagtgtatagaagaatttcgggagcgtacgcgggattagggattaggttgagattcggggcgttagttcgggtaggggtagcgggagtcggtcgggtaggtttttttcggggaacgtgtatttgtttttaggagcggtgtatgaaggagatgggtgtacgcgcgggtagagaggatgttgtagggtcggtatgtaagagggtaggtgtagtgtgtagttgtagtataacgggatgagaatttaggttagattggaaattattgggtgcggggtaggaggtaggggaggttgattatttgtaaagtggaagttgtagggggttggggttggcgtcgggagtagggatttgtttagtaggcggttggttttagtttagttttttagggtgtttaattgggcgtacggtgttttgaatttgggtgggtgtggatgggggttatagtatcgtgggggaataggtatatagagttttggcgttgttgggattcgtacgattttaattgggattggatttttaaaaggttttttttttttttagtttgttagtttttttttagtgtttcggttgtttttttaatattttagaggttgtggttgagttggtaggggttttttattttgaattttttgtttgaggtgcgttaggaagttttcggattattgaaggaagtgattggtttggtggttgagttgtggagggttgtttgttgtgtattgaataaaggaggttttttggggttaggggtagggtttttgtaagtatagggagaattgatttcgttggggtttggatcgtgtgtgtgtgtgtgtgtgtgtgtgtgtgtgtgtgtgtgtgagagagagagagagagaaagagaaagagagatagaggtggaaatttttgtttttggggattttggatagaagttgttagtgttggagttttggggcggtgttgtttagaggatattttttaattattttagttttagatgttgattatttttatgtttttttttttagtagtttttgttggattttataggtagggtgtagtttgaggtttgtttagtagaataggtgtaagttatattgttgttaagatttgtttgaagtcggattttttttattgttttttttaatttcgtttttttttttttttgtgggattgttttttttttttgtgaggttagatgtaggtttatattttgtgttgttaagaatttgtatgaagggggagggattgatgggggttgattcggatgtgggacgtttaggtggagaaataggatttgaataaggtaggaataagcgtttagttttgtttaattgttgtttttttttttttatttttagtttatttttggttaggttgttttagtgtaggtagatgtggttatttttatttttcgtagggtgttgtatgtttgtggattggtgttattgggtgtgtggggtttgagttataagggtttttgttgttttggttgttaggttaggggtggaggtgttttgtttagggtttgtggagttagaaggaaggttaggattagagaggattttttgggtttttggttaggaggtggtgatagtttttgtttttattattgtattttttgattatggtattttgtttttgtttgattttttttttagttttttttattgattggtgaggttagagttatgtagattttaggtgtgtaggttgggagggagattgttttggagttttttttgtattattttttgattattttgtgaatgtaaggatttgtttgaatgatgttatttttgtttaggttttttttaggtttttcgggattggggttgtgtaattttttttgtttgagtttttggattttttagggtatagatttagttttagtggagggatttaggtaggggtagaatgttttttatttatttattagtaggtttttttttaagttttttgttggatttttagagtttttttattaagataattgggggtagtagaatattttttttaggtattgttgtttatttttttgagagtttagggggttgtggttttttttttttttttttgttttgtttttagtaaatggtttttaaaggtttggagttaggttatcgatgaggaggtttaggttttcgatgaggaggtttaggttttttttttttttgtttttgggagtatttcgagtagtgtagagtggttttttagttttagatggtaggattggggtgggtttgggatttgttgtttttgtttagtgtgtagggttggggtggaaatgggggataggttagggtttttgtattaggttgtttttttaggtaggtgggtttttatttttagttttttttttatttttacgatgtttttttttttaggtattgcgaggggaggagaaaaggggttttgtagaggtttgggagtatttttaggaagtgtttggttggcgaaataattagggagttgtttttgggagttgggttgaggttttgttgggttgttttttttatttatttttttttcggtttttattacgttttttttatgggggaggggtagggggttggaggaatatagtttttttttgttttagtagagaaatgttggttgtatgttttttttagggtttttaggttgattagggtgtggttggttttttgatggagtttatttatgttgggtcgttgtttaggggttttgtggtatttaggtcgagatggtatttaggttaggggttaggatttttgggtgttttggtttcggtgtttttgttttatttttaggttgggatttttgttattttgttgttttggggtttaaatattttgagataaggttataggtttgttttattgatttttttttttttttttggggttttttttttttttaga

SEQ ID NO: 144 - DNA, 7890 bp, Artificial Sequence
  chemically treated genomic DNA (Homo sapiens)
tttggagagagaggagattttagggagggaaaggagagttagtgggataagtttatagttttgttttaaagtatttgggttttagagtagtaaggtggtaggaattttagtttaaagatgagatagaggtatcgggattagagtatttaggaattttgatttttggtttgagtattatttcgatttaggtgttataaagtttttgggtagcggtttagtatgagtgggttttattagaaggttagttatattttagttagtttgggaattttaggggaggtatatagttagtatttttttgttggaatagggggaagttgtgtttttttagttttttgttttttttttatggggaaggcgtggtgggggtcgggagaagggtgagtgggagaggtagtttagtaaagttttagtttagtttttaggagtagttttttggttgtttcgttaattaggtattttttgggaatatttttaggtttttgtaaagttttttttttttttttttcgtagtgtttaggaagaaggatatcgtggaaatggaagaggagttggaagtgaaagtttatttgtttaagaaggtagtttaatgtagaggttttagtttgttttttatttttattttaattttgtatattgagtaaaggtagtagattttaaatttattttaattttgttatttggggttgggaagttattttgtattgttcgagatgtttttagaagtaaagaggaagggaatttaggtttttttatcgggaatttaggtttttttatcggtaatttggttttagatttttaaaggttatttgttggggatagggtaaggggggaggaaggagattatagttttttggatttttaggagaatggataatagtatttaaaaagaatgttttgttgtttttagttattttaataagagaattttgagagtttagtagaagatttaaggagaagtttgttggtgggtgggtggaagatattttgtttttgtttgggtttttttattaaagttgggtttgtgttttgaagaatttagaggtttaggtaaagggggttatatagttttagtttcgaggagtttgaagagagtttgaatagagatagtattatttaggtagatttttatatttatagaatggttaaaaaataatgtagaggaggttttaggatagttttttttttaatttatatatttggggtttgtataattttggttttattagttaatgagggaagttggagaagaaattaagtaggaatagagtattataattaaggggtgtagtgatgggggtaaaggttgttattattttttggttaagagtttaggaagttttttttggttttagttttttttttaattttataggttttgaatagggtatttttatttttagtttgataattaagataatagagatttttgtagtttaggttttatatatttagtggtattagtttataggtatgtagtattttgcgagaggtgagggtggttatatttgtttgtattaggatagtttggttagggatgggttgggggtgaaggaggaaagatagtagttgggtagaattgggcgtttgtttttgttttatttaaattttgtttttttatttggacgttttatattcggattaatttttattagtttttttttttttatgtaggtttttaataatataagatatggatttatatttagttttataggaggggggagtagttttataggaggaggaagaggcggggttgaaggaggtagtggggagaattcggttttaggtaggttttggtaataatgtggtttgtatttgttttgttgaataagttttaggttgtattttatttgtaagatttaatagagattattgggggagggggtatagggatgattagtatttggagttggaatggttgggaggtattttttaggtagtatcgttttaagattttaatattggtaatttttatttaggatttttaaggataagggtttttatttttgttttttttttttttttttttttttttttttttatatatatatatatatatatatatatatatatatatatacgatttaagttttagcgaaattaattttttttgtgtttatagagattttgtttttgattttaagaagttttttttatttaatatatagtaagtagttttttatagtttagttattaagttagttattttttttaatgattcggaggttttttaacgtattttagatagaaagtttagggtggggaatttttgttaatttagttatagtttttaaagtgttaagaaaataatcgggatattgggagggagttgataggttgggaggaaggagggttttttggaaatttaattttagttagaatcgtacggattttagtagcgttaaagttttgtgtatttgtttttttacggtgttgtgatttttatttatatttatttaagtttagagtatcgtgcgtttagttgggtattttaggagattgaattaaggttagtcgtttgttggataagtttttattttcggcgttaattttaattttttatagtttttattttgtaggtagttaattttttttattttttatttcgtatttagtagtttttagtttgatttgggtttttatttcgttgtgttatagttgtatattatatttatttttttgtatgtcggttttataatattttttttgttcgcgcgtatatttattttttttatgtatcgtttttaaaaatagatgtacgtttttcgaagggaatttattcggtcggttttcgttgtttttgttcggattggcgtttcgagttttagtttggtttttggtttcgcgtgcgttttcgaagtttttttgtgtatttttttaagtttcgtagttttcgttattgggatttttcggtcgagttcgattttttttttaagcgtttcgtgacgtacggggaggggcgggggcgttattgacgtaggtcgttcgtcgagttttggttatataagggcgcggggggcggtgcggtttcggcgggaggcggttagggggaggtgcggttcggggagttcgagggggcggggcgaggagggggggtttggaatgtttgcgcgcgtgacgtacgcggggttttattgacgtagggagcgcggattgtttgatttataaataggtttttcgcgttcgtcgcgttcgttaaaaatagtagtttttaggtttattaggtttttcgtatcggattcgggttttagttgggggtttttaggtttagaataattagcgggagggttagagttcgagaaggggcgttgtagagacgcggtcgcggggttttttcggatgaggatttttttattttttagttgttttcgggagttaatcgcgttcggttttttcggtttttttcgagtttagtttcgtttttatatttttttaagttttttttggagttttagggtgtcgttgttgtcgttgttgggcggttaggataggtcgcgggttgaggcgggtaattcggatatattttggggagtttgcgtttttattttagttttaggcgtagttagtgtataggacgcggtttttttagtagggttttaggttgagaggttgtttttgagacgttagttagagttttcgtttagtttttttaggtagtttttttatataggattttttcgagggtaggcgttggttaggtttaagttcggttaatagttttggtttcgttttataagttgaatttggtttcgtatcgttttttttttagttttttatagggggagtgtattttagttgggaaattatcgaattttagaatcgggtggagtttgagaaatttttttaaatttgtgttaatttttttttattttataaataaataggtttagagaaataatggtatttgttgaaggttatatagttaggtggtggtatattgggttggaatttagggttatagattgtatttttagggatttttttacgttttttattaatatttttttttttgtttatattagggagtatcggtttttttagtttatttttagtatttgtggggaggtagttttgattagttattatttgttcggtggagtgtggaatagttcgttagggttttgttgggtatagattaggttttagttatttggagttttttttggtttggtcgttatttttttattttgattttttttgagtttggggagtttttacggaaaagtaagagaagagggaagggtaaaaaaataaaaataaggaaaagagagttttgttattttattgcgatttttatttatttttttttttttatgtaagttaatatttatgagtttttgtttttattgagtttgtatttatttatttagtttttaatttatttggttattttataggattttttttgtttcggaggttttgtcggttcgatttttatttttaatttttattatagtttttttatatttttgtttttagttttcgtttttgtttatttaaaggttttataagtattttaaattttatttgttttagatagaatttgttatttttgtattttttgtttgttatttaatttttgtttttggtttttgatgttttatttgtaattttttattgttttttgaaatttttttttggaatattttttgggttttttttttttttcgtttttgttttgttttgttgtttttgagataaggttttgttttgttgtttagtttagaatgtagtggtatgattatggtttattgtagtttggattttttaggtttaagttttttgttttggttttttaaagtgttgggattataggtatgagttattgtatttagtttttttcgtttttttattgttagttatagtttatgttttattggttttatagattaattgtttgcgtttagtgattatttttttttttttatatttatgaagattatttattagtttgtttgttttttttttttaaagttttattgtttattatagatggagtagtttttatatatagttgatttttgaataatacgtttgaattgtgtaggtttatttatatggggatttggggatttttttttaatttaatatggatttaaaaatttatatatatagagggtcgatttttagtatttataggttttatagggttaatagtgggatttgagtattcgtagtataagttggggttttggagttaattttttttataaattaaggggtgattgtaatgttgatggtatttagttatttggttagaatttgttagaattttttattttagtatatagttttaacgtgaatgtatttgtagagagttttgggttgttttaaattatttttttttaaggttattggttgaatgtgaagtgtgggtaggatgatgttaattggatttatttaggatttttattttattttaggtaaagttttgttttttttttttttaggttttttcgtaagattttgtttagattttgtggaatttttttgtggaaaatgattttatagtttaaaaaaaaaaaaggtttaaaattatatatagaatttaagtttttttattttgtagattaggagttaagggttttaagaggagttatattttgtttaggagtatatagtaagttttgttgggtggaattgattttagttgtgttataggttgatttttttatttagtatttattttgttttaggatgtttttttttattttagtagggttttttttagaaaataaaattaatttttttttttaagacggagtttcgttttgtcgtttaggttggagtgtagtggtattatttcggtttattgtaagtttcgtttttcgggtttacgttatttttttgttttagtttttcgagttattgggattataggtgtttgttattacgttagttaatttttttgtatttttagtagagacggggttttattgtgttagttaggatggttttgattttttgattttgtgatttgttcgttttggttttttaaagtgttgggattataggtatgagttattgtattcggttaaaataaaattaattttaataggtagtaaaagatgattagttaagttattgttttttttgttaattagtaagaataagtgcgttatttgtggtttgattagtttgtgtttaattttagttttgttagttttttttttgttttttgtttttgttttgttttgtttttgagatggtgttgtcgtttaggttagagtgaagtggtgcgatttcggtttattgtaagtttcgttttttaggtttatgttatttttttgttttagttttttgagtagttgggacgataggtgtttgttattatatttagttaattttttgtatttttagtagagacggggttttatcgtgttaattaggatagtttcgattttttgatttcgtgatttattcgttttggttttttaaagtgttgggattataggcgtgagttatcgttttcggtttagttttgttagttttttgagagttgaattagttttaagtttaggtattttttttttttttttataatttggtatttgtaaaaagtggtatagattattttgtggggtaggtttatttataagtttaaggaaaattgagtgtggtgaggagttgtttaggtttttggtttgaattttagtatttagtttttagatttgggtttgtagtttaggttttatttttttaagttgttgtaggttatggaggttgtagttttgttgttttaaagtttggaggaggataaggaattatagttgttatttggttatgtttgtaggggtgggagatggtgggggtgtttaatatattatattttgaaaataagtaaataaggagaaaaaggtaaagtttttttgtggaaatatagttggggttattaatgtaggttttcgtgtggagtatttagtttaagataaaggcgagagaggtgaaaggggtttggggattttaggttttgtgggtttttaagggagaatggtttgggtttttgagagagtggggtttagttagtggaattttggagaaaggtataattgacgtggattttgggaggtttaaaataaatgttggttttagattggttatagatttttagtatatatttttttaagtttaatttttaagaataaggttagagtgaatagttaattgtcggggagatggggtaggagggaataggtaataatgagagaggtatttaaaattagagatagggatttggaggtaaggtaaggttatgataatatggaagggcggggagagatgttacgatggagacgagatagttttatttagttaggtttttatattacggtttagtttatttatttgtttttattatcgtagttttttatcgattttatataaggattttgagttaaatttttttattatttattttgtatatattgttttatttattgtgtatattgttttttttttttttagtagttttttgagtagttgggattataagcgttcgttattacgttcggttaattttttgtatttttagtagagatggggttttattgtgttagttaggatggtttcgattttttgatttcgtgattcgtttgtttcggatttttaaagtgttgggattataggcgtgagttatcgtgttcggtttaaattttattttaaaatagttacgtttgaatgagaggaacgtatttttttatatggatttagatgtagatgtaatttattgagaataaatttttttaagtgtgtttttttgaaagtatagtggttgttttttattatgtatttgttttattaatagatagagtataagtatgattagtagggaatgtaatattttatagtagaaaggggtttttttgttgataatatagtttatttttt

SEQ ID NO: 145 - DNA, 5666 bp, Artificial Sequence
  chemically treated genomic DNA (Homo sapiens)
gaggaattatgaatttaattttttgaataggtatagaataatttaagtagtgtattttattttggttgagttttggtagtttgtgatttttgaagaatttatttattttttataaattattaggtttatgaaggtaaagttggttttagtgtttttttttattatttttttaatggttgcgatgtttgttgtggtattttttattttattattgatattggtgtttgtattttttttttttttatttttattagttttgttagagatttgttgattttattgatttttttaagaataaatttttgttttattgattttttttattgtttttttatttttaattttattgatttttgttttaagttttattgtttttttttttttgttttttttgggtttagtttgttatttttgtatagttttttgaagtgataatttagaatattgatttgaagtttgtttttaattttaatatgggtataaattttttttttagtattgttttagttgtattttataaattttgatgtagagttattttttaattagtattggagatatattttgagaaatgtattattagataattagataatttttttattgtaaaaatagcgtagagtatatttttataaatttagatggtatatttaatatatttaggttgggttatatggtatattttattgtttttaggttataattttgtatagtatagtgttatgttgaatagcgtagttaattgtagtataatggtaagtattagtgtatttaaatatataaaaatattgaaaatgtaatttaaaatatagtattgtagttttataggattatagttgtatatgagttttgttattgatagaaatattattatatggtatacgattattttgtatttttatgtgttgtaagtgaagtgagttttttataaatagtatatagttgggttgtagttttttggttttttgtgtgttttgtgttttgtttgtttgtttgttttttgagatggagtttcgttttgttatttaggttggagtgtagtggcgcgagggaaagtgcgtgtttttttattgtatattgtatatttttgtatatgtaatatatacggtgtaatatgtaatatatacggtgtaatatgtaatatatattgtgtattgtaatatatattgtgtaatatataataatatatattgtgtaatatattatatattgtgtatatgtaatgtaatatgtaatatatattgtaatatatagttatgtaatatattgtgtattgttatgtaatatatattgtgtattgtaatatatattgtgtattgtaatatatattgtgtattgtaatatatattgtgtattgtatgttatgtaatatatattgtgtattgttaagtagtttggatatttatttttttttgtttattttttttttgttgttttttgtgttttatattattttattttatggtagttggttgtttaaagtaggtttattttaaaagaaatgatggtgttagtttttttttgtataattttgagatattagaaagtttttttaggtaatattttaagtggagattttggtgtttttgttttgtaaattattttagttttaggtttgagtgagtggaaagattaagtgttttatattttattggtaaagtataaatattgtattaaatgaaaataaaattttttaagtaagggtttttaaaaggtggtatttaatttgcgtgtatcgtatggggtaatgtaaaggttggaatatagtaaaataagaaaggaaagcgtataaaggtttagaggtggataggtatttgtttgatatatgttatgtgatagtagggaagttatttaatttttttgagttgttgtaatttagtagatttttaatattttggttttaggatttttttatatttttaaaaattattgaagattttaaagaaatgtgtatgtaggtatttagttattgatgtttattatattagaaattaaaattaatatatttagtttatttatttattaatttattttaaagtaataataattaatttattatattagtataaatgatatgtatatgaaatataattatatttttataaaataaaaaaaagtgtgaggagtggtataattttatatttttgttaatttttttattatttagtttaatagagatagttaaatttttaggtttgtttttgtatttaatttgaaatagaattatatgttatatagtatagtaaatattgttgaatatagggagaaaataagagaaagagataaatatagtttttaaattattatgaaaattgttttgatttagtagatttttgaataggttttgggtatttttaagtatttttgggaatatgttttgagaattatttattttatttaaaaagtggatttgaattttatttttttttgaagagttgtaggtagtttatattttagatggtatttggtgttttaattcgtggtcgttattatgtatagattaaatttttattagggtatttagattgggatggcggagatttaattgttaggttttatgaattttgattttttttttttagaattggaagaagatttagtaacgttgttgttttttttatttgattgagagatgaggagtttgtagttgtagtttggtattatataattgacgacgtgttttttagtgtttatgttgaggtattgttgcgtatggtgtgagggatggatagaatttatttttttgttcgtttattcgatcgaaatgggtgtatatttgtcggttttagcgagaacgttatttttcggagggagtacgcgaggatttcggtattatacgcgggtttacgtaggtagtgtggtagtttattatgttgttttttgtagtgttggcgagtttttcgggtggtagatttcggttttgtattatgaagtgtgttttgttgtgatgatgatgattgttggtgtattggttgtagtgattagtgagtgtgttggggttaggcgtttgaaggagtgtgttagcggtgggatattgtatgtttatagggtgttgtggttgggattttttaggtgatgttttaggttggcggggtgagttttcgtggggggtttttttttttaaaatgtggatataggagagagttattttgttttgtttgttggtataattttgaaagtgatttattaagtttggtttggtaaatattcgtatatgataatgaagattagaattttgttttatgttatagttttaaaataggtaaaaattgtaatttttgtattttgtatttttttattattattatattttaagttttagggtatatgtgtataacgtgtagatttgttatataggtatgtatgtgttatgttggtgtgttgtatttattaatttattatttatattaggtattttttttaacgttattttttttttaggtttttattttttaataggttttagtgtgtgatatttttttttttgtgtttatgtgtttttattgtttaatttttatttatgagtgagaatatgcggtgtttggttttttgtttttgtgatattttgttgagaatgatggtttttagttttatttatgtttttgtaaaggatatgaatttatttttttttatggttgtatagtattttatggtgtatatgtgttatattttttttatttagtttattattgatggatatttgggatggttttaagtttttgttattgtgaatagtgttataataaatatatgtgtgtatgtgtttttgaaaattatttgggtttggcgcggtggtttacgtttataattttagtattttgggaggtcgaggtgggtagattatttgaggttaggagttcgagattagtttggttaatatggcgaaatttcgtttttattaataatataaaaattagtcgggtatggtagtttgtgtttgtaattttaattatttgggaagttgaggtaggagaatttttcgaattcgggaggtggaggttgtagtgggttaagattacgttattgtattttagttagggcgatagagttagatttcgttttaaaattattattattattatttgtattattattattttgattttatgtgttaagttaaagataaggttttagtttatttgtaaaggatattaaaaataataattgttaatatagataatttttagtttttgaaaaattaaattagatataattgttgttttatttttttttttaaaattttttttttaaaaaaaattttaatgatattatttatgttaataagaattttatcggatgtaataaagttcgttttgaggtaaattgtagaattattatttaacgttagtgttttttaagtttttcgattttattaattagttagtaatatgtttaatttttttagaagttatttgaaataatttttagaattttaatttattaagatgttttaatattaaagtattagtatcgttatttgaggttggagggtttaaagttgttttattttaggtatatttaagataatattgtttaatttttataaacgattaattttatttggatattttaaaataatatttgaaataggtgttataaaatttttttaaaacgtgaatttttagaataattttttcgaatttggggtttgaagttttcgttttattaaaagtagattttattattattcggtagcgcggaggtatattcggagattgggatttttatttttttcggggcgtgatttgtgatttttgattcgtgattttattttttttagggcgtgattttttagttttatttttttcggggcgtggttcggagataattttggtaagagtcgcgtagttcgagtcgggcggaattattgttcgcgttgtcgtgttttcgggcggggatatttagggcgcgacgtttttttgttatttatagaggttcgtcgcggttgcgttattcgcggttatgaagtttcgggttaagatcgtggacggggtttgtttgaattattttatacgtgagtagggaggtcggagaggagcgagggaggaacggaaggaagtagtgagcgcgcggtggggatcgcgtaggaggattagaacggggatgggcgtcggaaggggtcgcgggaggatggggtcgggatgggggtgttggtgtaggtcgcgggagggtggggtcgggagggcgcggggcgggtcggagggtatttgtggggatgaaggcggtttttaagggacgtttttgaaatttgatttcgattacgtggttttaaaaaaaagcggttattgtttttatagacggttttattaggtattgatatatttttaaggttttattcgtttttttattttgatagtgtttaattttgtatttaattgtgtattgtagtatttagtagttaataaatttatgttgaatgaatgaatgattggtaggtgtttgtttttttatttgaatattgatgatgtgtgttgtatattttttttagtttgttgggagaattgcgtgatattaggggtattaaagtattttttagtgtgatattaacgttaagtggttatttttttatcgagaagttgatgaataagaaattttgtaaaataagttggtttttaggatatataatgtgtattttagtaattttttattttaatttttgttttagg

SEQ ID NO: 146 - DNA, 5666 bp, Artificial Sequence
  chemically treated genomic DNA (Homo sapiens)
tttaaagtaggggttaaaataaggaattattaaaatgtatattatgtattttagagattaatttattttgtagaattttttgtttattaatttttcggtggaaaaataattatttaacgttggtattatattggaaagtattttaatatttttgatgttacgtaatttttttaataaattaggggagatgtatagtatatattattagtgtttaaataagaaaataggtatttattagttatttatttatttaatatggatttattgattattaggtattgtaatatatagttaaatgtaaggttaggtattgttagggtggagggacgaatggggttttgaaggtatgttaatgtttgataaagtcgtttatgggagtagtggtcgtttttttttaaagttacgtgatcggaattaagttttagaaacgttttttgaaagtcgtttttatttttataagtgtttttcgattcgtttcgcgttttttcggttttattttttcgcggtttatattagtatttttatttcggttttattttttcgcggtttttttcggcgtttattttcgttttgatttttttgcgcggtttttatcgcgcgtttattgttttttttcgtttttttttcgttttttttcggtttttttgtttacgtgtgaagtggtttagataggtttcgtttacgattttggttcgaaattttatggtcgcggatggcgtagtcgcggcgggtttttgtgggtaatagaaaagcgtcgcgttttgagtgttttcgttcggaaatacggtagcgcgaatagtggtttcgttcggttcgggttacgcgatttttattagggttattttcgggttacgtttcggaggaggtggggttagggggttacgttttagaggaggtggggttacgggttaaggattataggttacgtttcgggggaggtgggggttttagttttcgggtatgttttcgcgttgtcgggtaatggtgggatttatttttagtgaggcggaggttttaagttttagattcggggaggttgttttgagaatttacgttttgaaagaattttgtgatatttattttaagtgttattttaaaatatttaaataaaattaatcgtttataaaggttaaataatattattttaaatatatttaaggtagagtagttttaaattttttagttttagatgacggtattggtattttggtattgaagtattttggtggattaaggttttgaaaattgttttaaatgatttttaaaaaaattgaatatattattggttagttggtaaagtcgggaagtttaaagaatattgacgttaagtgataattttgtagtttgttttaagacgaattttattatattcgataaaatttttattagtataaataatgttattaggattttttttaaaggaaaaattttaaagggggaaatgaagtaataattgtatttaatttggttttttaaagattaaagattatttgtgttaataattgttatttttaatgttttttgtaaatagattagaattttgtttttaatttgatatatagaattaagataatgataatgtagatgatgatgatgatgattttgagacggagtttggttttgtcgttttggttggagtgtaatggcgtgattttggtttattgtaatttttatttttcgggttcgagggatttttttgttttagttttttaagtagttgggattataggtataagttattatgttcggttaatttttgtattattagtagagacggggtttcgttatgttggttaggttggtttcgaatttttgattttaggtgatttgtttatttcggttttttaaagtgttgggattataggcgtgagttatcgcgttaggtttagataatttttaaagatatatgtatatatatgtttattgtggtattatttataatagtaaagatttggaattattttaaatgtttattaataatagattggataaggaaaatgtggtatatatatattatggaatattatgtagttataaaaaaggatgagtttatgttttttgtagggatatggatgaagttggaaattattatttttagtaaaatattataaggatagaaaattaaatatcgtatgtttttatttataagtgggagttgaataatgagaatatatggatatagggaggggaatattatatattggggtttgttggggggtggaggtttgggggagggatagcgttaggagaaatatttaatgtaaatgatgagttgatgggtgtagtatattaatatggtatatgtatatttatgtaataaatttgtacgttgtgtatatgtattttagaatttaaagtgtaataataataaaaaggtgtaaaatataaaaattgtagtttttgtttattttaagattataatatgaagtaaaattttaatttttattgttatatgcgagtgtttgttaaattaaatttaatagattatttttaaagttatgttaataggtagggtaggatggtttttttttgtatttatattttgggggaaaggattttttacgaaaatttatttcgttagtttgaaatattatttagaaggttttaattataatattttatagatatatagtattttatcgttaatatatttttttaaacgtttaattttaatatatttattaattattataattagtatattagtaattattattattataataaaatatattttatggtataaaatcgaggtttattattcgaaaaattcgttagtattataaaggataatatggtggattattatattgtttacgtaaattcgcgtataatgtcggagttttcgcgtatttttttcgagaaataacgttttcgttaaaatcgataagtatatatttatttcgatcgaataaacgagtaaaagagtgaattttatttattttttatattatacgtaataatattttagtatggatattgagaagtacgtcgttagttatgtggtgttaggttatagttgtaagttttttattttttagttaagtgggaaggataatagcgttgttaggtttttttttagttttgagaaaagggagttaaaatttatgaaatttgatagttgggttttcgttattttagtttaaatgttttggtgagagtttaatttgtatatgatggcgattacgagttaagatattaggtgttatttggagtgtgagttatttgtagttttttaagggaaaataggatttagatttattttttagataaaataggtggtttttagagtatgtttttaagggtgtttgggaatatttaagatttgtttaggagtttgttaggttagaataatttttataataatttaaaaattgtatttattttttttttttattttttttttatatttaatagtgtttattgtattatatgatatatgattttattttagattaaatgtagaagtagatttgagaatttaattgtttttattaagttggatagtgaaggaattggtaaaaatgtagaattatgttattttttatatttttttttgttttgtaaagatatagttatgttttatatatatgttatttatattaatataatgggttaattattgttattttaaaataaattaataagtaaataggttaaatatattagttttaatttttaatataataaatattaatagttaaatatttatatatatatttttttgaagtttttagtgatttttaagagtgtaaaggggttttgaaattaaaatgttggaggtttgttgagttatagtaatttagagaggttaagtgatttttttgttattatatagtatgtgttagatagatgtttgtttatttttggatttttatgcgttttttttttttgttttattgtgttttagtttttgtattattttatacgatatacgtaaattggatgttattttttgaaaatttttatttaaagaattttatttttatttggtgtagtatttgtgttttgttagtggagtataaaatatttaatttttttatttatttagatttggggttgaagtagtttataggataaggatattaagatttttatttaggatgttatttagaaaggttttttgatattttaaggttgtgtaagggaaagttaatattattattttttttgagatagatttgttttgggtagttaattgttatggggtgaggtggtgtgggatatagaaggtaataggggagaaataagtagaaaagaataaatgtttaaattgtttggtaatgtatagtgtatattatatagtatataatgtatagtgtatattataatgtatagtgtatattatagtgtatagtgtatattatagtgtatagtgtatattatatagtaatgtatagtatattatatagttgtatattatagtgtatattatatattatattatatatatatagtgtataatatattatatagtgtatattattgtatattatatagtgtatattataatgtatagtgtatattatatattatatcgtgtatattatatattatatcgtgtatattatatgtgtaaaggtgtgtaatgtgtagtagaaagatacgtattttttttcgcgttattgtattttagtttgggtgatagagcgagattttattttaaaaaataaataaataaataaaatataaaatatataaaaaattagaaaattataatttaattatatgttgtttataagaaatttattttatttataatatatgaaaatataaaatggtcgtgtattatgtaataatatttttgttaatgatagagtttatatataattgtggttttataagattataatattgtattttaaattatatttttagtgtttttgtatgtttagatatattaatatttattattgtgttataattgattgcgttatttagtatagtattatgttgtataggattgtagtttaggaataataggatatattatataatttagtttagatatgttaggtatattatttaggtttgtagaagtatgttttacgttgtttttataatgaggaaattgtttaattgtttaatggtgtattttttagaatgtatttttagtgttaattgaggaataattttatattaaaatttgtgggatgtagttaaagtaatgttgagaggaaaatttatgtttatattagaattgaagataggttttaaattaatattttaggttgttattttaaaaaattatataaaagtagtaaattaagtttagagaaggtagaagaaaggaaataataaagtttagagtagaaattaataaagttgaaaatagaaaaataatagaggaaattaatgaaataaaagtttgtttttgaaaaaattaataaaattaataaatttttagtaagattgataagaataaaaagaaagaagatataaatattaatattaataatgaaatagggaatattataatagatatcgtagttattaaaaagatggtagaaaaaaatattaggattaattttatttttataaatttagtgatttataagaaataaatgaattttttaaaagttataaattattaaaatttaattaagatgaaatatattgtttgaattgttttatatttatttaaaaaattgaatttataatttttt

SEQ ID NO: 147 - DNA, 7061 bp, Artificial Sequence
  chemically treated genomic DNA (Homo sapiens)
ttgaggttagaatggtttttaatttttgggtggttaaaggtttattagagtcgatgacgatttttaaagattatacggaagtatatagttgtgtagttggttttagggagttcgaggggttttgagttacggtatggatttcgtttatggttttttgattttttttatttgtttttaatttttttttttattagttttggttattatgtgggttattttatttgaagtattattttatatttttttttttgatgttttttttttttttttatgtattaattataagttgtagtgtatttgttaaagtatttgtttattatttttttttttttatatttttgagggtggggttttgttttttttatggttgatttttagtttttgggtgtttggttggtgtttagaaggggtgtaggaatgaggggtttttaggcgtcggttttttttttggtgattttttagaatcgattttttttttttttttttttttttttttttttttttttttttttttttttttttttttttttttttttttttttttttttttttttttttttttttatttttttttttttttttttttttttattttttttttttttttttttttttttttttttttttttttgagatagggttttattttgttatcgaggttggagtatagtggtgtgattataatttattgtagttttaaatttttgggtttaagtgatttttttattttagttttttgaatagttagattatagttatatattattatgtttggttaattatttttatttttatagagatagggttatgttttgttatttaggttggttttaaatttttggttttaaacgatttttttacgttagttttttagtgttggaattataggcgtgagttattttgtttgatttagaattttttttttaaggatatttatttttttagtttgtttatatttttgtggtggtggtttgttgttttaatgaggagtttaaatttttttgtatagtttttaggtttttttgtgtttggttttttgtttgtttttttgttattttttgtttgttattttagtttttagtaggaagaattattggtttttttttgaatatattgtattttttttagttgtttgttgttattttattattatttttatttttttatattgtatattttatttttttgttgtttgggggaaggttatttattttttaagattagttatggttagtagtttatggagacgtatttagatataaatagatttgttgtttttttttattttatttattttaagggttaggttgtaagtagttcgtttttgatagattatttttttgttagatgggggtaagattgtggtttagtgtagggtattttattattttttttttttatatttagtttagtatttgttttatattggaagggtattttttttttattttattgcggttattgttgggtgagggaaagaatgtagatagaagtttgggagtttgagatggagaagttggaaggaagagtaatttattttgagggggtagtcgtaggaggtgggggatattaggatagagttttgtaagaaagagttttcgggatggatggaagagattatggatttgataagtatgatagggtgatggaagtttaggtattgagaatagtaagattagagttatggggttagggttaggttaattgaggttgaggtgtagtaggttcggagattttttttttagggtttattttgtattttttagagttgagagatgtatttttttttatgttttttttgggtatttttttagtttttttagttagttgtgagttagagtattgggattattaaaggtaggttaggttgtgatttttgttagggggtagtggggtttggggatttatgaatgtttttagaaatggttgtgtgagtagttatattatcggttgtgattttaatttgttagggtagggtcgtttatttttatataggatggacggatggatagtcggtttatataggtttgtagggaggggtttggttttatttgtgttgatagagggttaggagtaggaggagagtttttttttgatttgggggttgtttggtttgttgttgttatgaagtaagtaaggaaaatatttgggaaatcgatttttgaggggaggaatttttattatatgtaggataagtgagattttagggaggatgggtgggacgaatgttgagtaagtgtataattatttagggcggagtatattgtttggtatatagtaggtggtttttagatatttattaaagaattgttttttttatgtgttttattaagaaaatattttagttgtgggtattgattgtaagttgaggaagttagagagaaaatatagagtatatattttttttttggaaattaaattgtttaggtatttattttaaaaataatgttaaaaaatttaaaatcgttggttagtttttttattaaatattaaattttgttttgtaaagaaataatgataaataattataaatttttaattgtagtgattttattgttttattttgatttttgtaggagacgttggggttattattttttggagattttagaggtagaataaaagttagtttggtaaatttaagttatttttcgaaggttatagaaataggaaagtggtgagaaaaggaggtcgttagttaattttaatttggttatttttttatttttattttttgagttagagtttcgtttttgttttttaggttggagtgtaatggtatgattttggtttattgtaatttttgttttttgggtttaagcgatttttttgttttagttttttgagtagttgggattgtaggtgattgatattatgtttggataatttttgtatttttagtagagatggggttttgttatgttggttagtttggtttcgaatttttgatttttggtgattcgtttattttggttttttaaagtgttgggattataggtatgagttattgagtttggttttttggttattttttagattgataatgtaatagatagtgtaaatatatttataaatttagaaggttaagaaagggtatgtaaggaaaatcggtttgttttttagttatattttttattattatttataagaaggtattgttattaatttatgtattttttttaaaatatttaataaatgtagaattagttgtatatatttattttgtttttattgtatataaatagtattatattttgtatttttttatttgtatttagttaggagattttattttagttgaattattttatttttagagatttttttttataagaaaattagagttgtttttttttgttgatagttgtttattttttagtggaaggatgttttaggatttatgtatttagtatttagagatgggtatttaggttatttgtagtatggtttttagatagggattggttcgcgtatttttttatataagtttaaaatgattttttacgtttgttttattatttgtaggataaatagttgagggtggtattgttagtatagattattttatttttagttttagaattttagggtagttattatttttatttgtttttatattttttttgaagggagtagtagggattatttttttgaatgtaagaatgattgttatttgaggtgatttagtaatgttttattgttttagagtgttttagttagattatagagaaaggtatttatttagggtttgtttatagtaaataggattgtatgggtattagaaatgtgaatttttgtttaggatttatcgttatagtttttgtgattttgatttggtaatagttttttttttttggttttagtgtttttttttataaagtaaggggttggataagttatttttagttttttagtttggtaatattatttttaaaggatttgaagggataataggaggtttaggtttggaggtagggtagttttgagtttgtgtttagaatgggaggtaaagatggtggtaggtgggtgggaaaatgtggggtttgggggttataggagagattaaggggtaggtttggagtatggtacgttttttgattatagttttttattggaaggttatggagggagtgatggggagagtttgtaatttttggagataagtttgattttgattttttttgaaggatttttttttttcgattttttttttgtgaaagagaatattcgagaaatgagaattttaattaaagagaaaatttttgtatttgttattgataaatatttggtttatgcgggaaagttatgggtgttttgggattttggttttattgttaataagattttgttagatttttttaattgtttttttagagaggagaaaggtttttggaggtagagtgagattggggagtttggtagagttttaggatgaattgtgtttttgttttgttttgttgtaggttggagttttttttttgtagaaagagaagtaatttcgggtttttttatagataatttgttagggttcgtagagatttggattttaattttatttcgtttttttttatttggggtattgttttttgcgtttgagaattgttgggtgggttggtgttatttaggatttttaaatttttgtaggagacgttttgtaggagatttttagggtttttttttgtgttaattaaagagtttggttagttggatttgggttgtttttttgataaaaataaacgttattttttttttagttgagtatttgttagaattggattttaattgagggtttgaattttttaataacgggataaatagtatgaaattaaaatcgtttattttttttttattagcggtttgcgtagggttttgggtgtattagtaaaataaatttattttgaatatttagtttttagcgtgcggcgttgttaattattaattttttggtgtaagtggcgcggtttgtgttttttataaggtgcgcgttgtgtttagcgagtatcggttatcgttattttatttagcgagtatttgtcgtcgcgtcgtcgttatttttttagagagtattggttatcgttttattattatttgtttagagtttgggttatcgttcgtcgttattagtttagagagtatcggtttttgtttgttgttcgcgtttggagatgttagaggttttcgttgttcgcgtttggttggtattgtttttgttgattgtttaggtcggcgtgatagtcggcgtttcgtggtagtgcgcgttttgtttcgtcgagaagttcgcgttttgttcgtcggtgttcgtttcgtgttcggaggttattcggttcgtcggttgcggttgttgttcgatgtgcgttttgtttttgggcgtcgcgtgcggcgtggcgattgtacgttgcgttcggggatttagttgtcgcgcgttgtcgggggagtagtaatttttgtacgtttttattcgcggttaaggcgtttgcgtgtaggagtttgacgttttcgttttttatgttgtaggtattatagtttcgtttttgttttagtattttttgtcgttcgttttcgttcggtatttttcgtttttatttttttaattattgggtggggttgtagtcgggtaggggtttgtttataattagagtttgaaattagagtacgtagttggggaaggagtttgggttatttagtggagttcgtttattgtacggttttggtaggacgtgttttgggagaagaaggaagatgttttagggtatatatagtttagtggagatttaaggaggaagtttttatttggttttcgtagtttagagatttttagagatttagatagtaagagtagagggaggcggtggggttgttttcgtagttgggatgttattttgggttttttattagtttttttgttagtacgtgggtagttttagtggttggagtattcgggaaggtttaagaagggaattttttttgttggtttttttaggaggtgtttggaatgttttttgtaatatacgttttggatatagtatgtgttttttagatgtttatagaatataatgtgagagttgaggttaaaagttttatttttatttattgttatagaaaaataatgtttgatgtgtatgttgttttttaagaatatgataattaggtttttttttggatttaagtaggtatttgtttgtagcgggaagtggaggaaatgtttttttttttattttagtttttatttttttatttggattgtttgtacgttttgttttgtgttatttttggaggaattaggatttttatattttgatagggtgttagagtgagtgtgtgagagttagtgatttttttaaggagggaatagggattttttgcggattttttgttttttagaggaaatgaaagggagtcgttttattgatttttaaggagatggatttttatagggggttttttataggttagtgtgttgattttgtttatgtatttttggattttatttgtaagatttttttgttatgggggtggagggggtgttgtagagaagtttattaggacgtgggaaggtaggggttttaaaatagaagagggtagtagtttgggttaggagagttgtattttagattttatttttagatgaattgtattatttatttagggatattagtaaaatttttattttaaggatggagaagttgaggtttcgaggttttttattaatgcggttaggaattgaattttaattttggtttttttagggttgtttttaattttagtaaatgtatttgttgttttgtttttttgttgttttaaaagtagaaacgtggggtatttttgttaggttttgaaatttattattgttaggaatagagttggtatgttgttgggatataattttttttggaaattattataaggttttttatagtgagagttagtgaaaattaggttagggaatgtggttatttttatggtttagtttggttttgagggaaggaagtgattttttgggggttcgaaaggggtagatgttttgggagggtttatggggtttgtaatgttttttttttaga

SEQ ID NO: 148 - DNA, 7061 bp, Artificial Sequence
  chemically treated genomic DNA (Homo sapiens)
tttggaaaggaaatattgtagattttatgagtttttttaaagtatttgtttttttcgggtttttaggagattattttttttttttaaaattaggttgggttatgaggatggttatattttttaatttgatttttattgatttttattgtaaaggattttgtaatggtttttaggaagagttatgttttaatagtatgttagttttgtttttgataatagtaagttttagggtttggtaagggtgttttacgtttttgtttttaaagtagtaggggagtagagtaataaatgtatttgttgaggttgagaataattttaaagaagttaggattagagtttagtttttaatcgtattagtagggagtttcgaaattttagtttttttatttttaaaatggggattttattaatatttttgaatggatggtatagtttatttagaagtggagtttagaatgtagtttttttgatttaaattattatttttttttattttggggtttttgtttttttacgttttaatggatttttttgtaatattttttttatttttatggtaagaggattttgtagatagagtttaaaggtatatgaatagaattagtatattggtttataagggattttttgtggaaatttatttttttgaggattagtgagacgatttttttttattttttttgaagggtagagaattcgtaggaaatttttgttttttttttggaagggttattgatttttatatatttattttaatattttattagggtatggaagttttaatttttttaagaatggtataggataggacgtgtaagtagtttagatgaggagataggggttggagtagagaaagaggtattttttttatttttcgttataaataaatgtttgtttaaatttaggaaagaatttgattgttatgtttttagggggtaatatatatattaaatattgtttttttatggtaatgaatggaagtgaagtttttagttttaatttttatattatgttttgtaaatatttgggaagtatatattgtatttaggacgtatattataaaggatattttaaatattttttggggaggttagtaggagggattttttttttaggttttttcggatgttttagttattggggttgtttacgtgttggtaaggagattggtgggggatttagggtggtattttaattgcggaggtagttttatcgtttttttttatttttgttgtttgggtttttaaagatttttgggttacgagggttaagtgggagttttttttttgagtttttattaagttatgtgtgttttggaatattttttttttttttttagagtacgttttgttaagatcgtgtaatgagcgggttttattgggtgatttaagttttttttttaattacgtgttttggttttaagttttagttgtggataagtttttgttcggttgtagttttatttagtagttaggggagtgggggcgggaggtgtcgggcgggggcgggcggtaggaggtgttggagtaggggcgggattgtggtatttgtagtatggggagcggaggcgttagatttttgtacgtaggcgttttggtcgcgggtgagggcgtgtagaggttgttgttttttcggtagcgcgcggtaattgagttttcgggcgtagcgtgtagtcgttacgtcgtacgcggcgtttagaggtagggcgtatatcgggtaatagtcgtagtcggcggatcgggtgattttcgagtacgaggcggatatcggcgggtagagcgcgagtttttcggcggagtagggcgcgtattgttacggagcgtcggttgttacgtcgatttggatagttagtaggagtagtattagttagacgcgagtaacggggatttttgatatttttaggcgcgagtagtagataggggtcgatgttttttgggttggtggcggcgggcggtggtttaaattttgggtaagtgatggtggagcggtggttagtgttttttgggagggtggcggcggcgcggcggtagatgttcgttggatgggatggcggtggtcgatgttcgttggatatagcgcgtattttataaagggtataggtcgcgttatttgtattaggaggttaatgattggtagcgtcgtacgttaggagttgagtgtttaaaataagtttgttttgttagtgtatttaaggttttacgtaaatcgttggtgggaggagggtaaacggttttgattttatattgtttgtttcgttgttagggggtttaggtttttagttaaagtttagttttaataagtgtttagttgggagggggatgacgtttgtttttgttaaaaagatagtttaggtttagttggttaggttttttaattgatatagaaaaaagttttagagattttttgtaaagcgttttttgtaaaaatttaaaaattttgggtaatattagtttatttagtagtttttaaacgtagaaaataatgttttaggtgaggaaaggcgagatggggttagaatttaggtttttgcgagttttagtaggttatttgtggaaaagttcggaattgtttttttttttgtaggaaaaaggttttaatttgtaataaaataaaataaaaatatagtttattttagggttttgttaagttttttaattttattttatttttaagagttttttttttttttggaggggtagttaagaaggtttaataaggttttgttagtagtggagttagaattttagggtatttatgattttttcgtataggttagatatttattagtagtaaatgtaaaggttttttttttagttaaaatttttatttttcggatatttttttttataggaaagaagtcgaaagaaaaaaattttttaaagaaagttagaattaggtttatttttaggagttgtaggttttttttattattttttttatggttttttagtggagagttgtgattagggagcgtgttatgttttaggtttgttttttggttttttttgtgatttttaaattttatatttttttatttatttgttattatttttgttttttattttaggtataggtttagggttattttatttttaggtttgggttttttgttgtttttttagattttttaggagtggtgttgttaaattgggaaattggagatggtttgtttagttttttgttttatagaggagaatattgaggttagagaaggaaggttattgttaggttaaagttatagaggttataacggtggattttgaataagaatttatatttttgatgtttatatagttttgtttattgtaagtaagttttaagtaaatgtttttttttgtaatttggttaaaatattttaaaatagtagagtattgttgaattattttaagtgatagttatttttatatttaaggaaatgatttttgttgttttttttagggaaggtgtaagggtaggtgaaaataataattattttgaaattttgaagttggaggtagaatggtttgtgttaataatgttatttttagttgtttattttatagatgatgagatagacgtgagagattattttaaatttatgtgaaaaaatacgcgaattaatttttatttggaagttatattgtaagtaatttaaatgtttatttttaggtgttggatatataaattttggggtatttttttattggaagatagatagttattaataagaaagagtaattttgatttttttatagagaaaaatttttaaaagtaaagtgatttaattgaagtaaaattttttagttaagtataaatgagaaagtatagagtgtggtattgtttgtgtataataaaagtaagatgaatgtatgtaattgattttatatttattgaatgttttgggaggaatatataaattgatagtaatgtttttttgtgggtggtggtgaaaaatgtgattgagggatagatcggttttttttgtatatttttttttaattttttgaatttgtagatgtatttatattgtttgttatattattaatttaaagaataattaaggggttaggtttagtggtttatgtttgtaattttaatattttgggaggttaaggtgggcggattattagagattaggaattcgagattagattgattaatatggtaaaattttatttttattaaaaatataaaaattatttaggtatggtgttagttatttgtaattttagttatttaggaggttgaggtaggagaatcgtttgaatttaggaggtagaggttgtagtgagttaagattatgttattgtattttagtttgggagataagagcgagattttgatttaaaaaataaaaataaaaaaataattaagttgaaattaattgacgattttttttttttattatttttttgtttttgtggttttcgggaagtgatttggatttgttaagttggtttttgttttatttttaaagtttttaaagagtaatggttttagcgttttttgtaaaaattaaaataaggtagtgaggttattgtagttggaagtttatgattgtttgttattatttttttatagagtagagtttggtgtttggtaaaggaattgattaacggttttgaattttttgatattatttttagggtagatgtttaagtaatttgatttttagaagaagaatgtgtgttttgtattttttttttgatttttttagtttgtaattagtgtttatagttgaaatgtttttttaatgaaatatatgaaagaggtaattttttggtaaatatttagaggttatttgttgtgtgttaggtagtgtatttcgttttggatagttgtgtatttgtttagtattcgttttatttattttttttgaggttttatttgttttgtatgtagtgaaaatttttttttttaaggatcgattttttaaatgttttttttgtttgttttatagtaatagtaaattaaatagtttttaaattaagagagagttttttttttatttttgattttttgttaatatagatggagttaagtttttttttataggtttgtgtaggtcgattgtttattcgtttattttgtgtgggagtgagcggttttgttttggtaggttggagttatagtcgatgatgtgattgtttatatagttatttttgggaatatttatgaatttttaagttttattgttttttggtaggggttatagtttggtttgtttttggtggttttagtgttttgatttatagttgattggggaggttggggaagtgtttaggggagatatgaaaggaggtgtattttttagttttgggaagtgtagggtgggttttgggagagaggttttcggatttgttgtattttagttttagttggtttgattttaattttatgattttggttttgttgtttttagtgtttgaatttttattattttattatgtttattaagtttatggttttttttatttatttcggaaatttttttttgtaggattttattttgatattttttattttttgcggttgtttttttagaatgaattgtttttttttttagtttttttattttaagtttttaagtttttgtttgtatttttttttttatttaatagtgatcgtagtggagtggaagggaggtatttttttaatgtagggtaggtattgagttaggtgtgggggaaaggagtgatgggatgttttatattgagttatagttttgtttttatttagtaggaggatggtttgttaagggcgggttatttataatttgatttttaggataagtgaggtgggaagagatagtaggtttatttgtgtttgggtacgtttttataagttgttggttatggttggttttggagggtaagtggtttttttttaagtagtaaagggatggggtgtgtaatgtgggagaatagagatgatggtgggatgatagtagatagttgggaagagtgtagtgtgtttagggaagagttagtagttttttttgttgggagttggaataataggtagggagtggtaggggagtaggtaggggattaggtataaagaggtttggaggttgtgtaaaggggtttagattttttattagggtagtaggttattattataggggtataagtaggttaagagagtggatatttttagaaaggaggttttgagttaggtaaagtggtttacgtttgtaattttaatattgagaggttgacgtgggagaatcgtttgaggttaaggatttgagattagtttgggtaataaagtatgattttgtttttgtgaaaataaaaataattagttaggtatggtggtgtatgattgtagtttagttatttaggaggttgaggtgagagggttatttaagtttaggagtttgaggttatagtgagttatgattatattattgtattttagtttcggtggtagagtgagattttgttttaagagaaagagagagaggagagaaagaaagggagaaagaatggaggaaagggaggaaggagagagatggagagaaggaaggaaggaaggaagaaagagagagaaagaaaaagaaagaaagaaaaagaaagaaaagaaaagaaagaaagaaaaagaaagaaagatcggttttggaagattattagggagggagtcggcgtttggggattttttatttttgtattttttttgagtattaattagatatttagaagttgaggattagttatgaaggaggtagagttttatttttaaagatgtagagggggaaaaatagtaaataaatattttaataaatgtattgtagtttgtgattaatgtatgaaagaaagaaaagaatattaggaaggggagtatggaatgatgttttagatgggatggtttatatagtgattaaaattggtgagaggaagagttagagatagataagaaaagttagagagttatagacgaggtttatgtcgtagtttaaggtttttcggattttttggagttaattgtataattgtgtgttttcgtgtggtttttgggagtcgttatcgattttaatgggtttttgattatttaaaggttgaggattattttggttttag

SEQ ID NO: 149 - DNA, 7829 bp, Artificial Sequence
  chemically treated genomic DNA (Homo sapiens)
gtagggtttttagaattagtagttacgtgtttgatttttggtattttcgttgattagcgtaaaattttttatgttttttatgagaattaagtgcgagtgtttaattttaggtttaagatattgaaatgtttagtagatattgttttttttttttttgattggaattgtatattttattaagttgtaattagtttaataaattatggttaaaatacgagtgtttattgtatgttaaattttgttgggtattttatatgtattgattgatttaatttttaatagtttagtgagataaatgttatttttatttttttatttatattaagaatattgaaggttagggatattaattaatttgtttaagattataatagttagtcggtggagacgttagaatttaaatttaggttgtaatgattttagttcgtgtttttaattgttttgttgtgttatttgagttttatgaaatggggttttgatttgtatttaggtttttgtttagaatttttatttagattttgtttttcgaagtagatttatagtttattttagttttgtgttataaagattattttatattgcgttaatatttttttgtatatttatatatttatagttttttgtaaaaagggtattgtaggtatttgatgaagagtttttgaaagttgtttgtttttaaaaagagataatattttgttatattgtttaggttggatttaaatttttggggtttaagtagtttttttgttttaattttttattgaaagatatttttaatttttgtattaattttttaggtaggatgtttttttttaggttaatgggtagggaaattggtttagatgaaaatgatttgtttatggttatatttgttagtatagagttagtgggaatttatatattttggattattgtgtttttttttattgtataatgttgtttattttgtatttttattttttatttatagttgttatcgaatatattttttgattatttaatttgtgttgaggataaagtattaaatataagataaaaaaaaaaaaaattttgatttttttgtagtttttattgttgtgttaggtttttttattaacgttaagattgttgtttgttgaaatagttgattaaggtttaagatttttagttttaaaattttttaagatattaagaagttgattttagggtattttttaaattatatattttttttttagtttttttgagtttatattttaatttataaatattttagttgtattttttattttagaaattaaaaggtttgatttttttaaggtaaatataaagtaatttattgtaggtgtgatggttttttttatatttatagtattttaatttttgttattgagttttattgttaattagtttgtttttaacggtaaaaatttggtagtggtttttggttaaagtggttttattttgatgattatatttatgaatattaaaatagtttatttttatttttttgtttattatttaaaatgtgtgttttttttttgcgtagatattagttttttaaaagatgtttttgaaaatttaagagagttttagtttttttagatagatttttggaattttgtattttggaaaaatttttgatattttatttattgtagtgaggttttgttttaatttatagaattgtgttttgttttttttatttttttttttgttgagaaagtgttagatatatttgttttttttataagattgtggtaaattgaagtaatttgagtaatttataaaatttttttgattttttttttatgtaaaatagtatttataaaattgagttataaaagtaattttttgttattaaaagaaaggtatttttttttaaatttttgataattttataaataaattcgggtggaagaatttattgttattattaaaaattttttgattattttttttggttttttttgttttttaagtgtttttatatttatttgagttgggaattgaatttagtgaattatgttttttttaaagggtattttgtgattgtttttggtgaattgaatttttttagtattgatgatttttttttttgtatattgtagtaagaaatttgaatttattttttggaattatttaaagtgtttattaatataaattgattttgttttttttttatttgttttaaaaataattagttagattatattgtttggtttattttagaagaaatattatttggatgaagttattatataaatgttgtagtatatatataaaaaaatcgtttgttattttgaatgaggatagttgttattttatataaagtggattagtagttttaggtttaaagtgtttagaatagtgttttttatgttttttaagtgttatgtgggtgttttttatttttattattagaatggtaattttttgagagtagagattttgttgttattgaatcggtatttaaaagtattatagttaatgtatattgttttgaaattttgttgttgtttttgttttttcgaagagtttaatttttaggttaagtattataaatttatattattttattgttgtgtttaataatattggaggttagtttgaagattaggtataatgtgattgtaatgtagtattgtttgtagaagagatagaatgattggaaaattaaattttttttgattattggtttttgtagaattttagttttaaaagaattttagtgattttagttagatttttgaattttatatgaggttaagagaagttttatgatttttaagttgaagtaatatatggtttgatagtgtatattaaaaaattttttaagttttggttaggtgtggtggtttacgtttgtaattttagtattttgggaggttgaggcgggcggattacgaggttaagagatcgagattattttggttaatatggtgaaattttgtttttattaaaaatataaaaaatagttggacgtagtggcgtatgtttgtagttttagttattcgggaggttgaggtatgagaattatttgaatttgggaggtagaggttgtagtgagttgagattatgttattgtattttagtttggcgatagagtgagatttaggtttaaataaaataaaataaaataataatagaaaaatatttttgtaagttttaaaaaggtttatatggtagtttttttgaatggagtttgggtttggtggaatttatagttttttttttgttttaaaaggttgagttgtgatttttttcgggtttgaggtatgttttttagtatttttttttggttagtttttattgatttttggtagttggtaacggtatgttgtgaggaaatttggggtagataggttttagatatgtagttagtaagtattgtttatggattggttagtgttgttgggtgtttaagtgtaaaaaggagtattgtgaggtttttttgtttaagtaacgggagagataagtttagtttttttttgttataggatttttttttttatatatgttgatttttttgttgagattgttattttcgttttggttttatgttttatttttatggatatttattgtattttaatttaatgtttttttttttttgagttttagattagattatattttttttattttatgttttttattttttttttatagtaatttagttttttgtaatgatttttttttgtatattttagtttgattttattttttttattgattgtaagttttacgtaggtagggatcgtattgtttttgttttttgaattagtttagtttttgtagagttgtttgaaaatatttgttgaaagagtgaatttttttaataagtatagtatttgaagttttgtttatgagtagaagtaaggtattagtatgtagttagtttttaagtgttgttttgaggtagggtagggtgtttatttatataattaaaataattgattatattaatttttaaaaaatttttgtgtagtgattttaattttgttaaaattggttatattaaaatagttaaattaaagttattataattaaatttatatttgttttttttgtcgggttttttattattatttttatttaagttttatttattgtagaaagtttttttaagttagtttttgttagtgttagttattagagttaataatattttgacgtatttatattattgattttaggttgtttttgtgtttttatttgtgttgtttttaattttttattgtaaggttttgtggggatgttggtttcgtggttttagaggtaatttattttttttttttttttcgttgttgttttgtaatgtttgggattatgttttttttaaaattggattttgataaaatgtgttgagtggttagatagaaaattgaggtgataattattgttaatttgagaattaattttgaattattaaggttggtagtttattatttgtaaaaataattggattttattgttaaagaatttgtgagaagtaataaggaaagttgttaaaataatataaagttgtgtgtgtgtgtgtgtgtgtgtgtgtgtgtgtgtgtgtgtgtgtagataaggttggggcggggtaattttagaaggaatgagaaattaaagtgcgcgtttttgggtgttttaaattattgtttatataattaggagaggggttgttgatggaaaaagtatataatttttatttatattggataggatattttatatcgggaagtaaaaatttttggtttttttttttgatgcggtgaagttagtattttttttgatgtttgtattttaagatgtttttttgttttttcgatgttttaggttatttttttgttttgttttgttttttttttttttttttttaaatgtttttttttgtttgtttatggtttgggttgtttttttaatgaaaatgtttttttatttttagatgtaattatttttgttattgatttatttatttatttttgtttttagcgtttttttgaagtagttttggaaagtagagaagaaaatttagtttgttttttggagaatattggatagttgaataaatgtaggtatgtagatttgtatatttttaaaaaaggaaaatatttggttttaaaaaaattgatgaaatcgtgtttttgaggttgtagggttattggtgttattgtttttaattttttgaaattgatgtatttatttatttttaatgttgagtatgttggttaaaaaaaattttaaatataaaagtataggaggtatagagtaaaagttaaattttttttgtaattttttttagatgtttattattattaagaatttattgtacgtttttttagattttaatatgtatgtgtataattatattatatatgttgtgtatatgtatgagtatattatttatattatgttttttttattttgtagaatgttttgtgtatttttttgtgttgatttatatgtagttttatgttattttttttgatagttatatagtagttttgtttgttttgtttagtgagtttttttttattggatattgttagttggattttttttttattttttttttttttttgagtcggatttttgttttgttattaggttggagtgtagtggtgtgatttcggttcgttgtaattttcgtttttttaggtttaagtaatttttttgttttagtttttcgagtaggtgggattataggcgtatgttattacgtttagttaatttttttatttttagtggagataggggttttattatgttggttaggttggttttaatttcgtgatttcgtgattcgttcgttttggttttttaaagtgttgggattataggtatgagttattatatttagtcgatttttttatattttaaataatgtgatattttgtaaatatataattatatgtatttgtttgtttatttttttagagttagagggtataatattgtttttggattttttttttgttacgtttataaagatttttaaggataaaggtttattttatattatgaagtaggtttttagttattttgttttttattatagttttttaatgtgggatggggttaggggtttagtgttgggtttttaagtggttttgtttgttgatttgaattttaaggttaattatgaattaattgttttaggttggtttttagaagattttggtttttagatttatttggaaattaaatagttaaaattgaatattttttagtttgtagtattgaggtatatttggttaatgtttttttttttagaatttttttttattaggggagttaatagattaagtaaatgaatttggtgaagagaattgtgattgttgtttgttttgtatgattttttttgtttgggggagtttttttgggttattttgtaagtatttattatgtgtaagtttttgtgttttttacggatatagagaaaaatgatttagtttttattttaaggaatttatagtatgtgtataagatgtttaaattttttgtggttagtgtagtgggataagtttaggagtaagaagcgagggttttagggaatgggatggaggtttagagatggttttttgtaggaggcgatatttgagttgaattttaaagaaagttgaagtttgttatgtaagggataaggtagaaagatatttttatagaggaattagtgtgagtgaaggtaggagggtgagaagtagtattgggtaggggaggatatagtaatattgatagttttgtgggttttaagtatgaagtaagaagtttagagtgatagaagataaggtgaggaaggttggtcggttagatgatggagtagggttttgttttagagttttagaattgttttgtagattaatgggaagtttttggaggatttggtatgtgttacggagaaattattttaggggtttaagtgaaggttggtttggtagataggaagaaagtagtaggagtgtggggttagcgaattagtttgtagtttattggtattgggtaagaagaagaaagaatgtgtagggtttttttttatttttttttttttttttggttttgtttaaggttaagttgttgaggttggttttttggttttaggtgttttttttttggagggtgtttatgtgaattatttatttacgtattttttattagggttttttaattgttttaaagtaaggtttttttttgtttttttgttgttgcgttaaagttttgtcgttttttttggggtggtaggaattaggttttatttattaattgttatggtttttttatgtgatttatgaatatgaattggttattattttgtgtgtagtgttttaggtggggatgtgaagagagataagatacggtttatgtttttattatgtttgttttttagtgggagatggatatgaaattaaaacgttgatttttgttataagtttgtttaaagtttatgtgattttagtagaaatagtagtagaattcgtaattaataattagttttttaatattgttggttttagaatgggttatattttttaattataatttgggtgtaaatggagaaaataaatttaggttatgtttaaaattattttgatttttgaaaatatggtttgattatatttttaaaaatatataattaataaattataatttattaattagtatgtataattattttttatggttttattttttatgagatttgatatgtttggtttttaggaagggaaggggtaggggagaggtacgtatttaatattaatattaaatgtttttgtttttttatttttagaatatttttttttgttataagaatttttagtatatagagtgattatatagttttgttttttttttataatagt

SEQ ID NO: 150 - DNA, 7829 bp, Artificial Sequence
  chemically treated genomic DNA (Homo sapiens)
attgttgtggaaggaaaataagattatgtggttattttatgtgttaaaagtttttatggtaaaagggagtgttttgaaggtaaaaaagtagaaatatttggtgttggtattggatacgtattttttttttgttttttttttttttggaaattaaatatgttagattttataagagatgaaattatggaaaataattatgtatattaattaatgaattgtaatttattaattatgtatttttgaaaatatggttagattatatttttaaaaattagaataattttagatatggtttgaatttattttttttatttgtatttaagttgtaattgaaaaatgtagtttattttggaattaataatgttaaaggattgattattagttacgaattttgttgttgtttttattggaattatataagttttgaatagatttatggtaagaattagcgttttaattttatgtttattttttattaaaaagtaagtatggtgagggtatgaatcgtattttatttttttttatatttttatttgagatattgtatataaaatgatgattaatttatgtttataagttatatggaagggttataataattaatgaatggagtttggtttttattattttaggaggagcggtaggattttgacgtagtagtaggagggtaggaggaggttttattttggaatagttagaaaattttggtgaaaagtgcgtaagtaagtaatttatataagtattttttaaagggagagtatttagggttaaagaattaattttagtaatttagttttgggtaaggttagaaaggaggaaagaaatgagggaaagttttatatatttttttttttttttgtttaatattaatgggttataaattaattcgttgattttatatttttattattttttttttgtttgttaagttaatttttatttaaatttttaaagtaattttttcgtaatatatattagattttttaagggttttttattaatttatagagtaattttgagattttgaaatagagttttgttttattatttggtcggttagttttttttattttattttttattattttgagttttttgttttatgtttgaaatttataaggttgttagtgttattgtatttttttttatttaatgttattttttatttttttgtttttatttatattgatttttttataggaatatttttttattttattttttgtatggtaaattttaattttttttagaatttagtttagatatcgttttttgtaggaagttatttttgaatttttattttattttttaaggttttcgttttttgtttttaaatttattttattgtattagttataggaaatttaagtattttatgtatatgttgtgagttttttgagataagaattgagttatttttttttatattcgtaagaagtatagaggtttatatataatgggtgtttgtagaatgatttaaggaggtttttttaaataagaaaagttatatagggtagatagtagttatagttttttttattaaatttatttgtttggtttattagtttttttggtgaggagagattttgaaaagagggatattaattagatatgttttaatgttataaattgagaggtatttaattttaattgtttaatttttaaataaatttgaagattagaattttttggaaattagtttgaaatagttagtttataattaattttgaaatttagattaataagtaagattatttgaaaatttagtattgaatttttaattttattttatattgaaaaattgtgatggaaaatagagtagttaaaagtttgttttataatgtaagataaatttttgtttttgagagtttttatagacgtgataggggaagaatttaaagatagtgttgtattttttaattttaaggaaataaataggtaaatgtatgtaattatatatttataggatgttatattgtttgaaatatgaaaaaatcggttgggtgtggtggtttatgtttgtaattttagtattttgggaggttaaggcgggcggattacgaggttacgagattgagattagtttgattaatatggtgaaatttttgtttttattaaaaatagaaaaattagttgggcgtggtggtatgcgtttgtaattttatttattcgggaggttgagataggagaattgtttgaatttgggaaagcggaggttgtagcgagtcgagattatattattgtattttagtttggtgatagagtaagagttcgatttaaaaaaaaaaaagaaataagaaaaaaatttaattgataatgtttagtaggagaggatttattaaataaaataggtaggattattatgtggttgttaaaaaggataatataaagttgtatatgaattaatatagaaagatgtataggatattttgtaaaatgaaaaaagtataatatggatagtatgtttatgtatatgtataatatgtataatatgattatgtatatgtatattaaaatttagaagaacgtataataaatttttaatagtggtgaatatttaggagagattataagggaagtttaatttttattttgtattttttatatttttgtatttgaggttttttttaattagtatatttaatattgggaatgaataaatatattaattttaaaaaattaaaggtaatagtattaatagttttatagttttaagaatacggttttattaatttttttaaagttagatattttttttttttaaaaatatgtaaatttatatatttgtatttatttagttgtttagtgttttttaagaagtaaattggatttttttttttattttttaaagttattttagagaagcgttaaagataaaaataaataaataaattagtggtagaggtaattgtatttgaaaataagagggtatttttattaaggaagtagtttaaattataagtaggtaagaaaaagtatttgagaggaagaaggaaaaaaataaaataaaataaaaaaatggtttaggatatcgagaggatagagagatattttagggtgtaaatattaaagaggatattaattttatcgtattaagaaaggaagttagggatttttgtttttcgatatggagtgttttgtttaatgtaaatgaagattgtgtgttttttttattaatagttttttttttgattgtgtgaataatagtttaagatatttaaaaacgcgtattttaattttttattttttttagaattatttcgttttaattttgtttatatatatatatatatatatatatatatatatatatatatatatagttttgtattattttaatagttttttttgttgttttttataaattttttaatagtagaatttaattatttttgtaaataataagttattaattttggtgatttaaaattggtttttaaattaatagtgattattattttagttttttgtttggttatttaatatattttattagaatttagttttaggaagagtatagttttaggtattatagggtagtagcgaagggggagagggagatgggttatttttgaggttacgaggttagtatttttatagggttttataatagaaggttggagatagtataaatggaaatataaaagtaatttaaaattaatagtgtgagtgcgttaggatgttgttagttttggtgattgatattggtaagggttggtttgggaaggttttttgtagtgggtaagatttaagtaaaagtaatgatggaaagttcggtaggggagataagtatgaatttgattgtgatgattttgatttggttattttggtatggttaattttaataagattaaaattattgtataaaagttttttaaaaattaatataattaattgttttaattatgtgaataaatattttgttttgttttagaatagtatttagaaattagttatatgttaatgttttgtttttgtttataagtaggattttagatgttatatttgttgaagagatttatttttttaataagtatttttaaatagttttgtagaaattaagttaatttaaaggataagggtaatacggtttttgtttacgtggagtttatagttaatgggaagaatggaattaaattaagatgtatagaaagaggttattataaagagttaaattgttatgaaggaaaagtagagaatataaaatagagggaatgtgatttggtttggggtttaggagggaagggatattgagttaagatgtaatggatgtttatggaggtggggtatgaagttaaaacggagatagtagttttagtaaaaggattagtatgtgtggggaaaaaggttttatagtagaaaggagttaggtttgtttttttcgttgtttgaataggaaaattttatagtatttttttttatatttgggtatttaatagtattagttagtttataggtagtgtttgttaattgtatgtttggagtttgtttattttaggtttttttatagtatatcgttattagttgttaaggattagtgaaaattgattagaggggagtattgaaaagtatgttttaaattcggaaagggttataatttagttttttaggataggaagagaattgtaagttttattaggtttaggttttatttagaagggttattatataaatttttttagaatttataaaggtgtttttttgttgttgttttgttttgttttgtttgagtttaagttttattttgtcgttaggttggagtgtagtggtatgattttagtttattgtaatttttgttttttagatttaagtgatttttatgttttagtttttcgagtagttgggattataggtatgcgttattacgtttagttattttttgtatttttagtagagatagggttttattatgttggttaggatggtttcgattttttgatttcgtgattcgttcgttttagttttttaaagtgttgggattataggcgtgagttattatatttggttagaatttaaaaagttttttaatatgtattattagattatgtgttattttaatttaggagttatggaattttttttagttttatgtaagatttaaggatttgattaaaattattaagatttttttagaattagaattttataaaaattagtaattaaggagagtttggttttttaattattttgttttttttgtaagtaatattatattgtaattatattatatttaatttttaaattgatttttagtattattgaatataatagtaaaatggtatagatttgtgatgtttagtttagagattaaatttttcgagaaaataagaatagtaatagaattttaagataatatgtattaattgtgatgtttttgaatgtcgatttaataataataaaatttttatttttagggaattgttattttgatgataaaaatagaaaatatttatatagtatttagaagatatgggaggtattgttttaagtattttaaatttaaggttgttgatttattttatatgaaatgataattgtttttatttaggatgataagcggtttttttgtgtgtgtgttatagtatttgtgtaatggttttatttaaataatattttttttaaaataaattagataatgtgatttagttgattatttttagagtaagtagaaaaggagtaagattagtttatattaataaatattttggataattttaagaaataaatttaagttttttgttgtaatatataaaaggaaaaattattaatgttagaaagatttaatttattaggagtaattataaaatattttttaaaaagaatatgatttattgggtttaatttttaatttaaatgaatataaagatatttagaaaataggaaggattaggaagagtaattagaaggtttttggtgatagtagtgaatttttttattcgaatttatttataaaattgttaaggatttgaaagaaaatattttttttttggtgatagaggattatttttgtagtttaattttgtaggtgttgttttatatgaaaaaaaaattagggaaattttgtgggttatttaaattgttttagtttattatagttttataaaaaagataagtatatttgatatttttttaataagggaaaaaataaaagaaataagatataattttgtgggttggaataaagttttattgtaatagataaaatgttagaaatttttttaagatgtaaaattttagaaatttatttgaaaaaattggaatttttttaaatttttaagggtattttttgaaagattggtatttgcgtaagggaagaatatatattttggatagtggataaggaaataaaaatagattattttaatgtttataaatatgattattagaatgagattattttggttaagggttattgttagatttttatcgttaaaaatagattggttgatagtgaaatttaatgataagaattaaaatattatggatataaaagaaattattatatttataatgaattattttgtgtttgttttaaaggaattaaattttttgatttttgaagtagaaaatataattaaaatgtttatgaattaaggtatgaatttagaaaaattgaaagaaaaatatgtaatttagaaaatgttttgaaattagttttttaatattttaagaaattttaagattaaaaattttaagttttaattaattattttagtaggtagtagttttaacgttggtaaggaaatttaatataataatgaaaattataggaagattaggattttttttttttttgttttgtatttagtgttttatttttagtataaattaggtgattaagaagtatgttcggtaatagttgtaaatgaaagatgaaggtataaagtaagtaatattatgtaatgaaaaaaagtatagtaatttaaggtgtgtaggtttttattaattttatattagtaagtgtgattatgagtaagttatttttatttaagttagtttttttatttattaatttaagaggaaatattttgtttagagggttggtataaggattaaaaatattttttagtgagaagttgaggtaggagaattgtttaagttttaggagtttgagtttagtttgggtaatatggtaagatgttgtttttttttaaaaataaataatttttaaaaattttttattaagtatttataatgttttttttgtaagaggttatagatgtgtaagtgtataaaaaggtattgacgtaatataaaatagtttttatggtataggattaaagtgggttatgaatttgtttcgaagagtaaagtttaaatagggattttgagtaaaagtttagatataaattaaaattttattttataaagtttagatgatatagtaaagtagttaagagtacgggttggagttattgtaatttgggtttgaattttggcgtttttatcgattagttattgtaattttaggtaagttagttaatatttttaatttttaatgtttttggtgtaagtggggagataaaaatagtatttattttattgggttattaagagttaagttagttaatgtatgtaaaatgtttaatagagtttagtatgtagtaagtattcgtattttgattataatttgttaaattgattatagtttgatgaaatatatagttttagttaaggaaaaaaaaaataatatttattaagtattttaatattttgagtttggagttaggtattcgtatttaatttttataaaaagtatgagaggttttacgttaattagcgagagtgttaggagttaaatacgtgattattgattttaaggattttgt

SEQ ID NO: 151 - DNA, 6036 bp, Artificial Sequence
  chemically treated genomic DNA (Homo sapiens)
tgagttattgtattcggttattatttcgttagtttatttttgaagttttattttcggggttttgattttattattttaagaatattggtttaagtttttgtatttggatgttgttcgggttttttgttttttttatttataatagtttttatttttaatttttttgtggttttagattatgttttaggtaaaatttattttttttttaaagattttgatttttttgtttttttacgattttgtttttgttgatcgttttgtagttttttttttttttattttatttttgtttttggttttttgattgttttttaagttgttaagattattgtttttttaaggtttttgtttattttgtgttttttttttggagtattttttttttggttagttttttgttttgtttcgggtttaagttttagtttgtgtttgttttgatattttggttttttttgttgtttgcgatgatttggtttttttatttgtttattgttttagcgttagattataagttttaagaggttaggtcggatttatttggttttttagggttgggtttagggtattataggtagaaatgggttattatttttttttgagtttttttttttttttttaaacgaagtttcgttttgttgttaggttggagtgtagtggcgttatttcgttttattgtaatattcgttttttagatttaagtaatttttttattttagttttttgagtagttaggattataggtattattaggtttggttaatttttttgtttttagtagagatagggttttattatgttggttaggttggttttaaatttttgattttaagtgattcgttcgttttagttttttaaagtgttgcgattataggttattacgtttggttaatttttgtatttttagtagagacggagtttcgttatgttggttaggttggttttaaatttttgattttaagtaatcgttcgttttagttttttaaagtgttgggatgataggcgtgagttattgcgtttagcgtttttttgagttttaagggagaaatattttaaagaagaatttgatttttttttggggtaatttttttgttttttttttgggtaaatttagttaggtttttttttttgggtgtaaaattagttttattgggtgtttaatttatatatgttatagatgggtaaattgaggtaataagggtcgggttagagttttatttaataagtgggtttagagtcggttgagtttttggtgtgatttagatttttttttgtgttattattagtttttttggtttaggggtttttagtagtttgtttgaacggggcggttgatgtagaggttttcggaattttttgtttttttttgttcgttttttcgtttttagttttcgtagggttttgattttcggtaaatgatagtggtttaggaaattaaggggtttatataggaaggagtcgagtgggatttttttttcgttgtttttcggttttgttcgtttttcgaaagtttagggtttttgttcgttaggtaagagttggcgatgtcgtagggttcggtttagatattgggggaggatggtggtggcgggggatggttgggttggggtagggtgttgttagggtaaaggttagttcgttttttaggtttcggaggaaagttgcgaggtagacgtgagtcgagattcgtatttttcgatcgttcgtttttttgggtttcggttttgattaaggtcgggagatgtttgttttgcggatttggaggagttattgcgtatgcgcgacgggggttgcggggttgggggtggggaggagggattgggaaggagggattggggggcggagtttttagtttttattttttaggttttttcggtttagatatagggtattcgattatattaggatgtagaacgttgaggattataaataggggatgtcgaggcgggaggatagtttgaggttaggagtttaaggttagtttgggtaatatagttagatttttatttttataaatatttttaaaaaattaaaaaaattatggcgttttttgggattaaatattatttttgattttttatttttttttgttatagtattatagaataataatattttgttaagatttttttgttgttttggagatgggagttttgttatgttgtttaggtaggtttttaatttttggttttaagttattttgttgttttagttttttgagtagttgggattgtagtggggcgttattgttattgaagttttattttaaattcgattggggttgggtatagtggtttatgtttttaattttaatattttgggaggttgaggttagcggattattggaggttaggagttcgagattagtttggttaatatggtgaaattttatttttattaaaaatataaaaattagttaggtttggtggcgggtgtttgtaattttagttatttaggaggttgaggtaggagaatcgtttgaatttgggaggtggagtttgtagtgagtcgagattatgttattgtattttagtttgggagatagaataagaattcgtttttttttttataaaataaataaataaataaaaaggttgggtaatgtggtttacgtgtgtaattatagtattttgggaggttaaggtaggcgaattatttgaggttaggagtttgagattagtttggttaatatggtgaaatttcgtttttattaaaaatataaaaattagttgggcgttgtggtgcgcgtttgtaattttagttatttgggaagttgaggtatgagaatcgtttgaatttaggaggtagaggttatagtgagttaagatcgtgcgattgtattttagtttgggtgatagtgcgagatttcgttttaaaaaaataaataaataaattaaaaaatttgattggttgatgttgaggggacgatagagaggttatggtgtgtgattttatttttataaagggtaaaattagatattaatttttttgtgggagagatggggtttttttaaggttttcgggattaggaatgtgtttatttttggtttgggtatcggtgatattaaagtgtttttttggtaaggtttttttttttataagatttttttttttatagtaattattatatcgttgtgttaattgttttttttgtttggtttaataggcgtttgttgatcgtttatcggtatattattaagaaatatataaattaatgtatattaattgagttgatattttaggtttggattgcgtttagtagattattttaatgaggatgttggggagttagtttattttatagttgcgaaagttgagttttaggggttttagttttttgattgttttaaattttattaggttaggcgtagttttttacgtcggtaattttagtattttgggagttcgaggtaggaggattattcgaggttaggagttttagattagtttcgttaatatggtgaaatttcgtttttattaaaaatataaaaattagtcgggtatggtggcgtgtttttgtaattttagttatttgggaggttgaggtaggagaattatttgaatttaggatgtagagtaagtcgagattgtgttattgtattttagtttggatgatagagttagattttgttttaaaataaaaataaaaaaatttttattaatgtcgttttattttagttatagggtattattttggattatagtttttgtattgtgttttttttttagagataaggttttgttttgtcgtttaggttggagtgtagtggtgtgattatagtttaatgtagttttaatttgtagagttgaaggtatttttttgttttagttttttaagtagttaggattatgggggtgtgttattatgttttgttaattttttagagatgaggttttaaaattttagttttaagtgatttatttgtttcggtttgttaaagtgttgggattataaggtttttttttttttttgagaggaggttttattatattgtttagtttggttttaaatttttggtttcggttaggcgcggtggtttatatatgtaatttagtattttgggaggttgaggtaggttgattatttgaggttaggagtttgagattagtgaaattttatttttattaaaaatataagaaaattagttgggcgtggtggtgtttatttgtaattttagttattggggtggttgaggtacgagaattttttgaatttgggaggcggaggttgtagtgagttgagattgcgttattgtattttagtttgggtgatagcgcgagattttgttttaaaaaagtaaaaaatataaaataaatttttggttttaagttattttttttttttggttttcggaaatgatgggattatagatatgagttattgcgttttgttggaatttaggtttttgtttgttttttttaatattttttttagattttttttatttaggttaatttgagtgattttttttttttttttaattttttttaggggattcgaagttttatttttggttttatttagttgagggttttgagtgttgaggttttttagggtaagtgagcgagcgggtgggaggtgttgggggttggaagtagggggttagtttttttttgggtttattttagggaggttttttttttttttttttttttttttttttttttttttttttttttgagatagagtttgattttgttgtttaggttggagtgtagtggtataattttggtttattgtaatttttgttttttaggtttaagtgattgttttgttttagtttttcgagttgttgggattataggaacgtattattatattcggttaagttttgtattttttagaggtagggtttcgttatgttggttaggtaggttttaaatttttgattttaagtgattttttcgtttcggttttttaaaatgttgtgattataggtataagttatcgtattcggtttttagtatttttttttatgttttttttgtttagaagtttaattttttttgattaggattgaggggttttttttttttgtgttttaggtaagttgtatttatggtatttttaagtgaagagacgtttttgattttttagcgtttatgtagttttttgtttacggaggttggtgttttgtatgtgttgttgttcgttcggggtttcgggtttttttagcgtttattttttttttttggggattatttggttgaggatttgtgcgtgtaggttgttaaggttagcggtgagtgtatttttagtggatcgggttagagggaaggatggggttgtgtggggttaagattggaagttggaatagttgtttgtagaagttagtatcggagttggggttttgggggatgagtaggagttttgtaatggagaagggtgtgtagggttggtttttgaggtagagggaatggtttgtgtagacggagaggtgtgacggtatatgaagggaatagttggttatattttgaggtatggaaggatttggacggttgggtatgatgttggtatttttgaagggtatagatggggtgatttaggagggagttgatgggattattttttgtaggtattttgtttgtgtattattttttttttgttttggttacggaggatttgttttgttggtttttttcgagttatatttttttcgtggaggatgttagtatttaagttttgttgtataggattcggtaggaagtgttttttagtttttagggattgtataattttattatttttttgtatttcgaggtgtttatatttttgttttagggaggtatggttattatttattttttagatgaggaaatagattagagagggtgggttatttgtttaaggttatatagtaagttaaaggtataagttgggttttgtgaggttttcgtagaatttgtttttcgtttttattataatgttatttttattgaggttgggttgtatttttattttagggtttttttttttttttatagtttttatttttttaattggtttgggttggagaagtgttatcgtttcgggttacg

SEQ ID NO: 152 - DNA, 6036 bp, Artificial Sequence
  chemically treated genomic DNA (Homo sapiens)
cgtagttcgaagcggtggtatttttttagtttaaattaattggggaagtaaaagttgtgaggagaggagagaattttgggatgaaagtgtaatttagttttagtaggagtgatattatggtgggggcgagggatagattttgcggaggttttatagagtttagtttgtatttttaatttgttgtgtgattttgggtaagtgatttattttttttggtttgtttttttatttgagaaatgggtagtgattatatttttttggggtaggggtgtgggtatttcgaaatgtaaggagatgataaaattgtataatttttgggggttggggggtattttttatcgaattttgtatagtaggatttgggtgttggtattttttacggagaagatgtggttcggggggaattagtaggataggtttttcgtggttagagtaaagagggagtggtatataggtaggatgtttataggggatggttttattagtttttttttgagttattttatttgtgttttttaggagtgttagtattatatttaatcgtttagatttttttatattttaaggtatgattagttgttttttttatgtgtcgttatattttttcgtttgtataggttattttttttgttttagaagttaattttgtatatttttttttattataaaatttttatttattttttaaagttttagtttcgatgttgatttttgtaggtaattattttagtttttaattttggttttatatagttttatttttttttttggttcgatttattagggatgtatttatcgttggttttggtagtttgtacgtataggtttttagttaagtggtttttaaaggagaaagataggcgttgggggggttcggggtttcgagcgggtagtagtatatgtagggtattagttttcgtggataagaggttgtatgaacgttgagggattaggggcgtttttttatttggaggtgttatgagtgtaatttgtttggggtatagagagaaaaagttttttagttttggttagaggggattggatttttgagtagggagggtatggaaaggagtgttggaggtcgggtgcggtggtttatgtttgtaattatagtattttgggaggtcgaggcgggaggattatttgaggttaggagtttgagatttgtttggttaatatggcgaaattttgtttttaaaaagtgtaaaatttagtcgggtgtggtggtgcgtttttgtaattttagtaattcgggaggttgaggtaggataattatttgaatttgggaggtagaggttgtagtgagttaagattgtattattgtattttagtttggataatagagttagattttgttttaaaaaaaaaaaaaaaaagaaagaaagaaagaaagaaagaaggaaagtttttttgggatgggtttaggaggaaattggttttttgtttttagtttttaatattttttattcgttcgtttatttgttttgagaaattttagtatttagggtttttagttgggtggggttaggggtggggtttcgagttttttgagaaaaattggggagaaaaaggaggttatttaaattgatttgaatgaagaagatttgaagaaagtgttgggaaaaataaataaaaatttaagttttagtagggcgtagtggtttatgtttgtaattttattattttcggaggttaagaaggaaggatagtttgagattaggagtttgttttatgttttttgtttttttgagatagagtttcgcgttgttatttaggttggagtgtagtggcgtaattttagtttattgtaattttcgttttttaagtttaagagattttcgtgttttagttattttagtagttgggattataggtgggtattattacgtttagttaatttttttgtatttttagtagagatggggttttattgattttaaatttttggttttaagtgattagtttgttttagttttttaaaatgttggattatatgtgtgagttatcgcgtttggtcgagattaggagtttgaaattagattgggtaatatagtgagatttttttttaaaaagaaaaaaaagttttgtaattttagtattttgataggtcgaggtaggtggattatttgaggttaggattttgagattttatttttaaaaaattagtagggtatggtggtatatttttatagttttagttatttgggaggttgagataggaggatgtttttagttttgtaagttgaggttgtattgagttatgattatattattgtattttagtttgggcgatagagtaagattttatttttagaaaaaaaatataatataaaaattatgatttaaaataatgttttgtggttggggtggggcggtattaatgagggtttttttgtttttgttttgagatagagtttagttttgttatttaggttggagtgtagtggtataatttcggtttattttgtattttgggtttaagtgatttttttgttttagttttttaagtagttgggattataggggtacgttattatgttcggttaatttttgtatttttggtagagacggggttttattatgttggcgaggttggtttggaatttttgatttcgagtgatttttttgtttcggatttttaaagtgttgggattatcggcgtgagaaattgcgtttggtttaatgaggtttaagataattagaggattaggatttttaggatttagttttcgtagttgtgaaatgggttgattttttagtatttttattgaggtggtttgttgagcgtaatttaggtttaaagtgttaatttaattaatgtgtattaatttgtatattttttgatgatgtgtcggtaagcgattaataaacgtttgttaaattaaataggaagggtaattggtatagcggtgtggtggttattgtgggaagggaagttttgtgggggaaagaattttattaaagggatattttgatgttatcgatgtttagattaagaatgagtatatttttagtttcgggaattttggaggagttttattttttttatagagagattgatgtttagttttgttttttatagaaataaaattatatattatagtttttttatcgtttttttaatattagttaattaagttttttggtttgtttgtttgtttttttgagacggagtttcgtattgttatttaggttggagtgtagtcgtacgattttggtttattgtagtttttgttttttgggtttaagcgatttttatgttttagttttttaagtggttgggattataggcgcgtattatagcgtttagttaatttttgtatttttagtagagacggagttttattatgttggttaggttggttttaaatttttggttttaggtgattcgtttgttttggttttttaaagtgttgtgattatatacgtgagttatattgtttagtttttttatttatttatttattttgtaggggggaggacggatttttgttttgttttttaggttggagtgtagtggtatgatttcggtttattgtaaattttattttttaggtttaagcgatttttttgttttagttttttgagtagttggaattataggtattcgttattaaatttggttaatttttgtgtttttagtagagatagggttttattatgttgattaggttgatttcgaatttttgatttttagtgattcgttggttttagttttttaaagtgttgggattaaaggtatgagttattgtgtttagttttagtcgagtttaaaataaggttttagtggtagtggcgttttattgtaattttagttatttagggggttgaggtagtaggatagtttgaggttaggggttagagatttgtttgaataatatagtaagatttttatttttaaaataataaaaaaattttaatagaatattattattttgtaatattgtaataaaaaaaaatgaaaagttagaggtgatgtttggttttagaaaacgttatagtttttttggttttttaaaaatgtttgtagaaatggaggtttggttatgttgtttaggttggttttgaatttttggttttaagttattttttcgtttcggtattttttgtttataatttttaacgttttgtattttggtatggtcgggtattttgtgtttggatcgggaaggtttggagggtaggggttgggaatttcgttttttaattttttttttttaattttttttttttatttttaatttcgtagttttcgtcgcgtatgcgtaatgatttttttaggttcgtaaggtaggtatttttcggttttagttaaagtcgaagtttagagaagcgagcgatcggaggatgcgagtttcggtttacgtttgtttcgtagttttttttcgaggtttggaaggcgagttagtttttgttttggtagtattttgttttagtttagttatttttcgttattattatttttttttagtgtttgggtcgagttttgcggtatcgttagtttttatttagcgggtagggattttggattttcgaagggcgggtagagtcgggaggtagcgagaggaaagttttattcggtttttttttgtgtgggttttttggttttttgagttattgttatttatcgaaagttagggttttgcgggagttgggggcggggaggcgggtaaggaggggtagaaagtttcggaagtttttgtattagtcgtttcgtttagataggttgttggagatttttaagttaaaggaattgatgatagtatagagaagggtttgggttatattaggggtttagtcgattttagatttatttgttaagtggggttttggttcggtttttattgttttagtttatttatttgtagtatgtgtgagttgggtatttagtggaattaattttgtatttagggaaggaaatttggttggatttgtttaggagggaagtagggaagttgttttagaggaaggttaagtttttttttgaggtattttttttttaagatttagggagacgttgggcgtagtggtttacgtttgttattttagtattttgggagattgaggcgggcgattatttgaggttaggagtttgagattagtttagttaatatggcgaaatttcgtttttattaaaaatataaaaattagttaggcgtggtggtttgtaatcgtagtattttgggaggttgaggcgggcggattatttgaagttaggagtttgagattagtttggttaatatgatgaaattttgtttttattaaaaataggaaaattagttaggtttggtgatgtttgtaattttagttatttaggaggttgaggtgggaggattgtttgaatttaggaggcggatgttatagtgagacgagatggcgttattgtattttagtttggtaatagagcgggatttcgtttaaaaaaaaaagaaaagatttagggagagataatgatttatttttgtttgtggtgttttgggtttagttttaaaaaattaggtggattcggtttggttttttggaatttgtgatttggcgttgagataatgagtaaatgaaggagttaaattatcgtagataataaagaaagttagggtgttaggataggtatagattggaatttggattcgaggtaggatagggagttggttagggaaagggtgttttaggaggagggtataggatgggtaaagattttgagagggtagtgattttagtagtttgaagagtagttaggaggttaggggtaggggtgagatgagggggaaggggattgtagggcggttaataggggtaagatcgtggggggatagggggattagggtttttgggagaagggtgggttttgtttggagtataatttggagttataggagagttggaagtaggagttgttataaatagaagaggtagaaggttcgggtagtatttaaatgtagagatttgggttagtgtttttaggataataggattagagtttcggaagtagagttttaggaatagattgacgaagtggtgatcgggtatagtggttta

SEQ ID NO: 153 - DNA, 9204 bp, Artificial Sequence
  chemically treated genomic DNA (Homo sapiens)
aaataaatgaatatggaaagaaaaatatagtaaatatgataaagttgttaatgtaaatatgtaattaataaatggttatatttaaaaatataatagtttttagaaaagagagttgatgttttttataatattttttatttgtaaaagtaatatttttttggtttgaaaaaaattatagaaatatatgaagtaaaaagtatatgtttttatttttttgtttttgtgttttaattatttttttaaggtaggtatttttttggtgtgtatttttttagatattttttgtaaaattttttattatgtatgtatgtttttatgtattttttttttatatttatatttatattttaaagaaatatagaaaatattatttttttttttagttagtgtgttattttgttatttagggtggaatgttgtggtgtaattatagtttattgtagttttagttttttggtattaagtaatttttttgttttagttttttaaattgttgggattataggtatgagttattatatttggttaggaaatatttttgaatagttgatgtttttaggcgatgaaggtatgtgtggaagatatttgatgaaaggttttggtaataagtattttaaggaagaaaattaaatatttattgaatttttattattattattattattttatattttatagagtatttttatgagatgattttatttgagtttcgtaatagtttttaaggtaggtaagaattattatttttattgataaatgatgaagttgttgtttgaaatgattaaaagataatgtttaaggatattttaaatttttatttttattaaattaaggaaaagataatggaaaagttagtgttgtattggtttgggtatttttttgattatagttatttaaaatagatttttttttttttaattatggaaatttttaaatacgtaaaagtagagagaatagttaaatgaatttttaagtattattgtttaatttttatagttattttttttaatttttttaaaattatattttaagttttaggtttaatgtgtaggtttgttatatatgtatatatgtgttatgttggtgtgttgtatttattaattcgttatttatattaggtatattttttattgttattttttttttttttttttattttataataggtttaggagtgtgatgtttttttttttgtgtttatgtgtttttattgtttagtttttatttatgagtgagaatatgtggtgtttggttttttgtttttgcgatagtttgttgagaatgatggtttttagttttatttatgtttttataaaagatatgaatttatttttttttatggttgtatagtattttatggtgtatatgtgttatatttttttaatttagtttattattgatggatatttgggttggttttaagtttttgttattgtgaatagtgtcgtaataaatatatatgtgtatgtgtttttatagtagtatgatttataattttttgggtatatatttagtaatgggatggttgggttaaatggtatttttagtttagatttttgaggaattgttatattgttttttataatggttgaattagtttatagttttattaatagtgtgaaagtgtttttatttttttatatgttttttagtatttgttgttttttgattttttaatgattgttattttaattggtgtgagatgttattttattgtggttttgatttgtatttttttgatgattagtgatgatgagtatttttttatgtgtttgttggttgtataatgtataaggtgtaaggaagggatttagttttagttttttatatatggttagttagtttttttagtattatttattaaatagggaattttttttttattgtttgtttttgttaggtttgttgaagattagatggttgtagatgtgtggtattatttttgagggttttgttttgttttattggtttatatttttgttttggtattagtattatgttgttttggttattgtagttttgtagtatagtttgaagttaggtagtatgatgtttttagttttgtttttttggtttagatttgttttggtaatttaggtttttttttggttttatatgaattttaaagtagttttttttaattttgtgaagaaagttattggtagtttgatggggatggtattgaatttataaattattttgggtagtatggttatttttacgatattgattttttttatttatgaatatggaatgtttttttatttgtttgtgtttttttttattttattgagtaatggtttgtagttttttttgaagaggttttttatattttttgtaagttggatttttgggtattttattttttttgaagtaattgaatttttatagttattaatttttgataaatttttatataatttgttaagatatggagtttaaaatattgttggtaatgtaattaaatttggagattatggagagtaatttatgtagtgtgttttgagtatgaataatgtatattttgtatgtataagtttagaaaagtagttggagataagaagtgtttaaagattaaattaaatttgttttgggtgaggttattataatgattttttatttaagtttattttgatattatttttattatcgtaattttagtttttggtttaatgtttagtatatagtaggtgtttaaaaattgttgaatgaatgagtttgtttagtagtttagattttagtagtatgaagaagtttatgtattgtagtataagtaatttttgtagaatgttttttaatgtgtatttggtgttttttatgtttaagatttttattagttgtgttggggtttattttaagtgttttatatgtagtaatttttttaatttttgtaagaattttatgaagaaggtattattataattttttttgtgttttatagataagttatttgtaagttggtaaagattatatagattataagcggtagatttgggaataaaatttagagtttgtgtatttagttattattttgttgtggtatttgaatagtatttatggaatatttaatatatttggggtattttgttaggtgttttattgttgggttaatttataaaagttatttttttgtaatgttagataacgagagggtgttgtatatggaatagttttttttttttttttttttattttttttttttttaatagattttgttattttttttgtgaatttaaggtatttttaagtgttgtgtgggagggaatgtggtagattgattttattgagattttgttaaattttggttttgcggttattaaagacgtattattttttttaagatttttaaagggggttattattacgggtttgtaggttttggtttgtatttagaggagatattatttttttaaatgagatatggaagaggaagtgttatgaattgtaaataaggttgatagggaattgtttggtgatggggatggagaaaaattgttttttttaaattaggttttattttttatttttttatttaattttgttagagtttattttattttatttgttgagtttattagtaggaagagaggagtttttttaaagatttttttttttttttaaataaatattttttagataaatatgagtatatttatatagtagagtattatgttaatattgaaaagatggaaggatggagttttgttcgtagttagtttaggtaatatagtgagattttgtttttatataaaaataaataaataaataaataaataaataaataaataaaagatggagttttaaaggttgatgtagaacgaatttttagtgtatattataaagtgaaggttgggtagggtggttcgtgtttgtaattttagtattttgggagattgaggtaggaggatggattgagtttaggtattggagattagtttgggtaatatagtgagattttgttttaaataaataaattaaatttaaagggaaaaaagttaaggtttaaatagtatttatattaagtaattgtgggaagagaagggtgatatgtttatatatttgtgtttaagaatttgtttggaaaaaaaaggaaatataaaaatgtttttgttaaaagaaaagtttttttattttaagtttttttgtgtttttttaaaatttttttttgttatatatatttattatattttagtattaaaatattttatttgttaatttggaaaagtaaaagcgtgaatatagtaaatatttaaaaatagatgaagataagtaataggttatattaattgtatataattaatttagtttgaattaggtgtagatataataattttgtgtgtttattttggtgaagaatggttttttaggttgttattaaaaagtatttttgggaggtaaaagatataggtatttggaagatttatatttaatgaagttaggggatatttgatgttattttttaggtgtggggagatatggatagaaaattagaaggaacgaatgtggttaggaaggaattggagtttttttttaaatagttgttataagaagtttatatacgtggagatagttgtgattagaataaagttgtgttttggatgttttttttggcgatttgggttagagtagtttagttgtgtgcgaaatgggaatataaatggtttggggagttgatatagacgcgagatattcggatgaggggcggattggtcgaacggagagtttttttttcgattcggtttcgtttcgtatggtttcgttttcgcgttttagagtttcggtattagtttttattttgtattgagtttcgggatttcgggagagcggttaatgtgtggtcgttgcgttttttttgtttgcgtcgggtattatttgcgcgtcgtagaaagttcgtttggtagtttggatattttttttaatcggtattcgtagacgtttttgtagtcgcggtcggcgttcggttttttagttttgtgcgtttaattgttttgcgttgcggggtgtcgcgagttttattttcgcgtttttttttttagataggcgttgggagaaagaatcggttttcgagttttgggtatttcgttcggttcgaggtgtaggatgtagagtaaggtgttgttggtcgtcgttttgtggttttgcgtggagattcgggtcgtttttgtgggtaaggagtttattttggaggaggaaggtagataggtcgggtgagggcggagaggatttgaaagttagatttaattcggaatcgtagagttggagagttggataggatttgatattttgcgattttttatttattagtggggaaattgaggtttagagattggtttaagattatttagcgagtttgtggtcgtttgtgttttagtttagttttttttttaggattttggtttgcgatagggatttcggttggagtatgttttgagatgtcgatatatttttaggtttttgggaggttggggtgggaaggcgtttggggttggtaggtaggaggtgttttcgtaggcgagaataggcggtgaaaagttgtttggttgcgcgtaatattttagttcgggttcggggaagaaaattttgtcggaattttaggtcgggtttttcggatcggacggtatattcggttttgtttttttggggattcggttcgttgttgtttttatgttcgaatatatttgtatattattgtgtgaagtggggtttggagcggagagaaattttttttttttttttggtgtaggacgtcgttttttttgtagagcgaagaagggggggaatagggatttgttttgggggttttgatagtttttttaagggtttttaagtaatagttaattgttttgcgtaaagtattgtatattttttaaagcgttgtggtttttggtgtaagcgtatagttagaagtttaagtttcgaaaattttttttgtgggttttggtatttagttttagtgttatttttttttttttttgtcgtttaaaattttcgttttttttaattaggaatatatacgttttttatgtaatagttgtttgtttttttttttttattttttttttttttttaattttttagataatattttttttttgtagttagtttgttgatatttagatttttattttttgtagggtgagaaaggggaaagggttagagaaagaaaaaaaaaaagtcgaataatttagggaaaaaaattttttattttttaagataagaattatatgttttagaagatatttatatttatatatagtattaggattatttgtttatggttattgaattttttttataatgatttggtttaacgggtttagtttattatggatatttatttgttttagataagttttttttttttttttttttgggtagagaatgaaggtttggaatatgtggttgttttgtattttataaagaagtgagttgtttttaagtttggggtgttttttagcgtagtagtaacggtaggtcggtcgttttgaatataatggtgaatttgtttttttggagtgtattatttgtttaattggattgggttgtaattggtgttattaaattttagagatagaggtattgttgtttttttttttcgtttttgagttggaagggtaatagtgtataaattaattaatattggttatgggatttgaatatagaagggttttttattgagtagtagtatgtgtattttttatagttatttttttagaattttttgaagagtttagtttaagtttgttaatgaaaacgaatgatatttaatggagtaaaaataaaaaataaaaaattatgttggtttataaatatgaatttgaagttattgagagttttgttgaatagatttttgttgtaaacgtgtttttagaatagtatggtatagttttagttttttatgaatgaaggatatatttttttttttttaaaatatttgttatataggaaagtgtgtttagaatgtgatttgtggtaataaattatgagagatttttaagagtttttgattttggtagtcgagtgggtatagtttattgagaattatttttattgttatttgtttttttataagaatgtgtttaaataatggttttttttttatttggatggtagtgtgaattgtatattatgtttttagtattttttttaatttagtgttttttagttaagtttgaaatttgtgttatttaaatgaattgtttttatttttttttttttagataaagtgggattttaggttttattttgtttttaaatattttggttttttgtttgtttgttttgggggtagttattttttttatattaaaaagtattgtgtaggttgggtgtagtggtttatttttgtaattttagtatttagggaagtagaggtaggaggatcgtttgagtttaggagtttaagaagtgtttgggtaatatagcgagattttattttttatttaaaatataaatgtaattttcgttttacgtataaagtattgtgtaaattaattaaatatgattatttagattagtaattgtttaagagtggtttatagattatttgtggtaggataatttgaaatgtttgttaaaatgtagatttgtagatttagggatattttgatagagtttaaagttttaagaataaaattgttttaaatataagttagtattaatgttagttaatttttgagatatattgatataatttagtttttagttttttaaaaattatattattgatttaaaaattatgatattgattagttatgttagtaatttattttgtatatttgtgtggtgtgtgagaatatgtgtagttatttatttattttgtttgtatttgtttatattgggatttttagatttaatgtattggatgtttgtattgggtatttatttatattttttttatttatttcgttttatatttcgttttatttgtttatatttttttatttgtttagtaaggttaatgttagtttaggtttagggagttatttttttttagttgatatgatttagaaagtttgggagtttgtttaatattaattatttttttaaagttggtattttttaggttttgatatttattaagattttagtatagtggataattttttttttttttatgtttttttaatattttatagttttttatatttagttgatagagaatttagttattttgttgtagagtgatttatggtgaggaatttatgttatggtatttttttggtttttattttttataggtaaagataagttttttatgtttgaagtttgatgttaggatgagtttagggttttgatgaataagtttagattttttaattgtaatttattagtattgtatttaaaaaaatttatatacgtttttaaaaaagggtaatgttaatgaattataatagagagaaaagtatattagtttgtatgtatgtgtgaaattgggaaaattttttacgaaaatatttatatattttttaaaaaaagggtaatgttaatgaattatagtagatagaaaagtatattaatttgtatatatgtgtaaaattgggaaaattttatatatatataaaagtatattaatatgtatgtatgtgtggaattggggaatgtttttttttttttagttttttttttttgtttttaatgtatagtttttatgagttattattttagttgtggtagtttggttattaggggaagcgtattagaaaattgataaaggaaaatgagataaggttatagatttttttattttttttagggtacgtagatgaattatataaaaattcgtttaagtgggattcgttaattagtaatttagttaaatgtgtatattttatgttttataagaaatgttagtgggtttttttttaagggagtgagattattagatgaaggtttatttggttttaatgtttcgtatttttttgtaagattttgaagttggtaatgtaggaaaataggaattttattttagttttatgaattgtagaattgttgtgttggtttatgattatttgtttattttttttgttatgatatagtttgtgaatttttattgagaatggtgaaaagtaaatttttagttttatataatgaattgttgaagaggttttttaaagtatagagtatgtattgtttatggaaggtgttttttattaggtttaatttagtggtaattatatttatttatttaatttgtttttagg

SEQ ID NO: 154 - DNA, 9204 bp, Artificial Sequence
  chemically treated genomic DNA (Homo sapiens)
tttagaaataaattaaataaatgaatgtagttgttattgagttagatttaataggaaatattttttataaataatgtatattttatattttaaaaggtttttttagtaatttattgtataaaattgggaatttattttttattatttttagtaaaagtttataagttgtgttataataggaagaatgggtagatggttataaattaatataatagttttgtaatttatggagttagggtggagtttttgtttttttgtattgttaattttaaggttttataaaaggatacgggatattgaaattaaatgaatttttatttgatgattttatttttttgggaaaggatttattgatattttttatagaatataggatgtatatatttgattaaattgttgattaacgaattttatttagacggatttttatatagtttatttacgtattttgaagggagtgagagaatttatgattttgttttatttttttttattaattttttagtgcgttttttttggtaattaaattgttatagttgaaataatggtttataaagattgtatattaaaagtaagggagagaaattgaggaagagaaaatattttttaattttatatatatatgtatattaatatatttttatgtatgtgtggaatttttttaattttatatatatgtgtaaattaatatatttttttgtttattgtaatttattagtattattttttttttaaaaagtatatgaatattttcgtgaaaaatttttttagttttatatatatatgtaaattaatgtatttttttttttattgtaatttattagtattatttttttttaaaaacgtatataaatttttttaagtgtaatgttaatgaattataattgggagatttgaatttatttattaaagttttgaatttattttgatattaagttttagatataagaaatttgtttttatttataagggataagaattagaaaagtattatggtatagattttttattatgggttattttatagtaagataattgaattttttgttaattaaatgtgaagagttatgaggtgttgaaaaagtatgagagaaagaaaaattgtttattatgttagggttttaataaatattaagatttagaaaatattagttttaaaaaagtaattgatgttgggtaggtttttaagttttttaagttatattaattaagaaaaaatgattttttaggtttaaattggtattgattttgttgggtaaataagagagtatgaataaataggacgaagtatgagacggaataaatagagagagtataagtaaatatttagtgtaaatatttagtgtattgaatttgaggattttaatatgaataaatgtaggtaaaatgaataagtgattgtatatgtttttatatattatatagatgtgtaaaataagttattgatataattggttaatattatggtttttaagttaataatatggtttttaaaaaattggaaattaagttatattaatatattttagaaattaattggtattggtattgatttatgtttagaatagttttgtttttaagattttagattttgttagaatatttttgggtttataaatttgtattttaataagtattttaaattattttattatagatggtttatgggttatttttggatagttgttggtttgggtggttatgtttaattaatttgtatagtattttgtgcgtggaacgggggttatatttatgttttaaatagagaatggggtttcgttatgttgtttaggtattttttgaatttttggatttaagcgatttttttgtttttgtttttttaagtgttgggattataggaatgagttattgtatttagtttgtatagtattttttaatatgaaagaaataattgtttttaaaataggtaaataaaaaattaaaatgtttaaaagtaaaatgaaatttggagttttattttgtttaagaaaaggaaaatgaaaataatttatttggataatatagattttaaatttgattggggaatattaggttgagaaagatgttgaaaatatgatgtataatttatattgttatttaaatgagaaaaaaattattatttgggtatatttttgtgagaaaataaatggtagtaaaaatgatttttaataaattgtgtttattcggttattaaaattagaaatttttgaaggttttttataatttattgttatagattatattttagatatatttttttgtgtaataaatattttaaaaaagaaaaggtatgttttttatttataggaagttgagattatgttatattattttagagatacgtttataataaaaatttatttaataaggtttttaataattttaaatttatatttgtagattaatatagttttttgttttttgtttttgttttattaaatgttattcgtttttattggtaagtttgagttggattttttagaaagttttaaagaaataattgtaagaggtatatatgttattatttaataaaaagtttttttatgtttaaattttataattaatattaattaatttgtgtattgttatttttttagtttaaagacgggaaggaaaaataatagtgtttttgtttttagaatttgatggtattaattatagtttaatttaattaagtaagtaatgtattttaaaagggtaagtttattattatatttagggcgatcggtttgtcgttattattacgttaggaaatattttaggtttaaaagtaatttatttttttgtggaatatagagtaattatatgttttagatttttattttttgtttagaaagggggagagagagggtttgtttgggataaatgagtgtttatggtggattggattcgttgaattaagttattataaagaaaatttagtaattatggatagatgattttggtattgtatgtgggtgtgagtgttttttaagatatgtgatttttgttttagggagtaagaaatttttttttttgaattattcgattttttttttttttttttttgattttttttttttttttattttgtaaagggtggaaatttggatattagtaaattggttgtaggaaagaaatattatttaaggggttgagagagaaaggaaagtgaggaagaaaagatagatagttattgtatgaagaacgtgtgtgtttttaattgaaggagacggaaattttaggcggtagggagaggaaggaatggtattaaagttaggtattaaggtttataggaaaggttttcggagtttgaatttttgattatgcgtttatattaaggattatagcgttttgaaagatgtgtaatgttttacgtaggatagttggttgttatttggagatttttggggaagttgttaaagtttttaggataagtttttattttttttttttttcgttttgtaaggagagcggcgttttgtattaaggaaggaaaaaaagttttttttcgttttagattttattttatatagtggtgtgtaagtgtgttcgagtatgaagataataacgggtcgggtttttaaagaggtagaatcgagtgtatcgttcgattcgggagattcggtttgagatttcggtaaggttttttttttcgggttcggattaggatgttgcgcgtagttagataattttttatcgtttgttttcgtttgcggaggtattttttgtttgttaattttaggcgtttttttattttagttttttaagagtttgagggtgtgtcggtattttaggatatgttttagtcgaggtttttgtcgtaaattagagttttagaaaaggaattgggttagagtataggcgattatagattcgttgggtaattttgggttagtttttgagttttagtttttttattggtaaatgaaagatcgtaaaatgttaagttttgtttaattttttagttttacgatttcgagttagatttggtttttaggtttttttcgtttttattcgatttgtttgttttttttttttagagtgggttttttatttatagaggcggttcgggtttttacgtagagttatagggcgacggttagtagtattttgttttgtattttgtatttcgagtcgggcgaaatgtttagaattcgggagtcggtttttttttttagcgtttgtttagagaaggaggcgcggaggtggaattcgcggtatttcgtagcgtaggatagttgagcgtatagggttagggagtcgggcgtcgatcgcggttgtaggggcgtttgcgggtgtcggttagagaggatatttaggttgttagacggattttttgcggcgcgtaagtgatgttcggcgtaggtagaggaaacgtagcgattatatattgatcgttttttcggggtttcggaatttagtgtagggtgggagttggtgtcgaaattttagagcgcggaggcggggttatgcggggcggggtcggatcggaggaggggtttttcgttcggttagttcgttttttattcgggtatttcgcgtttatattagttttttaagttatttatatttttatttcgtatataattggattgttttggtttaagtcgttaggagagatatttagagtataattttgttttggttataattgtttttacgtgtgtggattttttgtggtagttgtttggaggggaattttaatttttttttgattatattcgttttttttggttttttgtttatatttttttatatttggggagtgatattaaatgttttttaattttattaaatatgaattttttagatgtttatgttttttattttttagaggtgttttttaatgataatttaaaggattattttttattaagataaatatatagaattattatatttatatttaatttaaattagattgattgtatataattaatgtaatttgttatttatttttatttgtttttaaatatttattgtatttacgtttttatttttttaagttgataggtgaaatattttaatgttgaaatataatgaatgtatatggtaaaaaaaaattttggaaaaatataaaaaggtttagagtgaaaagattttttttttggtagaggtatttttatgtttttttttttttttaagtagatttttaaatataagtatgtagatatgttatttttttttttttataattgtttggtataaatgttatttgagttttggtttttttttttttaaatttgatttatttatttgagataaggttttattatgttgtttaggttggtttttaatgtttggatttagtttatttttttgttttagttttttaaagtgttgggattataagtacgagttattttgtttagtttttattttataatatatattggagattcgttttatattaatttttaaagttttattttttatttatttatttatttatttatttatttatttatttttatatagaggtagggttttattatgttgtttaagttggttgcgaataaagttttatttttttatttttttaatgttggtatagtgttttattatatagatgtatttatatttatttgggaggtatttatttggggaggggagagaatttttaaagaaatttttttttttttgttagtaaatttagtaaataaaataggatggattttggtaaagttggataaaggggtgggagatggaatttggtttggagagggtagtttttttttatttttattattaaataattttttattagttttatttatagtttatgatatttttttttttatgttttatttaagaagatagtgttttttttgaatgtaaattagaatttgtaggttcgtggtaatagttttttttagaagttttggaggaaatgatgcgtttttgatggtcgtaagattagaatttggtagagttttaatgaaattagtttattatatttttttttatatagtatttagaagtgttttaggtttataaaaaaaatggtaaagtttgttaaaaaaaaaaaagatagaaaagaaagaaagaaaggttgttttatgtgtagtattttttcgttatttggtattgtaaaggagtgatttttgtgagttaatttaatagtaaggtatttagtaaagtgttttaaatgtgttgagtgttttatagatgttatttagatgttatagtagagtagtagttaagtgtatagattttggattttatttttagatttatcgtttatgatttgtgtgatttttattaatttataagtaatttatttatgaaatataaaaaaaattataatagtattttttttatagggtttttataagaattaaaggagttattgtatgtaaggtatttggagtaggttttaatatagttagtaaagattttggatatagaaagtattagatatatattaagaaatattttgtaaaggttgtttatattataatgtatgggtttttttatgttgttgagatttaaattgttaagtaggtttatttatttaatagtttttgagtatttattatatgttaggtattgaattaggaattggggttacgatggtgaaaataatgttaagatgagtttaaatgaggaattattgtaatagttttatttaagataaatttaatttaatttttaagtattttttgtttttagttatttttttgggtttgtatatatagaatatatattgtttatatttaaagtatattgtataaattattttttatgatttttaaatttggttatattattaatagtattttggattttatgttttaataagttatatgaagatttgttaaaggttaataattgtggaagtttaattgttttaaagagaataaaatatttaggaatttaatttataggggatgtgaaggatttttttaagaagaattataaattattgtttaatgaaataaaagaggatataaataaatggaagaatattttatgtttatggataggaagaattaatatcgtgaaaatggttatattgtttaaggtaatttgtagatttaatattatttttattaagttattaatgattttttttatagaattggaaaaaattattttaaagtttatatggaattaaaaaagagtttgaattgttaagataaatttaagttaaaagaataaagttggaggtattatgttatttgattttaaattatattataaggttatagtaattaaaatagtatggtattggtattaaaatagagatatagattaatggaatagaatagaatttttagaaataatattatatatttataattatttgatttttaataaatttgatagaaataagtaatggggaaaggattttttatttaataaatggtgttgggaaaattggttagttatatgtagaaagttgaaattggattttttttttatattttatatattatgtagttaatagatatatgagaaaatgtttattattattggttattagagaaatgtaaattaaaattataatgagatagtattttatattagttagaatggtaattattaaaaagttaggaaataataggtgttagagagtatgtggagaaataggaatatttttatattgttggtgggattgtaaattagtttaattattgtggaagatagtgtggtaattttttagggatttaaattagaaatattatttgatttagttattttattattgggtatatatttaaaggattataaattatgttgttataaagatatatgtatatgtatgtttattgcggtattatttataatagtaaagatttggaattaatttaaatatttattaatgatagattggattaagaaaatgtggtatatatatattatggaatattatgtagttataaaaaaggatgagtttatgttttttgtagggatatggatgaagttggaaattattatttttagtaaattatcgtaaggataaaaaattaaatattatatgtttttatttataggtgggaattgaataatgagaatatatggatataggaaggggaatattatatttttgggtttgttgtggggtggggggaggggggagggatagtagtaggggatatatttaatgtaaatgacgagttaatgggtatagtatattaatatggtatatatatatatatgtaataaatttgtatattaaatttagaatttaaagtataattttaaaaaaattaaaaaaaataattgtggaagttgaatagtggtatttaaagatttatttgattattttttttatttttacgtgtttgaaagtttttatgattaaaaaaaaaaaaatttgttttaaatgattgtaattaaagggatgtttaggttaatataatattaatttttttattgttttttttttgatttggtgaaaataaggatttggaatgtttttgagtattattttttaattattttaggtagtagttttattatttgttaatgaaaataataatttttatttattttaaggattgttacgagatttagatgagattattttatggaagtgttttataaagtgtaaaatggtgatggtggtaataaggatttaatagatgtttaatttttttttttaaagtatttgttattaaggttttttattaggtgttttttatatatatttttatcgtttaagaatattagttgtttaaaaatattttttggttaggtatggtggtttatgtttgtaattttagtagtttaggaggttgaggtaggaggattgtttgatgttaggaggttgaggttgtagtgagttatgattgtattatagtattttattttgggtgatagagtgatatattgattaaaaaaaaagatagtattttttatatttttttgagatatagatatagatatagagaagagatatatggagatatatatgtataatagaaaattttgtagaaaatatttagaagggtatatattaaaaaaatatttattttggggaaatgattgaggtatagaggtagagggatgagaatatgtattttttgttttatatatttttataattttttttaaattaagaaagtattatttttataaataaaaaatattataaaagatattaatttttttttttaggggttgttatatttttaaatatgattatttattgattatatgtttgtattgataattttgttatgtttattgtatttttttttttatgtttatttattt

SEQ ID NO: 155 - DNA, 5901 bp, Artificial Sequence
  chemically treated genomic DNA (Homo sapiens)
gcgtgttagtgttttgtagggagtggttagtatgtggtgatttttagggatttcgaggtagcgtttgtttggttgattttgtttaggttggggttttcgtttattttgtttcgtggttgacgtttttttttgtttgtgcggttatgaaaggtttttttttttttgtttatttagtttgtagatttgataggggttttgtatttttgagtaggttttattttagttatagttaggtttgttggagttagtatttttttgtttatttttttatattttttttttttatttaagagtatatttgaaattgttttgttatagttattttgggtggtgattttttttgtgtttaaattagaggttatattttagtttttatttcgggttttttgttgggagtttttgttttttggtatgttttgtgtgggtttttttgtttttttgcgtattcgttttcgggtgtttttttggagggtttatgtagttggttttgtttatgcgtgggatttttacgtttatcgtagtgatttttaagtatttttgattggttgtatttaaatggtttagtttattttttatttttttttttatgtatggtagttttttatttagttggttatttaggttagaggtttgaatgtggtttagagtttttaggtattgagttttttttgttgtttttgtattattttttttagttttgttttgttatttttttttttattttttttaatagtaaatttttgtttattttttgcgatttggtttcgaggatttttttatagtagttttattgttttaggttatggaggtggtagtaatgaggttgagaagattttgttgagttatgtagggtagggtcgggttacgtttcgtttttgggttaggtttagtttgatattaggtttttagttgtcgaggaggttgtttttcgttaatcgttttttgtgtcgtaggttttttttgatgtgttatttgttcgtgaatttcgtttgtgcggtgtagatatttttgaggatttttaattggcggtttcggtttaagtattattattggtgagttatgtttttgatacgggagattttggggaggttaggagttttattttgggtgaggtttgggttttttgggtagggagtttttgaaatattgtggggagggagattatagggttgcgggggattggatttaggttttatatttagtgatttgattatttatttgggattttttattcgggatttgatagggttattagggtatgggttaggttgtggttaggggtttttttggttttgttttgattttgtttttttttttcgtttagggcgttgttttttttgggtatgagtttttgtttggtttttatgtttgtttttttttggtattatgttttggtggttatgtttatcgtcggtatgatttataaatatatcgagtattaagggtgagtgagtattgttatttggtttttgttagttgagggggttcggtcgagtaggtagggtggtttggtattggggtgggtagggagttgggttatcgtgggtgttaggattggggattgtaatttaggatttttgggtggttttgaggggtagaatttttttatttcgtatttatatagatagaattttttgggcggtattaggggtttattagttgtggtggaatttgtagggttgagaaggagtggggtgacgggattcgaggtttgtttttgagcgttgttcgttacgcgttgttgcggttggaggaggggtttttttatattaagaattggcggtgagttttcgttagattttggttagggcgtagaggtttttaggggtcgttgtcggggttagagggtcgagaggtgtcggttttttattttggggttgttcggggtatttttttgggttatgttatttaaatttgtagggattacgattcgagaagggaagaagaggaggggttttttagaacggtcggttttggttttaggttttttttattcggttattgtaggtcgtagttgttggtgttgttgaagttggacgaggatttttacgtgaagtattcgcggttttttattttcgttttttagtttaaggttggtaagggtttgattattgttggttttgttatttaggggagttttttggagagttatggcgaggtttaggtcgtcgagtaggtatttgttttggggagggagagttgagttagattataggggtttggattgtagttggtacggaggggagggtttagttttggttagggtggttagttaggtagttagtattgttgttatttgagagttggtataagggggagttagtagttttattttgaaaatttggtttttgggtaggtagtttgttgtttttaggtttttttttatttaaaagtcgttttgttttcgaggggttttgggagggagtttagaggtaggaagttgatggttttttattggttttgggtgtgttttttatagattattaagaatatgatggaaattgagaaggtgaagggtttttgttaggtggtggtggttagtaaggtgcgggaggggttggtttattttatttagttttgtggtttgggaggtatgcggtataatttcgtggtgttgggttggttttacggttggcgatagagcgaggattttcgtgtttggaagatttttattggtgtgtgaaggtttggggtttggtgggtaggggtgaagtgaggtggtagtgggcggagggttatagattggtggttagtcgtgttttttttttttagatatcgtgcgttgtattacggttgtttatttggttttgttcgtgtttaagaatatcgttttttattttagtaattacgagcgttatttggagggttatatagacgtgtggtggatcgtgtacgatggtggtatgtttatgtttttgttttttttgttgcgttagtataaggtagattagggggtgggtgtagatgagaggggttaggtttttggaggagtagttgtgattaaatcgtttatttggttttttgttttaggtttggaggaagtgtcggatgcgtatttttatagtggtttagatggatgataatagtatttagatgaagaaggatttggttgtttttttgtattatttgcgttttgaggtcgaggtggaggtggtggagatggtgagttttttgttttgttttggtttcgtggatattatgtttcgtgtagttgggtttttacggttaattttgtttttagtataatagtgatatttttgtatatatttacgagcggacgttgatgatggagtagcggtcgtagatgttgcggtagatgagattgattaagattgagcgggagcgagaagttagtgttttttgtggtttacgttagggcgggtggtagggttaggtttttggagatcgtatcggtgggtgcggaggaattagaatgatttatcgtagttttatttaagttagtgtttatttttcggaggtaaggtggttatattgggttagataggttttatttttttttttttatgggattaaggttattttttgtaattgtttttaggtttagttggttaaggatcggtattcggttttgcggttggagagtttgtattcggacgaggaagatgagtttgtagtgggggttgataagatttagatgacgtggattagggataagtatatgattgagatttgggattttagttatgtttttgataattttcgggagttggtgtatattaagtcgtgagtgtagtaaaaatagttttagcggtattggaatttaggggtggaggtggggtggggtagataagtagtgttagatgggttaggggtggggattttttttgtaggatggtttatggcgatttgtgattggttatattacgtgtagggattaatttaatgtgcggcgtatgtatattgttgtgaagtttaatgaagttattgttacgcgtttttacgacgttcgtttggtttttttaaatatgtttggtttatttaggaatagtgagggcgacgagaattgtatttttttgtggagaggtaggtagttgggaggtggatagtatgggaggttaagttagcggttttttttttgggtatttttgggtgggtatggtttaggtggttcgggttgttcgttgattttgttgttgtttttttgatttgaggttttgtagatatggagtttttcgaggtgttgatcgagggttttgagcgggtgttgttggtgcgcggtggtggtcgtgaagttattattatttatttttgagtttagtgttattttgtggtttggagtcgaggttttggttaggatataataagttgtggtttggggtaatagtttttttttagtatttatttgttagttttgtttgtttggttttgttttggatttagttttgttaggtttttttggaaattaggtttgggttttaaaatggagatggattttaggttttgtgggattttgggatgtttggggattttattatttagtattttagtaggtttgttttggttagagaagattggtaggggtcgagtggggtttgaaggtagtcggttcggtttagtttaggagcgttatttattgtatatttattgtttggatgttattattagagacgaagggaagggtagttagggagggagtttagtttagttgtttgtaggaagatttggtttagtttattatgggtagggttttttattaagttgagtcgaatggagatagttgagttgaggtttgatttttttaataaaatattgtgtagttttgggttttttgttgtttcggttttgttttttttggcgttaagagaagaaggcggaattgaatttaggtttagagtcggttttttgaggttgtgttttttttcggtaatttttggttataatttttattggttaggtcgttttttttattggttttagggttttttttatttttatattagataaggatagtttagtgtcgttttttttggtagtaggtattagggttggaatggggtcgttcggttttttatggtagtgggtgacgttgttgttggggttgttgtttttttttgtcgtttttttttggttttttaatgtgttttttttttcgtatattacgtttaaggttgagtttagtaattatatacggttcgttattttcggtaagtttttattaggtttttgatgtattacgttagattttggggagtttgggttttagtttttggtagttgatttggttaaagtttttttgttttgtataagtttcgatataagtatttgttttggtgtggggaggggttaaaagtttgttttttagaggaatgacgtttttttttttattatattgtgatttttagttgtttaatttagggggggcggagtgggggacggggtgtgtttgaggttttggttggggtattataagttgtggttagttatagttatattagattttgggttaagttttattattttttttttggtttttatttattaaggataagatgtttagtttaggatcggtgagtaggagaggtttatttatgttcggtttttattaggtttagtttttatgtttttagatttatttgtttttattttggattttggtaataaaggagcgttagattgggtgtttgttttgtagaggtaggggttagcggttttggttttagtattttagcgtttttttttttttagggaagtttgggttttggttattggggggatagtagggagagggggtgtaagtaggggagggtaagtgtgttttgtatttgggggttgagggtatgggaggtggggggtgggtttggttattgtagtatttggggtgacgggggtaagggttacggggggaatttagagtttagagtgagggttgttgtttatagt

SEQ ID NO: 156 - DNA, 5901 bp, Artificial Sequence
  chemically treated genomic DNA (Homo sapiens)
attgtgagtagtagtttttattttggattttggatttttttcgtgatttttattttcgttattttagatgttgtagtgattagatttattttttattttttatatttttaatttttaggtataaagtatatttatttttttttgtttatattttttttttttgttgtttttttagtagttaaagtttaggtttttttgaggaagggaaggcgttgaggtgttgaggttaaggtcgttgatttttgtttttgtagagtaaatatttagtttggcgtttttttattgttaaagtttaaggtgggaatagataggtttgggggtatgggggttgggtttaataggggtcgggtatggatgggttttttttgtttatcgattttgggttgggtattttgtttttggtgggtgggggttaaggaaggagtggtggggtttggtttagagtttggtgtggttgtgattgattatagtttgtgatgttttagttaagattttaggtatatttcgttttttatttcgttttttttgggttagataattgagagttatagtgtggtgggagaagggacgttatttttttaagggataagtttttggtttttttttatattagggtaggtatttatgtcggggtttatgtagggtagaagggttttggttaggttagttgttaggggttggggtttaggttttttagggtttggcgtggtgtattaggggtttggtgggggtttatcgaggatgacgggtcgtgtgtggttattgagtttagttttgggcgtggtgtgcggggggaagagtatattgaggagttagaagggggcggtaggagggagtagtagttttagtagtagcgttatttattgttatggggagtcgggcggttttattttagttttggtgtttattgttagagaaagcggtattgggttgtttttatttggtgtgggagtgggaggggttttagggttagtgggagggacggtttggttagtgggggttgtggttagagattgtcggaaaggggtatagttttagggagtcggttttgggtttgggtttagtttcgttttttttttttggcgttaggggaaatagagtcggggtagtaggaggtttagaattatataatgttttattgaaaaagttaggttttagtttagttgtttttattcggtttagtttggtggggggttttgtttatagtagattgagttagatttttttgtaggtagttgggttggattttttttttggttattttttttttcgtttttgatggtgatatttaaataataaatatgtaataaatagcgtttttgggttgggtcgggtcggttgtttttaaattttattcggtttttattagttttttttggttaggataggtttattggggtgttagatagtaaagtttttaaatattttagggttttataagatttgggatttatttttattttgaggtttaggtttggtttttaaggagatttagtaaagttgggtttaggatagggttaggtaagtagggttggtaggtgggtgttgggaagaggttgttattttagattatagtttgttatgttttggttaagatttcgattttaggttataagatgatattgggtttaggagtagatggtgatgattttacggttattatcgcgtattaatagtattcgtttaaggttttcggttagtatttcgaggaattttatgtttgtagggttttaagttaaggaggtaataatagaattaacgggtaattcgggttatttgggttatgtttatttaggggtgtttaggagagaagtcgttggtttgattttttatgttatttattttttaattgtttgtttttttataaagggatatagttttcgtcgtttttattgtttttgggtgggttaggtatgtttaggagaattaggcgggcgtcgtgggagcgcgtgataatgattttattgagttttatagtagtgtgtatgcgtcgtatattggattggtttttatacgtagtgtagttagttataggtcgttatgagttattttgtaaggagggtttttatttttggtttatttaatattatttgtttgttttattttatttttatttttagattttagtgtcgttggggttgtttttgttgtatttacggtttaatgtgtattagttttcggaaattgttaggggtatggttggggttttaggttttagttatgtatttgtttttggtttacgttatttggattttgttagtttttattgtagatttatttttttcgttcgagtataggttttttagtcgtagggtcgagtgtcgatttttgattagttgggtttgaggataattgtaggagatagttttggttttataggaaaagggggatggggtttgtttggtttaatgtgattattttgttttcgggaaatgagtattagtttgggtagggttgcggtgagttattttgattttttcgtatttatcgatgcggtttttaaaggtttgattttgttattcgttttggcgtgaattataaagggtattgatttttcgttttcgtttagttttggttagttttatttgtcgtagtatttgcgatcgttgttttattattagcgttcgttcgtaggtgtatgtagagatgttattgttatgttggggatagggttggtcgtgaggatttagttgtacgggatatggtatttacggggttagggtagggtagagggtttattatttttattatttttatttcggttttaaggcgtagatggtatagaaagatagttaggtttttttttatttggatgttgttgttatttatttgggttattgtgaagatgcgtattcggtattttttttagatttgaggtaagggattaggtgggcggtttggttatagttgtttttttaagggtttagttttttttatttgtatttattttttggtttattttatgttggcgtagtaggaagggtagaagtatgagtatgttattatcgtgtacgatttattatacgtttatgtggttttttaggtagcgttcgtggttgttggggtagaaggcgatgtttttgggtacgagtagggttaggtgggtagtcgtagtgtagcgtacggtgtttggggaggaggagtacggttgattattagtttgtggtttttcgtttattgttattttattttatttttgtttattaggttttaggtttttatatattaatgaaggttttttaggtacgggggttttcgttttgtcgttagtcgtagggttagtttagtattacggagttatgtcgtatgttttttaggttataggattggatgaggtgggttagtttttttcgtattttgttggttattattatttggtagaagttttttatttttttaatttttattatgtttttgatggtttgtggggaatatatttagggttaatgggaggttattagttttttgtttttgggtttttttttaaggtttttcgggaataaaacgatttttgggtggaggagggtttgggggtaataagttgtttatttagaggttaagtttttaagatgggattgttggtttttttttgtgttagtttttaggtggtagtagtgttggttgtttggttggttattttggttaagattgggttttttttttcgtgttagttgtagtttagatttttgtagtttggtttagttttttttttttaaagtaagtatttgttcggcggtttgagtttcgttatagttttttaagaagtttttttggatgatagaattaataatggttaggtttttgttagttttgagttgggaggcgaaggtgaggagtcgcgggtattttacgtggaggttttcgtttagttttagtagtattagtagttgcggtttgtagtggtcgggtggggggagtttgagattagggtcggtcgttttagggagtttttttttttttttttttttcgggtcgtggtttttgtaggtttgggtagtatggtttaggagggtgtttcgggtagttttaggatggggagtcggtatttttcgattttttgatttcgatagcgatttttaagaatttttgcgttttggttagggtttggcgggaatttatcgttagtttttggtgtgaggaggttttttttttagtcgtaatagcgcgtagcgggtagcgtttagggataggtttcggatttcgttattttatttttttttagttttgtagattttattatagttggtgagtttttggtgtcgtttagggggttttgtttatgtggatgcgaggtggaggggttttgttttttaagattatttaggggttttgagttatagtttttagttttggtatttacggtggtttagttttttgtttattttaatgttagattattttgtttgttcggtcgggtttttttagttggtagaggttaggtggtagtgtttatttatttttggtattcgatgtatttgtagattatgtcggcgatgagtatggttattagggtatagtattaggaggagataaatataagggttaggtagagatttatgtttaggaaggatagcgttttggacgagaggggagggtagagttagggtaggattaggaggatttttggttatagtttggtttatgttttggtagttttgttaggtttcgggtgggaggttttaggtgggtggttaggttattgggtgtaagatttaggtttagtttttcgtagttttataatttttttttttatagtgttttaagagttttttatttaggaaatttaagttttatttagaatgaggtttttggtttttttagggtttttcgtgttagaggtatggtttattagtgatagtatttgaatcggggtcgttagttgggggtttttaggagtgtttgtatcgtataggcgaggtttacgaataggtagtatattagaaagaatttgcggtatagagggcggttggcgaagagtagttttttcggtagttggggatttgatgttaggttgggtttggtttagaaacggggcgtggttcggttttgttttgtatggtttagtaaggtttttttaattttattgttgttatttttatggtttgaggtaatgagattattgtggaggagttttcggagttagatcgtagaggatgggtaagggtttgttgttggaggaggtaggaaggggagtaatagggtagagttgaagagggtggtgtaggggtagtaggaagagtttagtgtttggagattttaggttatatttaggtttttggtttgagtgattagttggatgagaggttgttatgtatgaaggggaggatggaagataagttggattatttgaatgtaattagttagagatatttaagagttattgcggtgggcgtgggagttttacgtatgggtagggttagttgtatgagttttttaggaaggtattcgaggacgggtgcgtaggaaggtaggaggatttatatagggtatgttagggggtaggggtttttagtaggaggttcgagataaaggttgagatgtagtttttgatttgggtataaggggggttattatttaagatggttgtggtaaaatagttttaggtgtgtttttgggtgagaggaaggggtgtgggggggtggataagagggtgttggttttagtaggtttggttgtagttgggatggagtttgtttaggggtatagggtttttgttaagtttgtaggttgagtgggtagggaagaggaggttttttataatcgtataagtaagaaggagcgttagttacggagtagggtgggcgaggattttagtttggatagagttaattaaataagcgttgtttcggggtttttgggagttattatatgttggttattttttgtaaggtattggtacgt

SEQ ID NO: 157 - DNA, 6923 bp, Artificial Sequence
  chemically treated genomic DNA (Homo sapiens)
tgggcgatagagtaagatttggttttaagtaatttttttgttttagttttttaagtagttaggattatagttacgtgttattatatttggttaattttttttttttttagagatgaggtttcgttatgttgtttaggttggttttaaatttttggttttaagggatttttttgttttggttttttaaatggttgggattataggtgtgagttattatgattgattattatgattttaataaaattgataggagaataaaaataagggtaaagtagtagttagaggttaggttttataagcgtagaagtagggattttagggttagaaagtaaaggaatgttatatatgtttagaggttttgtaggatgatagggtatagggatatgatttgggaggttgttgttttaaatatttaattaggttaagaaggagggagaagtgttggaattttggatgtattttatatatagagttaataggatttgttaatggattagaggtagggagttaagagagggaatgggagtagttacgttatatagtatatttgtagttttagtagttagggaggttgagatgggaggatcgtttgagtttgggaggttaaggttgtagtgagttttgatcgtgttattgtttattagtttgggtgatagaggaagattttgttttaaaaaaaaaaaatgtttgtgagtttaaattaaattattggatgatggtggtgttatttattgagataagaaatatttggggaggaattattcgggtataaattatgagttttgatttggatatattaagtatgaggttttatttgttatttaggtggagattttaaatagatattcgggtttttgtgtttgtagttcgaggagaggttagaggagttattaagttatgtatttgagtgagtttacgtagagtgggcgagatgtgagtaggtagggtttgatagtagggattttatgacgttagtttgttttgtatgttaggatagtttaggttttggttttgtttttaataatagttttgggtttacgttataatagtatttttaaggagttttttgtttgttattggtttgtgtttagttaggtataaatttgtaattgggtaattttaatttttagagtgagtaagttatttttatggggcgtttaattttttatagaaaaaatttttattggtcgggagtggtgatttatattgtaattttagtattttaagaggtcgaggtgggatgattatttgaggttaggagtttaagattagtttggttaatatggtgaaattttatttttattaaaaatataaaaattagttaggcgtggtggtaggtatttgtaattttagttattcgggaggttgaggtaggagaattatttgaatttaggaggtagaggttgtagtgagtcgagttagcgttattgtagtttagtttgggtaatagggcgagattttattttaaaaaaataaaaataaaataaaaaatttttattaggtcggatttagtggtttatgtttataattttagtattttgggaatataaagtggaaaggattaattgagtataggagttcgagattagtttgggtaatatggtaagatttttttttatttttataaaagataaaaattagttagacgtggcgtgtgtgtttgtgggtttatttatttagaagtttgaggtgggaggattatttgagtttaggagtttgaggttgtagtgagttacgatcgtgttattgtattttattttgtgtgatagagtgagattttgttttttttaaaaaaaaaaaaaaaaaaaagtttaaaaattttttttgtagttaggcgagatggtttatatttataattttagtattttgggaggtttaggtgggcgaatcgtttgaggttaggagttcgagattagtttggttaatttggtgaaattttatttttattaaaaatataaaaaattagttaggtatggtggtgtatatttgtaattttagttatttgggaggttgaggtaggagaattgtttgaatttaggaggtggagattgtaatgagttgggatcgtgttattgtattttagtttgggaaagaagagtaaatttttattttaaaataaataaataaataaataaatataaataaaaagtaaaaattttttttgtttttagtaaaaaaaattttgtatgagtaatgtaattgaatatgttagatttgatgttttatttggaattgtggttgataaggagtttttataaggtgtggaagtgttagttttattttttcgtttatttgggtgtgttagtattttttttttttttttttttgtttatttgtttgagataggttgtataatggtatgattagagtttattagagtttttaaattttggatttaagcgattttttcgttttagttttttgagtagttgtgattataggtgtatattattatttttagataattttttttttttcgaagagatgtgagggggttttattatgttgtttaggttggttttgaatttttgattttaagcgatttttttagtttagttttttaaagtgttgggattataggtataagttattgtatttagtttgtattatttttaatttgtgttttttttttttttttttgagatggagttttgttttgttattaggttggggtgtagtggtgtaatttcggtttatcgtaatttttaattttttggtttaagcgatttttttgttttagttttttaagtagttgggattgtaggtacgtattattatgtttagttaatttttgtatttttagtagagacggggttttattatgttggttaggatggtttcgattttttgattttacgatttattcgttttagttttttaaagtgttgggattataggtgtgagttattacgttaggtttaatttgtgttttttttgtaggaattgtttttaattatgagtttattttgtgagggttaatttagttaaaattggataatattatttaattaagttggtttaggtttatagtttttttaggttattatgtatttttttgttttgtattgtgggtatagtattaatatggttttgttcgttgtatttagacgggattggttaacgggaggtaatggaagaataagaagagtaggggagttagattagaatagtttttttgggtttttttttttatgagttttttagaattggggattttttttgtatagttttttttaggtaggttttttttttagggattttttttatgtttttttattttgggttggtaattgttgttatttttttaattgtgttagtttttattgattttttttaattttttttttttagtgtattgtaaatattttttttattaaattttttttagttagttttattaagtggtattttttgtttttagttagggttttgtttggtatatgttttatagttaagttataaggtttttattttttttttttttttttttttttttttttttttttattttttttgatagggtttttgttatttaggttagagtgtaatggtgtaattatagtttattgtagttttaattttttgaggttaagtatttttttattttagttttttaagtaattaattataggtatgagttattatgtttggttaattaaaaaaaaaaaaaaaagtttgggcgcggtggtttacgtttgtaattttagtattttgggaagtcgaggagggtggattatttgaggttaggagtttaggattagtttggttaatatggtgaaattttatttttattaaaaatataaaaattagtcggttatggtggtgtacgtttgtaatattagttattcgggaggttaaggtgggagaattgtttgaatttgggaggtggagattgcggtgagtcgagatttcgttattgtattttagtttaggtaatagagcgagatcgaatttaaaaaaagaaaaaaaaaatttagtattttttttttattttacgtaattgttttgtatttaggggtgagtgttttttattttgtagacgtgtttagatttttttttataaatatgatgattagagttggagttgggttagcgttgttttttgtttattgggtttacgtgggtacgtggttttatttcggttattgttttttgggtagagggatgacgtggaaggtagatttaggggggatagggttgttttttgtttatgtttagtattttagaattgtttatatttaggtagggcgttttattattagtgttggattggattatttaatttttttggacgtttgatttagtttaaattcgtgttttttttaggattttgggtagggtagttttagttttaggtaatcggtattgagaagagtatatttgttatcgtttggtaggggttcgtttttttttttggtgttgtttattcgcgaggtttgagacgcggatcgttatttttttcgggtttagtttggttttaatgtaggttttagagagagggataaaattcggttcgttttttttttttttttaaggcgattattagtgttttgggggtttatagggttttttcggttttgattcgagttttcggttgtagttggtttgggtttgtgggggtttcgcgtagggaagcggaggttttttttttaggtttttatatttttttggtttgttttagtagagttagcggtttttcgagatagttgggtttcgtagtttttagtcgaggtttgtcgttgggagaaagaagaatgaatgaagggcggaaggggcggggaggggcggggcgcgtcgcgttagttcgcggcgtttttaggtcgggtcgtagcggggcgtggtttttagaggcgtggttttgggcgtgggggcggggttttttggtggggcggggtcgcgtagggtcgttttcgtcgtcggtcgttcgcgtttcgttttcgtgtcgtagtttataggtttcgtttcggttcgttttttcgttcgttttttaagtcgtcgcggcgtcgagtcggttttttcgtcggtgttcgagaggcgttttcggttcggttcggttcggttcgcgtttttcgttttcgttttttcgggtcggcggcggtgggcgagttcgcgggttcggtcgtttttagttttagtttcgtcgggtttcgtttttcgtcgagtgtatgaggttgacgttattttgttgtatttggagggaagaacgtatgggagaggaaggtgcgcgggtcgcggggtgtggggcgagggtttggagggggtgttcggggtagcgtggggtacgggagggggtcgggtttgttaggaggtcgcgtttttgtttttttcgggatgagttcgtttttacgaagttcgtaggtttttttttgtttttttttcgttcgggattttttttttcggttttcggcgagttgtttttttgcgggtttgggggtttttggatttttttttttttttttacgttttttcgcgaaggatttttagatattgtttatttcgcgtcggtttttattcgcgtgttttgtttattattcgggtttcgttttggggttattttttatttagtttcggaagaaagagcggttggggaagtcgtagtttcgggttttagtggtcgtcgggcgtttgttcggttttgtgattttgagttaggcgttgattttttggtttttagtttttttttttgtatatttggaaattgggtagttgttttttcggtgtcggtgattgggggttagatgggtagagcggagataggcgtttaggaagtcggaggtcgtgtattgcgggagttttatttattttttttgttcgtgttttaaattcggtgtttgtttttagttttggttgggagtatgatttattttaattttttttttagtttttttttttttattggggtttaaggcgtagtattgtattgtagttagggtttaaggatttttttagtttaggatagggtttgggggtttttttttggatttttttcgttgatttgttatttagatttatttggttttaaggtagggtttgattttatatttttttttgttattaattttttttaggtttatgaaaatttgattggggtaggggtttatttttttgtagtttttgtttatttaaggtatttgcgtttttatagagggttaggttgttgtggttttgggatttagttatgtgattgggtaagttatgttatttttggggtttagtttttttttttgtatagtggagaggggtaggtttggggtattttttagggtttattagttttaagggtgttaggttttaaggatgattaagtatgtttgtggttggttagaggaggtgttaggtttttttgggataggtgtttgggagtatttagttttgtagttttttttttttgttaagttagggtatttattgttaaggatttgttagggtcggtatttttaggttttttgtttttgattttttagttggttttagtttaggatgtattaatttagttttgtttagtttttgtttttgaagggtttttttagtatttttttttgggtaggagagggaagaaaggaggttgtgataggaatgttatttattgttttatttttaaagttattgttttttttttttttatttattttgttagatttaatgttatagcgggaggatggatttgattttttttttaagttgatatatagggaaatagggttagagaagtttggtaatttagttagtattttagtaagatttaggttagcgttttttttttttttatttggtatagcgattgttttgtttgggcgttgtatatgtgtagtgtgcgaggattggtgtaggtgtaggtatatgtggggtgggtagggtaagttgggtttgtattagattatattttttgagaatgttttttaattttttttttattttgtagg

SEQ ID NO: 158 - DNA, 6923 bp, Artificial Sequence
  chemically treated genomic DNA (Homo sapiens)
tttgtagggtgggaagggagttgggaagtatttttaggaagtgtgatttggtgtaggtttagtttgttttgtttattttatatatatttatatttgtattaattttcgtatattgtatatgtgtagcgtttaggtagggtagtcgttgtgttaaataggagaagaaagggcgttggtttgagttttgttgagatattgattaggttgttaagtttttttggttttgtttttttatgtattagtttaggaggaggattaggtttattttttcgttatagtattggatttggtaaggtaaatgaggagaaaggaagtagtggttttagggataaggtagtgggtgatatttttattatagttttttttttttttttttttgtttaggaagaagtattaagagggttttttaaaggtagggattggatagggttggattagtgtattttgggttgaagttagttgggaggttaagggtaggaagtttggaggtgtcggttttaatagatttttggtaatgaatgttttggtttggtaaggggaaggggttgtagagttgggtatttttagatatttgttttagggaggtttggtattttttttagttagttataggtatgtttagttatttttggggtttggtatttttggagttggtgggttttggaaaatgttttagatttgtttttttttattgtatagaaggggagattgagttttagagatggtatggtttgtttagttatatagttaggttttaaggttataatagtttgattttttgtgaagacgtaggtattttaggtaggtaggggttataggaaggtgggtttttattttaattaggtttttatgggtttgggaagagttggtggtagggggaggtgtggagttaggttttgttttggggttaggtggatttaagtgataggttagcgaaggagatttaaggaggggtttttagattttgttttaggttgggggagtttttgaattttaattgtagtgtagtattgcgttttgggttttagtgagggagaaggggttaaagaggaggttaggatgagttatgtttttagttaagattgagggtaggtatcgggtttggggtacggatagggagagtggatgaggttttcgtagtatacggttttcggttttttggacgtttattttcgttttatttatttggtttttaattatcgatatcgggggggtaattatttagtttttaaatgtatagaaggggaaattgaggattaggaagttagcgtttggtttaaggttatagagtcgggtaggcgttcggcggttattgggattcggggttgcggtttttttagtcgttttttttttcgagattggataaagggtggttttagggcgaggttcgggtggtggatagagtacgcggatggaggtcgacgcggggtgggtagtgtttgggagtttttcgcggggggacgtgggaggaggaaaaagggtttaggggtttttagattcgtaggagggtagttcgtcgggggtcggggagggggatttcgggcgggagggggatagggaggggtttgcgggtttcgtaaggacgagtttatttcggaggaggtaggggcgcggttttttggtagattcggttttttttcgtgttttacgttgtttcgggtattttttttaggttttcgttttatatttcgcggttcgcgtattttttttttttatacgtttttttttttaggtgtaataaagtagcgttaattttatgtattcgacggggggcggggttcggcggggttggggttgggggcggtcgggttcgcgagttcgtttatcgtcgtcggttcggggaggcgggggcggagggcgcgggtcgggtcgggtcgggtcgggggcgtttttcggatatcggcggggaaatcggttcggcgtcgcggcggtttggggagcgagcggaggggcggatcgaggcggggtttgtgagttgcggtacgggggcggggcgcgggcggtcggcggcgggaacggttttgcgcggtttcgttttattagaaaatttcgtttttacgtttaaggttacgtttttagaggttacgtttcgttgcggttcggtttgggggcgtcgcgagttggcgcggcgcgtttcgttttttttcgtttttttcgttttttatttattttttttttttttagcgataggtttcggttgggagttgcgaggtttagttgtttcggagggtcgttagttttgttggggtaggttaggaggatgtaggagtttagagaaggggttttcgtttttttgcgcgaggtttttatagatttaaattagttgtagtcgggaattcggattagagtcggagaggttttgtggatttttaggatattggtggtcgttttggggaggggagggaggcgggtcgggttttgtttttttttttgaggtttgtattgaggttaggttgggttcggggaaggtgacggttcgcgttttaggtttcgcgaatgagtagtattagagaaaggagcgagtttttgttaggcggtgataggtgtattttttttagtgtcgattatttggagttggggttgttttgtttagggttttggagggagtacgggtttgggttgagttaagcgtttaaaggaattgggtggtttagtttagtattgatggtggaacgttttgtttagatgtggataattttagaatgttggatatgggtaggaagtaattttgttttttttaggtttattttttacgttatttttttgtttaggaagtagtgatcggagtggagttacgtgtttacgtgaatttagtgaataagaggtagcgttagtttagttttaattttagttattatgtttgtggggagaggtttaggtacgtttgtaaagtggggggtatttatttttgggtgtaaaataattacgtggggtgggaagaaaatattagattttttttttttttttttagattcggtttcgttttgttgtttaggttggagtgtagtggcgggatttcggtttatcgtagtttttattttttaggtttaagtaatttttttattttagtttttcgagtagttgatattataggcgtgtattattatgatcgattaatttttgtatttttagtagagatgaggttttattatgttgattaggttggttttgaatttttgattttaggtgatttatttttttcggttttttaaagtgttgggattataggcgtgagttatcgcgtttagatttttttttttttttttaattagttaggtatggtggtttatgtttgtagttagttatttgggaggttgaggtgggaggatatttgattttaggaggttgaggttgtagtgagttatgattgtattattgtattttagtttgggtgatagagattttgttaaaaaagatagggagggaaaaaaaggggaaggaaagagaggggaatgagagttttgtaatttggttgtagggtatatattaggtaggattttggttggaaatagaaagtgttatttagtggggttaattggggagagtttgataaaggggatgtttgtaatgtattggggaggggggattaaaggagattagtaaggattggtatagttggaggggtggtagtagttattagtttagggtaagggggtatagagggggtttttggaggagaggtttgtttgagaggagttgtgtaagaggggtttttagttttgggggatttatggggaagagggtttagaagggttattttgatttgatttttttgttttttttatttttttattgtttttcgttaattaatttcgtttggatgtagcgggtagggttatgttgatgttgtgtttatagtgtagggtagagaagtgtatagtggtttggaggggttgtgagtttgagttagtttggttgagtgatgttatttagttttgattaaattaatttttatagaatggatttatagttgaaaataatttttgtaaagaaagtatagattgggtttggcgtggtggtttatatttgtaattttagtattttgagaggttgaggcgggtggatcgtgaggttaggagatcgagattattttggttaatatggtgaaatttcgtttttattaaaaatataaaaattagttgggtatggtggtacgtgtttgtaattttagttatttgggaggttgaggtaggaaaatcgtttgaattagggagttggaggttgcggtgagtcgagattgtattattgtattttagtttggtgatagagtaagattttattttaaaaaaaaaaaaagaaagtatagattgaagatgatgtagattgggtgtagtggtttatatttgtaattttagtattttgggaggttgaattgggaggatcgtttgaggttaggagtttaagattagtttgggtaatatagtgagatttttttatattttttcggaaaaaaaaaaattatttgggagtggtggtgtgtatttgtagttatagttatttaggaggttgagacgggaggatcgtttgagtttaggatttggaggttttagtgagttttgattatgttattgtatagtttgttttaaataaataaataaaaaaaaaaaaaaagaagatgttaatatatttagatgagcgaaaagatggagttggtatttttatattttgtaggagttttttgttagttatagttttaggtgaaatattagatttgatatatttagttatattgtttatgtaagattttttttgttgaaagtaaaaaggatttttgttttttatttatatttatttatttatttatttattttgagatggaggtttgttttttttttttaggttggagtgtagtggtacgattttagtttattgtaatttttattttttgggtttaagtaatttttttgttttagttttttaagtagttgggattataggtgtgtattattatgtttggttaattttttgtatttttagtagagatggggttttattaggttggttagattggtttcgaatttttgattttaggcgattcgtttatttaggttttttaaagtgttgggattatagatgtgagttatttcgtttggttgtaaaaaggatttttggatttttttttttttttttttttaagagagatagggttttattttgttatatagggtggaatgtagtggtacgatcgtagtttattgtagttttaaatttttgagtttaagtgatttttttattttagatttttaggtaggtggatttataggtatatacgttacgtttggttaatttttattttttgtagagatgggggggggttttattatgttgtttaggttagtttcgaatttttgtgtttaattgattttttttattttgtgtttttaaagtgttgggattataggtatgagttattgagttcggtttgataaaagttttttgttttgtttttgtttttttgagatggagtttcgttttgttgtttaagttggattgtagtggcgttaattcggtttattgtaatttttgttttttggatttaagtgatttttttgttttagtttttcgagtagttgggattataggtgtttgttattacgtttggttaatttttgtatttttagtagagatagggttttattatgttggttaggttggttttgaatttttgattttaagtgattattttatttcggttttttaaagtgttgggattatagtgtgagttattattttcggttaataaaagttttttttatgaggagttgagcgttttatgggaatggtttatttattttagaggttagaattgtttagttgtaaatttgtgtttggttggatataagttagtgataagtaggaggttttttggggatgttgttgtaacgtgagtttaaggttgttgttgaaggtagggttagagtttgagttgttttagtatgtaaagtaggttggcgttatgggatttttgttgttagattttgtttgtttatatttcgtttattttgcgtgagtttatttagatgtatggtttggtgatttttttgattttttttcgaattgtagatataagaattcgaatgtttatttgggatttttatttggatggtaaatgggattttatatttaatgtgtttaggttagagtttataatttgtgttcggatagtttttttttaggtgttttttattttagtaaatgatattattattatttagtaatttagtttaaatttatagatattttttttttttgagataagatttttttttattatttaggttggtgggtagtggtacgattaaagtttattgtagttttgattttttaggtttaagcgatttttttattttagtttttttagttgttggaattataggtgtattatatggcgtgattgtttttatttttttttttgattttttgtttttgatttattggtaaattttattggttttatatgtaaaatatatttagaattttagtattttttttttttttttggtttagttaggtatttagagtaatagttttttaagttatgtttttatgttttgttattttgtagagtttttgaatatgtgtgatatttttttgttttttaattttaaggtttttgtttttgcgtttatgggatttagtttttggttattattttgtttttatttttatttttttgttagttttgttaaaattatgatggttagttatggtagtttatatttgtaattttagttatttgagaggttaaggtaggaggattttttgaggttagaaatttgaaattagtttgggtaatatagcgagattttatttttaaaaaaaaaaaaaattagttaggtatggtggtacgtgattgtagttttagttatttgggaggttgaggtaggaggattgtttgagattaagttttgttttgtcgttta

SEQ ID NO: 159 - DNA, 6161 bp, Artificial Sequence
  chemically treated genomic DNA (Homo sapiens)
gtgataaagcgagattgttttttaaaaaaaaggaaagaaagtttttaaacgattattgataattagagatgataaatgtaggttggaggtttggttttatatatagttttgtttaatataaaatttgtttgataggtagttttagttttgataagtatatggtatttttgagtttcgtaagtgataagttgttataatagagtttagtttgttatttattagagtttttagaataattaggttatttattgttagcgtttttttatttgtttagtaatagggtaggtgggttgttagttaagttttttttttcgagtagaaggtgtgtttttttttaaggttttttagtagtagggtgtagtgtgagatggaagatgttgttgaggttataaatttggtttagttttagtttttttaatatgttagagttataagtaatttttttgaaaagagtttttttttttttttttagattttgatttaatagttattaaattgaatagtattaagatatagtggggaatgtaaaggtgagggaattttaggagtttataagtttaatgagaaaagattaggttttttttttttttttgaaagattttaattttaggttaggtatggtggtttatatttataaattttagtattttgtgaggttgaggtgggaggatcgtttgaggttaagagtttgagattagtttgggtaatatagggagattttatttttataaaaataaaaaatattagttaggtatagtggtgtatgtttgtggttttagttattcgggagggaggttgaggtgggaagattatttgagtttgggaggttaaggttgtagtgagttgtgattatgttagtgtattttagttagggtaatagatttttttagaaatagggttttattcgggtgttttggttagagtgtagtggtgtgattatagtttattgtagtttggaattttcggttttagtaggtttttttattttagttttttaaagtgttggaattataggtttaagttattatgttcggttttaggtttttgttttcgatggggaaaaaaaaaaaaaaatagtagtagaataggataataaagtttttatgtagttataatttaattttagtaattattaatttagattagttttgttgtatttatatttttcgtacgttgttttttttttattgtttgaattattcggaaataaattttagttatgttatttattaagtatttcgatatgtattttaagtattttaaaaataagtaaaatatgtcgggtacgatggtatatatttgtgattttagtattttgggagggtgaggcgggcggattgttagagtttaggagtttgagattaatttgggtaatatagtgaaatttcgtttttattaaaatataaaaaattagttaggcgtagcggtaggcgtttgtagttttagtaattcgggagattgaggtaggagaatcgtttgaattcgggaggtagaggttgtagtgagtcgagatcgtattagtgtattttagtcggggcgatagagtaagattttattttaaaaaaaaaaaaaaagtaaaatatttttaaaaaattttttaaaattattatatttaattatattgtttagatttttttagttgttttataatttgtgtagttttaattgagatttaaattagttttatatattgttattatttgtttttgaattttttttttttttttttttgagatagagttttatttgtcgtttagattggagtgtagtgatgcgattttagtttattatagttttcgtttttcgggtttaagtgatttttatgttttagtttttttggtagttgggattataggcgttcgttattatgtttggttaattttttgtttttttgtgtgtgtgtttgtgtgatagagtttcgttttgttgtttaggttgaagtgtagtggcgggatttcggttaattgtaagttttattttttgggtttatataatttttttgttttagttttttaagtagttgagattataggtgttcgttattacgttcggttaattttttttgtatttttagtatagacggggttttattatgttagttaggatggttttaagtttttgattttatgatttattcgttttagttttttaaagtgttaggattataggggtgagttattttgtttggtttgtttatgaaattttttttattttgtagtttatttgttaaagaaattaggttatttgttttgttgtattttttatagtattatttttgttatttgtattatggaaatgttattaagttttttttttttatgtattttttgtaagttggttgttagatttagaagtttgattagatttaagtttattatttttgttttgtaagattacgttataggtgatagtatatatttggtgcgttttatttggaggtatttaatgtttggtagttttattttgtgatgttatagatgttattatattatttagagttgagaaataagattgtattttgggtagagtggggtataaaattatagagaatttggagagttggttgttgtaggaatggtaggtggcgtaaggtaggatgtgtttaggaaaaagtagagttttggagtgaagggaatagggagataagttcgtagggtgagatgtagttagtttatgaggattggtttggtttttattttgtaggtagtggggtgttgttgaagggttttgaatagagagatgataggtttagaaatatatttttggaagattaatatagttagttttgggtaggatgatttagggagggtagagattggtttagtttgaagtaagtggaagtgatattgggtaagtttggttgggtattagtggattagtatttttaagagggtagaattttgagttgttttttaaggtttaggttttaggattttaggtttagagagttgattgtgaggcggttggtaggatttggttttagggattgattaagttatggttagtgaaataaattgtggataggtaatttgggtgttattgaaatttagttggtttattttttgtttaggttttttttattttttagaagttttttttgagtttataagtgatttttggaatgttttttgggtttatattaaaaatatattttttggttatagtatttttatagaaagttatttttttttattatatttttaatttgtgttttttagagtcgtttgaatttttttgggaggaatttgggggatttggttattttttagttttttgttggtgaagattatgaggttggaggtaggaggaagtggaatgtgagagagaatgaggagggagaagagatagatttgggtgttttggtgtggaacggagggagagggaagatatttaggaggttttggtttttaggatgttagtgttttgttgtttgggaaaatatagtgttatatttttttgtaggaaggatggggaaagtttttgttttttgtttgttagttatgaggtagtttgttaggagagtttttggatttttgttattttaatttaatatataattttgtgtttattataatgatttttttagaaattataaaattgagtattgaaaagagtttttaggaattaacggaaatgggatagagtttttttttttagtattttgtgtatatttaggatatcgtgagttatttgttatatttagaagagaaaaatttgatcggtattcggtttgaattagagtaggaaggaagagaattgtgttcgtttttgtttttgtttttgtttttgtttatttaattgttgggattagaggtagttgggttgaattttgtttttggttaggggtgggggtggaggggatagaatttatttttttgggttttattttttttttggttatttggatatgttttttgtgatttaaatttgatgtaaggaaatgataattgtgaaagatttagcgtgagagaatttgatgggagggtgggttattagggattagttggtttggttgatgatgtattaatattttaattatatagaggattttaatttttttttaaatttaatgagcggaagtggtttttaaagttatttagttagttagtagttgttataatttagttagttgttttaatttttagttttgtaattttttttttttatagaagattgtaaattggtagtttatagggtaaatttagtggttaggtgtgttttatttggtttatatggtattttaagaattttttgatgttattaatattttttaaaagtggtaaattttatttaaatatttggatttttggtatgttttgaaaggttggaagatttgggaatggtaggtttatgtttttgtaggggagtgttcgttttttaatgcggcgtataagttttagcgttttgcgttaaatttaattggtttggttgaggatttgtttttggaatgttggttggtcgtttttaattgtttttgatttagagattatttattgttagtttatttatagtggcgtagagaagtggtttttttgagttagaagtttttaagaaaagtttatttttaaagttgtttgtgggatagatttggtttttttattgtaatatttttgattttaaatattattggaaagagttttgaattggtagttagtaggtttgggtttttatttcggttttttttttaatgagcgacgttattttaatgtagtcgaatttagtttttgatttttaattttttttatttgtaaatgagggcgattagatgggtgcggattgttattcgtgttgagattttcggttttcgtagaattaattttatcggcgggagtatttcgaggggacgtcgttcgtattagggggcgttagggtcgttgtagagttcgagttagagttagggggcggggtcgcgtttcgggagcgaggtttgagagcggcggggcggggcgtcggcgggtagttttttgtgttaggtgtggtttggtttttttagggcgtcgtaggcggtgtatttcgttcgcgtttggggttgtggttttttcgcgtttgaggcggcggcggtaggagttgaggggagttgtagggaattgaggggagttgttgtgtttttcgtttttttttttttattttcgcgttttcgggattatgttcgcgttggcgggtaaggaagggttgtttcgttttgtttcgttgttattttcgaagttcggttttatggcgtttgagggaaatcggttgtttttcgggggtttcgggttggttgggttttcgtgggttcgagttttttagaaaagttgggaggcggggtgggtatagcgttttttaggtatttggagggtgggatttcgggaatggggaggtagggtattttggagatagagggtttcgaggggtaggcgggttgggaggtttttcgcgagttgaggtttcggggaggaagagattttgggtttgttaggaatttagttttttggagggatttggcggtcgtagatttttaaattaattttttttaaggaagttgaaaagtatggggtttttttatagtggaagttttgtggaatttgaggagtataggattttttagggtttaggataattaggagagttatttcgggttttgggttttttgagggaaatggaggatgtgatttttttgttaagatttaaggtttttcgcgggtattttggtgtttgggagtttttcggggttgggagttttttgtagaaaataagggagtatggagttttttgaggtttaggataggattaagggtaaggagagatcggattattttttttggggtttaaagatttttgttataggtggcgaaagtaggttatttggggttttgagtttttttgtggaagtttttttggtttttttagattaaagattagagggattcggttaaatattttttggaaggaagagttgtttaagggtgaagggtagttttagagttgggttagttgtatttgtagttattttttcgttattttatatattattttgtagttttttgttttttttatttttttttttagtagtaggaattttttgttttttatgttttttagttatttgtgtgggtggtttatttttgggtttattagggttagcgtttagaagttttggagaggcggtaagagggtattga

SEQ ID NO: 160 - DNA, 6161 bp, Artificial Sequence
  chemically treated genomic DNA (Homo sapiens)
ttaatatttttttgtcgtttttttaaagtttttggacgttgattttggtggatttagaggtgggttatttatataggtggttgggaaatataggagatagaaggtttttattgttgggggaaaagatggggaaggtaggaagttgtagggtggtgtgtgaggtggcggggaggtgattgtaggtgtaattaatttaattttgaagttattttttatttttagataatttttttttttaggaggtgtttggtcgaatttttttagtttttagtttagagaggttaagggagtttttataggaggatttagaattttaggtggtttattttcgttatttgtagtagagatttttgggttttaaaaagaatggttcgatttttttttatttttagttttgttttaaattttaaggggttttatatttttttattttttgtaaagagtttttagtttcgggggatttttagatattaagatgttcgcgagaagttttgggttttggtagggaagttatattttttattttttttagaaaatttagaattcggggtaatttttttaattgttttgaattttagaggattttgtattttttaaattttatagagtttttattataagagaattttatgttttttaatttttttaaaaagggttaatttgggggtttgcggtcgttaggtttttttaaaaagttggatttttggtagatttagaattttttttttttcgggattttaattcgcgggaagttttttaattcgtttgtttttcggagttttttgtttttaggatgttttgtttttttattttcggagttttattttttaaatgtttggggagcgttgtgtttatttcgttttttagtttttttgaggagttcggatttacgaggatttaattagttcgaaattttcgagagatagtcggttttttttaggcgttatggaatcggatttcggagataatagcgggatagggcggagtagtttttttttattcgttagcgcggatatggtttcgggagcgcggaaatggggaggaggaggcgggggatatagtagttttttttagttttttataattttttttagtttttgtcgtcgtcgttttaggcgcgggaagattatagttttaggcgcgaacgggatgtatcgtttacggcgttttgggaggattaaattatatttggtataggggattgttcgtcgacgtttcgtttcgtcgtttttaggtttcgttttcgagacgcggtttcgttttttggttttggttcgggttttgtagcggttttggcgttttttagtgcgagcggcgttttttcgaggtgttttcgtcggtaaggttgattttgcgggggtcggaagttttaatacggatgatagttcgtatttatttagtcgtttttatttatagatagggaaagttaaggattagaggttaagttcgattatattgaaatggcgtcgtttattaggaggagagtcgggatgggagtttaggtttgttaattgttagtttagagttttttttagtagtgtttggaattaggaatattataatggaggagttaggtttattttataaatagttttgaggatggattttttttagaagtttttagtttagagaaattatttttttgcgttattatgagtaagttgatagtaaataatttttaagttaaagatagttggaggcgattaattagtattttaggagtagatttttagttaggttaattaggtttagcgtaggacgttggagtttgtgcgtcgtattggaagacgagtatttttttgtaggaatatgggtttattatttttaggttttttaattttttaaaatatgttaaaaatttagatatttaggtgaaatttgttatttttaaaaaatgttgatagtattaaaaagtttttaaaatgttatgtagattaaatgaaatatatttggttattagatttgttttgtgggttgttagtttataattttttatgaggaggagggattataggattaagagttaggatagttgattgggttatggtagttgttagttggttgagtagttttgagaattattttcgtttattaggtttggaaggagattggggttttttgtgtgattaagatattaatatattattagttaggttagttggtttttgatgatttatttttttattagatttttttacgttgggttttttataattgttatttttttatattagatttagattataggaaatatgtttaaatgattagaaagaggatggagtttagggaaatggattttgttttttttatttttatttttgattaaagataaagtttaatttagttgtttttggttttagtagttgggtaagtaaaggtaaaggtaaagataaaggcgagtataattttttttttttttgttttaatttaaatcggatgtcggttagattttttttttttgggtgtggtaggtggtttacgatgttttgagtgtgtataaagtgttggggaggagggttttgttttattttcgttaatttttgggaattttttttagtatttagttttgtagtttttgaggaaattattatagtaaatataagattgtgtattgaattaaagtgataggaatttagagatttttttgataagttgttttatggttagtaaataggggatagggattttttttattttttttatagaaagatgtaatattgtatttttttaggtaataaagtattggtattttgggaattaaaattttttgggtgtttttttttttttttcgttttatattaaggtatttaggtttattttttttttttttttatttttttttatattttatttttttttatttttagttttatggtttttattagtagggagttggggaatagttaagttttttaagttttttttagggaagtttaggcgattttgagaaatataagttgaaaatgtaatggaagggaatagttttttatagaaatgttatagttaagagatatatttttaatatggatttaaagaatattttagaaattatttgtgaatttaagggggatttttggagggtagagaaagtttgggtagggagtagattaattgagttttaatagtatttaggttatttgtttatagtttgttttattggttatagtttggttagtttttagggttagattttgttagtcgttttatagttaattttttgagtttaggattttgaaatttggattttgaaaaataatttaaggttttgtttttttgaaggtattggtttattggtatttaattagatttgtttagtgttatttttatttgttttaaattgagttagtttttgttttttttgaattattttatttaaaattgattgtgttaattttttaaaagtatgtttttggatttgttatttttttgtttaaaattttttaatagtattttattgtttataaaataaaagttaaattagtttttatgagttgattatattttattttgcggatttgtttttttattttttttattttaggattttgtttttttttgagtatattttgttttgcgttatttgttatttttataataattagttttttaggttttttgtaattttgtgttttattttgtttagagtgtagttttgttttttaattttaaatgatatagtggtatttgtaatattataaagtaggattattagatattaagtgtttttaggtaagacgtattaagtatatattattatttatgacgtagttttataaaataaaaataataagtttgaatttggttaagtttttagatttaataattaatttataggaaatatatggagaagaggagtttaataatatttttatgatgtaaatagtaaaaatgatgttgtgggaaatgtaataggataaataatttagtttttttaatagataaattgtagagtagaaaaaattttatagataggttaggtaaggtggtttatttttgtaattttagtattttgggaggttgaggcgggtggattatgaggttaggagtttgagattattttggttgatatggtgaaatttcgtttgtattaaaaatataaaaaaaattagtcgggcgtggtggcgggtatttgtagttttagttatttgggaggttgaggtaggagaattgtgtgaatttaggaggtggagtttgtagttagtcgagatttcgttattgtattttagtttgggtaatagagcgagattttgttatataaatatatatataaaaaaataaaaaattagttaggtatgatggcgggcgtttgtagttttagttattaaggaggttgaggtatgagaattatttgaattcgggagacgggggttgtagtgagttgggatcgtattattgtattttagtttgggcggtaagtgaaattttgttttaaaaaaaaaaaaaaaaaaaatttagagataaataatagtaatgtatgaaattgatttggattttaattgaaattatataagttatgagataattagggaaatttgaataatgtgattggatatgatgattttaagaaattttttaaaggtattttgttttttttttttttttgagatggagttttgttttgtcgtttcgattggagtgtattggtgcgatttcggtttattgtaatttttgtttttcgggtttaagcgatttttttgttttagtttttcgagttgttgagattataggcgtttatcgttacgtttggttaattttttgtattttagtagagacggggttttattatgttgtttaggttggttttaaatttttgagttttggtaattcgttcgttttatttttttaaagtgttaggattataggtgtgtgttatcgtgttcggtatattttgtttgtttttaaaatatttgagatgtatatcgaaatatttaataaatgatatgattggggtttgttttcgaatagtttagatagtgggagaggaatagcgtgcgggaggtatagatgtaataagattgatttgagttgatagttattggagttgggttatggttatatggaggttttattgttttgttttattattgtttttttttttttttttttatcgaaaataaaaatttaaggtcgggtatggtggtttaaatttgtaattttaatattttgggaggttgaggtgggagaatttattgagatcgggagttttaggttgtagtaagttgtgattatattattgtattttagttagggtattcgagtaagattttgtttttaaaagggtttgttgttttggttggaatgtattagtatgattataatttattgtagttttgattttttaggtttaggtgatttttttattttagtttttttttcgggtagttgggattataagtatgtattattgtgtttggttaatattttttatttttgtagagatggagtttttttgtgttgtttaggttggttttaaatttttggttttaagcgatttttttattttagttttataaagtgttggggtttgtaggtgtaagttattatgtttggtttaaaattaaaattttttaaaaaaaaaaaaaaaatttggtttttttttattgggtttatgagtttttgaagtttttttatttttgtattttttattgtattttggtattatttaatttgataattgttagattaaaatttaagaggaagaaaaaaagttttttttagaggaattatttgtagttttggtatgttgggaaggttgaggttgggttagatttgtaattttagtaatattttttattttatattatattttgttattaaggaattttagggagggatatattttttgttcgagagagaggatttggttgatagtttatttgttttgttattaaatagatggagagacgttgatagtgagtaatttgattgttttaaaggttttgataagtgataagttaagttttattgtggtagtttgttatttacgaagtttaggaatgttatgtatttgttaggattggggttgtttgttagataggttttatattgggtaaggttgtgtatgaagttaggtttttagtttatatttattatttttaattattaatagtcgtttaaagattttttttttttttttttaagagatagtttcgttttgttat

SEQ ID NO: 161 - DNA, 14861 bp, Artificial Sequence
  chemically treated genomic DNA (Homo sapiens)
  unsure (4370..)
ttttttagttttagtaggaatttttgtatttagtttgggattagggggattgggagtggagtgataagaaatattttttgataggtaaattggtatttagattttgttattttaaaggaggaagttaatttatagtgagaagtaaggggtggagttgaagagatggaagggagttattttttggattttttttagtaagaggtgtaggtttgaggtcgggaggtaagagtatgaataggagattggagggagagaacgattagttttaattaaagatttgttatttagggtagtgaggtaagaggaattaatatgaaagttggttttaaagttttgtttttgtagttttttattttttttgtttataattgtttataggtggtagttattgtttgtgttagttgttggttaggtattaaattttttttttttttaaattagttaagtttaaatatgttagtttttatttaaaggaagaaggagtaaataaaggagtaaaggagaaagagtaaatgaatttagggagataatgaagaggtttagagttttagagtttttattttttttttaagttgagggatttagattttcgaataataaagagaggttgtaagtaaatgtgttttatgtttgaatgagtaatagttagggttttaattacggttaaaaatttaattagcggaggttagttataatttgttttagtttttgtttaagattttatgttttttttttttttttttggttttttttagggttttattggaagtgttttttttttttgggttttttttttgatatttaagagtttagttttatgtcgtaggatttttgtattttttgggtatattattcggataggatttttttttatgtttttatttagtttatgtatgattattgtgtgttttagttttcgatgtttttttgatttaattttgttaatttgggagattagtttaaagttttttttgattttttaagtttcggattgttttttttttttttgaagttttatagtaatttgtttatattcgtttttgtattatagttatttgtatggaaaatagtttttttttttagatattgagtttttataaggtaggattttaggttttatatttttttttattagttaatatttattgagtgtttatttagtgtttggaattgttttaggtattgggatataatagtgaataaagtttttatttttattggatttatattttattgtagggtggagaaggggattaattatataagtaaataaatatatagtgtgatgttagataatggtatttgttgtgatgtaaagaagtagattttgaggtaggaatgagtggtagtatattttagagatattaaaaagttagggtgagtaaaaattagttgggtatggtggcgtatgtttgtaattttagttattttagaggttgagataggagaatcgtttgaattcgggaggtggaggttgtagtgagttaagatcgtattattgtattttagtttgggtgatagagtaagattgtttaaaaaagaagaaaaaaaaagggtggttagaattatttgagtaggaagagagaggattagagagtaggtcggggtagattatgatgggttttgtaggttgtggtaaggagtgaaatggaatattattggagaatttatatagaagaatagtataatatgatgttttaaaaatttaatatagtttattattttgaaagtttttttaatttatagaaaagttgaaaaaagatataattaatatttgtatattgtatgttttttatttaaatgtattaattgataatgttaatattttgtattatttgtgtgttttgatatatatatatatgtgtgtatataaatatatgtatatatatatttatataaatttttgttattttattattttaaagtaggttatagatattatgatattttattttaaaatgttagtatgttttttttaagaattggaatatttttttatataattataattttattattatatttaagaaaattaatattatttatttaatagcgatttatttttagatttttttatatgttttttataaatttttaaatatgttttttgaagttttatttttttttttttaggatttaattaagttttatttatggtaattgattttttagtttgttttaatttagaataaggatttttaagtttttgtttttgtttttttttttgagatagggttttgttttgtcgtttaggttggagtgtagtgttattattatagtttattgtagttttgttcgttttttgggtttaagcgatttttttattttagttttttaagtagttgggattataggtatgagttattatatttatttaatttttaaattttttttgtagagtttaggttttattatgttgtttagattggttataaatttttgggtttaagtaatattttcgttttagttttttaaagtgttaggattataggagtgagttattttgtttggttaaggttttatattttatagagtatttagtaatttgtttgtttatggtatagaattattgaagatataaaaaatgatttgatttttggtatttttaaatgtttggaatttttatgaaaaagttttattaagatattaggttaaaaaatttaaatagaaagaggtagaatatatagtatattgttgttaattgtaggaattatttaagtttattgtagtttttattgtaggtttagtgggtttggtgggtttgggatttgggtttgtgaaggtttttaagattggagtttttagtttttagtttgattttatttattaataatttaataaatatgtttaagtatttgttataattttttttgttttaattaatgtggagtttttgaaggtttttttttttttattgtttgttttagaattagaaagttttgtttttttttatgtagtttttttgtttttaggtttgtttagggttatgggttgtttaagtttttattgatgaggggtagttttaggtagtggttaaaagttttagagttaaatagtttgtaatttagttttattatttatagttgtggaattttcggtaagttatttaatttttttgagttttggttttttaattataaaatgggagaaagaaaagagtttattttatagggttattgaaagtattagagttaatgtatgtaaagagtttaatgtatagtagatgtttaaaagataatgggtaaggtcgggtgtagtggtttatatttgtaattttagtattttgggaggttaaggcgagtgaattatttgagtttaggagtttgagattagtttgggtaatatggtgaaattatatttttattaaaaatataaaaaattagttaggcgtggtggtatgtgtttgtggttttagttattggggaggtcgaggttgaaggatggtttgagttcgggagatggaggttgtagtgagtcgagattatgtttgttgtattttagtttgggcgagagagtaagattttattttaaaaaagaaataggttgggcgtagtggtttatatttgtaattttagtattttgggaggtcgagatgggcgggttatttgaggttaggagtttaagattagtttggttaatatggtgaaattttgtttttattaaaaatataaaaattagttgggtatggtggcgtatgtttgtaattttagtttaggaggttgaggtaggataattatttgaatttgggaggcggaggttgtagtgagttgagatcgcgttattgtattttagtttgggtgataagagtgaaattttgttttaaaaaataaataaataaataaataaaaattaaaaaaatgagaatggatattagtattagttatagttaaggtagtggtaaattggaatatttagaaatattgggggaattagtgtttagtgttcgtaggtttttgtgggggtgtgatttattgagattttggtttaaatttagtagtttttgggttgataattagtagttgtttgataatatatagatgaaagaaaaggaagaagaagggtagttaggagataatagttttttggtgttagttttggtttatttagtatttttttatttgtttatttgtggagtagttttgtgtcgggggttgggtggtttggtaggattaaggaattggttaggatcgttgtttgttttttttatatattggtgttgtcggtgtttttgtaaagagagaaatcgagtggaggggatttaggaaggttgtagttatttagttttagttttttgataaaggttttgggagggtttaggggagttgaggggaggggttgagagttattaattttagtttaggtgatagatnntattattgtatttttttcgcggattggcggtttttgtttttatttcgggtagaggaggtatttttagggtttttttagaaaatcgagtttcggtttagattattgagtttcggacgttttcggagggagtttgaaattttagagtatgatattgagttttaaaggggagtcgtttagtttttcgtttattgtttaattttattttcgattttttttgttttttggagtattagggaggagggtttagttaggggagagggcgttttaggttttaaattagttagcgagttttcgggatttttatttttggatcgttttttagaatttcgaattttgtcgcgggttcgcgtcgttttttttcgggtagcgcgttaaatcggcgtatgcgtatttattggattgtcgcgtagttttttttttttttatttattaatttttttttttttttcgttttttttttttttttttttttaattcgtttttttttttttttttattagtttttttttcggtattttagttcggggaatagcggtgcgagttttaggtttatgtattgaggaggcggaaataaggggagtttttagagttttattaagttttttttaaaggtttttttattcggtttacgttttttatttttttttttcgtttttttttaattgtgtatttttgtagtcggaggcggtttcgagatggggttgtgagtttcgttcggggagggggaaagagtagcgaggagtgaagcgggggggtggggtgaagggtttggatttcggggtagggggcgtattttcgttagtaggttttttttaaggggttcggaattttatttttttatttacgtttttggtgcgttttgtcgaaggaaagaataagaatagagaaggaggagggggaaaggaggaaaagggggattttttaattggggggggtgaaggagagaagtagtaggattagaggggaaggggttgttgtttgtattagtttatattatgttgatttcgtcgttgtttttgttgttgtttttgtttttagttttggtcgcggcggttatcgacggtgagtgagatttcgcgttttttttggatttttgggggtattttttttttagtttttatttttgtatacggatggggaagggagacgcgggagggggtgttttttgttattttagtttagttgatatagtagcggttcgattgggggcggggatggggttcgatttgggggatgggggttttgggtaaatgatgttttcggggttttttagtataaataaagattagaggtttgggtagagagaagagggttttttatttttttgattttggggaggagaggttttttttttttatttttgttcggggagggttttcgttttttttatatttttataattttttattttttatttgaattgtgaaggaattcggatttgtaatgttcggttgtaaaagggggtgggggtggggggggtggtttttgtattggtttttgtagttcgaaaggggagttaggttaggggtattttgtcgggtagagggtaggtaggttcgggaaggttgtgggtggggagagggagggttttttgtttgggcgtggaatcgattttagagtttcggttggaggtttgggtgttgaagtaggttttttttttttttagggtttttgttagtagtttggggtagggttgtgttggggggtagagagggggagttcgttatattatgtgattttgaatttttttttttaatttttgggagttttgagatgaaaaaacgttagatgttattattggggaaggggattggagaatggtttggaatgttggggtaggagggtgggggaggttgttttttttttgatttttggttttattatagtttggattggaaggagagttggaggttggatggggattatggttgtgtttttatatttttttagtaaatttgtttattttttgtatttttttaagtttaaaattttatatatatatattttgtatattgtagagttaggtttaggttagaattgtatttttttggggaaatggggtgttttttttttttttttttgttagttgttttttttttttatttgtgagttattggtttaagttttgtttaagttttaagtattaagttggggttatggggttgggttgggttaggtttttgatttgagaaggggtgggattttatttttttttgttattttagtttttttatttaaagataaaattgggttggatattattatatatttttttttttgttttgttagattgggattgggaaagtttttttttgaaattagattatttttttttttttttttaatttgttttaattgggggaggagatttatagggttaggaagtagttgtgtttttaaaaatatatttagtgttttttagttgtgttattttggggattttttattttttatttttattttattaattagttgtttcggaggaggagaggggttttttttgaatattttttagatgtcgtatagtcggtttttgtttataatttttgttattattatgtgttttttttttgtttttagttttgtgaggtgagaagggaaatcgaggtagggagattggggttgtagtcgtttttgggaggaatagaaaaaaaatttgagagagagagagatttattaggagttttttgaaggagggtggttagagttaggtagaagtaagagggtttttgtggagagtagggaaggttaggaagggattttagatagtattatttttagggttttaaaggagttttatttgttatattaagttagtggaagagagagattggatatgttttttttaattatttttttatttttttttaaaatgtttatttacgttttttttgtatttttagtttagattaaattatttaaagttttaggagaggatttttttttaaatatatattaatatttttgttttgggagtgggaatataaataattagttttattttatttttgggtatagggtggtgagaaaggggaattgtatagaaatgtaagtttaattttatttagaggtagtttaggggattttttatttttaatttttgtttttttgttttagggtttattaatattgaatttttttgtttattttttagagaatggagatgatttagtttatttgatttagtatgttattttttttttgttattatagttttgttgttttttttttagggtagtaattttaggggtttttttattttttttgtttttttttttatgtttgaaattgtttttggggttttttgttttttggggagtaacgttattttttattagcgataaaattgagtgtatttgttgttggagaggttgtagaaagatggggtggagaatgggattattgagggttttgttgagattggggaatattttttagtggggagggtatttttagataaatatagtttatagaataaggttgatttttttttttttttttttttgatttttttttatatatttttttgagtcggtatattattagttattagagtaggtatagtggaagtgagttatgaagttggggtgttagttttttggatttttgagagaaagttttaaatttttttttttttgattagatttatattttaaacgtttttttttgtttcgttgttttttaaagtaagaatgtgtaagaaatttattttggggttggagggatattttgatgtttagggttgttttattagatattttttttttttgattttgtttttttttttttttttatttttttaattatttttttattattgagttttttaaaggatgatagtttaggttttggttagagttagtttttgtttagatgtttttattttttaaaattttttttttattttttgggaagtttttttttatttaagtttatttttttttttttttgttgtagtgtgagtttttgtatattagaatttttaagtttaggtttattttcgtttagtattttttttttagggttttttttattttttagattttttattttttaggttttttagttttgcgtgtgggtttattgtttttggggtatttgggtgtagttgaatggtattgtaggaaggtttttgatttggtagtgttgggtatgagcgatagagaatttgttttttttttttgttttagattttagtttggttagtaggattttgtattgtttggagaaggaagtagttggttttggagtgttttcggtgtaatggttttaggtattaatataaattttttttgggaaagaggtgaggggtatatgtggagagttgttttttttgtttttttaggggagatgaaagttttttttttttttattaggttttagtttttttggttgaagagttttattttttttttttttttttatttttttgattttaggggtggtagtggtttttattttgggttttttttgagttaggtattgtttagggtcgagattttgtttttttaagataggatagattttgtttttattttattttaggtttagcggggtagttattttttgggtttattttaggataattgtgttatttttttggtaatttttggattgagttttttttttggtttttttggttgtttgtttgtttttttgtttgtttgttattagtgtgcgttgttttggttttttagaatttttttgttttttatttttttagtttattttttattgtcgaatttttgtgatattttttgttttgttttttgcgtttttgttatttgttttatttttttttgtttgtttttatttatttttatttaggttttttggtattttaaaagttttttgggagtaagagtttttttgggtttttttatttattttttggtttttttttttttgttttggttatttttttttttttttggttagatttagtgtttagtttagtattaaaagttttttttttattttttttcgattttttttttttttttttttttttattaatttggggaatgggttttggagagaatgtttttggaagaaaggaatttgatattttttgtgggttaagagggagaaaggaggtattttagaaggaaggagggaggttagatttttggtagaatttttttttgattaggagtttaagaattggagaaagatgtaaggagtgagttaagaatttggagtttttattttggtgagtataagttgtgtgtgtggttggggtggggggagaaggagaggaggtttagaaatgtttggtgagtgatatggtgatttttggaggttttttgggggtttggtttttatttgtggggaaaggaaaagttggtgggggaggttacgggttaggttaatgttttgttgtattaatattgatttagaatggaagcggagatttttttttttttttggttgtttaagttattttgtttgtttgtttgtttaggtcgtaaagtagaggtttagatttaggaatgataaaaatgtgtttgagttttaggaaagagttattgggtaatatttaaaatataaaaaatttagtgaaaatttttcggtttgggtttgggaggtttttgttgttttatttttataaggtcgaaaatttagatttttgtaggttttgttttcgcgtcgtttttttattttatttttcgtattttgagtattttttttttattttgtttttttagttatattatgtggttttttttagagaattttttttttatttagtttagaggggagtttatttttttttttgttgtgtttatttttaaaaagggttttaagagtttttgttatgtttttgtagtttttgagtttttttgttttttaagaagtatttttaaggttttagtttttttttttgttttcgtttttttaagggggtattaaaggatgggttttttttttttggagaagatttttttagggttggatttcgttgttattttttttggttaggtatttttattttatttttttatttttaaggttttagaatgggatatagaatgatagttaagggttaagtagggtagtggggtttgtgttgtgtttggacgtatatttaattttatattttttgttttggttttagtttggtggttttggggatcgtggttgggttgggtgtttgggtttgggggggtggggtagggtgttggttaagttagtatggtagttatatttatttttaggtaaagtcgagaatagacggtttttgtgttttggtgttttttttttaaattcgtttttttttttttttttttagattttttttttttttttttttgtttgtttttttttttttttgttttatttttgtttttttttgttttttttatgttttttttttttttttgaggagttttgaaggttattttttaaaattttttttttattgttagggttagagaacgatagcgttttttttgtaattttttttttttgttttttgtttttgttttgttttgtttttgagatatagttttattttattatttagattgaaatgtaatggcgtgatttttgtttattgcgattttcgttttttgttaatttttgtatttttagtagagatagggttttattatgttgtttaggttggttttaaatttttgattttaagtgattcgtttattttcgtttttattttttaaagtgttggtattatagacgggagttattgcgtttatttggttttttttttttttttttttttttttttttttgagatggaatttcgttttgttgtttaggttggagtgtagtggcgcgattttagtttattgtaagtttcgttttttttggtttacgttatttttttgttttagttttttgagtagttgggattataggcgtttgttattacgtttagttaattttttatatttttagtagagacggggttttatcgcgttagttaggatggtttcgattttttgatattatgatttgtttgtttcggttttttaaagtattgggattataggtatgagttattatgttcggtttggtttttttttttaattcggttgtattttatgatttatgaggaaattatttgtttagttattagttattttgtgttttagtttttttatgtgtgagaggggggtcgtaagggtatttattttatagggttatagtatttaagtgagttaatagttatcgtatttttaattagtggttggtggttagtaaggtgaaaaaggttagtttttatcggttagggagattttcgggtttttttatgcgggttaggaggcggggaaggttttagttgtttttgattttagggtaatgttgtttttttatttaaattgtaggttataaaggtgggttttttgggtgttggatttagatatagaaggttttgttgaggggagtggggttggttttttttttaagtagattataagggttttatttcgtttttaatttagtttttttttagttttgagtgaggttttttttggttgtgtagattgttttaaagtagtttatttgttttttttttttttttttttttgaaggaaattaaagataggttttagttttttcgttttagatttttgggttttttaatattagttttgataggaagtttttttacgtatttttttgtaatttttgtgttggttaggttttcgggagatgtggttttttttttcggtgttgttgtgggataggggtttggggttttttttttttttttatttgttttattttttattttttttttgtaagagtatatttggtttgtgaattttttttattttagtttttggagtttgttagttgttgttttttttgtggagtttaggttaaaaatgggggtgggggatagcgggggggatttagtgagggttaaaggagggggtattatggttgggatgtggaatggaggggaggttaggtgattattcggtgattttaggtcgtggttgtgcgttttgtttttgggaggagtagggtatggattaagttttaggtgggtggtacgggggtttgtttttgggttttaaatattttatttgtttttgagttttattttagtttttttttttttttttagtcggttacggttggttaggggaagcggacggtttttcggtatgttaattaggttggcgggttgtgtttttcgggaagattttatagttggtttagtggggtaatgaatttagtattatttatttttttaaggggtttttattttaggtttagggtgggggttaggggagggaggttgaagggggagtttggttaggttatttttgatgtgttttttgaattcggttattttggttaggggtttgagtgtcgttttttttgttagcggtgggggttaggagggaagatattttagtgaggtttttattagatttttttttttttaagagtttttttttttcgttattttttttatatttttgtttttgttttgtatttgtattagttgggtatagttgtttttttaggcgattttggtttttgtagggtagagggttattttattttttttggtattttgatgtttagtgtagtgtttggtatagagttggtttttagtgtgtgttagtagaatagaaatgtgatggtatagtttgaggaaaagttacgaaaggttaggagattgggagtttagttttgggtgggggagaaggggtgggtgattgttttttttgtggaggatgtggtgatagaggttgggaggagtgggaattcggaggattggtgtggattttattggtttagagtttggagttagtttagttggttttgttatttgttagttatttgattttggttaagttatttggtttaatttttttatttgtgaaatggtggtattagttgtttttatttgttatattgtggagggaattaaatatgatgatatatggaaaaaattgttttattatagtttttggtatatattgagtttataataagagttagttgttagtcgggtgcggtggtttacgtttgtaattttagtattttgggaggttgagatggatgtattagatgaggttgggagttcgagattagtttgattaatatggagaaatttcgtttttattaaaaatataaaattagttatgcgtggtggcgtatgtttgtaattttagttattttggaggttgaggtagaagaattatttgaattcgggaggtaggggttgtagtgagttaagatcgtgttattgtattttagtttgggtaataagagtaaaattttgttttaaaaaaaaaaaaaaaataatagagttagttgttattatttttaatttttttttgggggatgagggaagagaatggggtaggagtggaagaagtttgattggggtgggagggtagggttaagaggttttgaatatagtagttaattagttggattggattgaaattagtttttagagtttattttagttatttttttgtttttgttttttaattttgatattttgaaaatttttaggtgttttttaattttaaggatgtttattgaaagtttttttgaggtttaattaagggaggttgtgtttttagagaatggagaggataaggtaggtggattatttgaggttaggagtttgagattagtatggttaatatggtgaaatttcgtttttattaaaaatataaaaattagttggatatggtgatgtatgtttgtagttttagttattggggaggtcgaggtaggagaatcgtttgggtttaggaggtggaggttgcggtgagttgagattgtgttattgtattttagtttgggggatagagtgagattttgttttaaaaaaaaaaaaaatagggaatggaaatggaagtaaggttttttattttgtttatttttgtttagttttgtttttttgtgtttttgttaatattatttttaattattattgtgtgtgttaagggtatttttttttattgtttttatttgggggtttagtgattaggggttgggaaggatggggtgatgggttaggggattaggagtgttttagaaggtagggaagtagagaggttagataagattagttcggggtttttagtagtaggagttagaggaagataaagagaaaatatgttaaggtttaaatgtatttttttttattattattttgttattaaagttagggggtgttggtgtttgatgagagtaattaagaatagtaaaggttttgattttgatttttaggaataggtagtttagaggatttggaggggtgtagtaaaatgtgtttttggattttttttatttttatcgtagatatatagtgtttaggaattatttaaagttattttttgatatttttaggtatatagattatggttgagggtttgggttagatggagattgatgttagggaaggaagagtagtattaggggattttgggtttatagagttggtttttattttttatttatatttttttttttttttttgttttagt

SEQ ID NO: 162 - DNA, 14861 bp, Artificial Sequence
  chemically treated genomic DNA (Homo sapiens)
  unsure (10491..)
gttagggtaaggaaagaaaaggggatataaatgaaggatggaggttaattttgtgaatttaaagttttttagtattgtttttttttttttagtattagtttttatttggtttagatttttagttatggtttatgtgtttgggggtgttagggggtggttttgggtagtttttagatattgtgtatttgcggtgggggtggggaggatttagaagtatattttattgtatttttttaagttttttaggttgtttgtttttgggagttagggttaaagtttttgttatttttggttatttttattagatattagtattttttggttttgatgatagagtgatggtgaaggggggtgtatttaggttttgatatgttttttttttgtttttttttaatttttattattagaggtttcgagttggttttatttaatttttttgtttttttgttttttgggatatttttggttttttgatttattattttattttttttaatttttaattattaggtttttagatgggagtagtggggagggatgtttttggtatatatagtagtagttggagatggtattagtagaggtataggagggtaaggttgggtaggaatgggtagggtagagagttttgtttttatttttattttttattttttttttttttgagataaggttttattttgttttttaggttggagtgtagtggtataattttagtttatcgtaatttttattttttgggtttaggcgatttttttgtttcggtttttttagtggttggaattatagatatgtattattatgtttagttagtttttgtatttttagtagagacggggttttattatgttggttatgttggttttaaatttttgattttaggtgatttatttgttttgttttttttattttttaaagatatagttttttttggttagattttagggagatttttagtagatatttttagagttaagaagtatttaaagatttttaagatattagaattggggagtagaggtagggggatggttgaaatgaattttaggaattggttttagtttagtttaattagttagttattatatttaggattttttggttttatttttttattttaattaggttttttttatttttattttattttttttttttattttttaaggaggaattaagaatggtgataattaattttgttgttttttttttttttttgagatagagttttgtttttgttgtttaggttggagtgtaatggtacgattttggtttattgtaatttttgtttttcgggtttaagtgatttttttgttttagtttttagagtagttgggattataggtatgcgttattacgtatggttaattttgtatttttagtagagacggggtttttttatgttggttaggttggtttcgaatttttaattttatttgatatatttattttagttttttaaagtgttgggattataggcgtgagttatcgtattcggttgataattaatttttattgtgggtttagtatgtgttaggaattgtggtaaagtagttttttttatgtattattatatttaattttttttatagtatgataaatagggataattaatattattattttatagatgaagaaattgagttaggtgatttggttagggttaaatagttggtaagtgataaaattagttaagttgattttaagttttgaattagtgaaatttatattagtttttcgaatttttattttttttaatttttattattatattttttataggaggaatagttatttatttttttttttttatttaaggttgagtttttagttttttggtttttcgtggtttttttttagattgtgttattatatttttattttgttggtatatattgaaggttagttttatgttaggtattgtattaggtattagggtgttaaggagggtgagatgattttttgttttgtaggagttagagtcgtttgagaagatagttgtatttaattaatgtaaatgtagggtagagatagaagtataaggaaaatggcggggggggggggtttttaggagggagggagtttgatgggagttttattgagatgtttttttttttaatttttatcgttggtaggggagacggtatttaggtttttggttaaaatgatcgagtttaggaaatatattaaggatggtttagttaggttttttttttagttttttttttttggtttttattttgagtttggaataaaggttttttgaggaggtggataatgttgagtttattgttttattgggttagttgtgaggttttttcgggaaatatagttcgttagtttagttagtatgtcggagaatcgttcgttttttttgattagtcgtggtcggttgagggggaagaggggggttggaatgggatttagaggtagatgagatgtttggagtttagaaatagattttcgtgttatttatttgggatttggtttatgttttgttttttttaggggtagagcgtatagttacggtttgaggttatcgggtggttatttaattttttttttattttatattttagttatggtgtttttttttttagtttttattgagtttttttcgttgttttttatttttatttttggtttgaattttatagaggaaatagtagttggtaaattttaaaagttggaatgagagagatttataaattagatgtgtttttgtagggaggggatgggggatgggataagtgaaaggaagaggagggttttaggtttttattttatagtagtatcgggggagggggttatatttttcgagggtttggttagtataaggattgtagagagatacgtgaaagaattttttgttagggttggtgttgaagggtttaggaatttggagcgagaaggttgaggtttgtttttgattttttttagggggagagggaagaaagaaataaataaattattttgggatagtttatatagttaagggaagttttatttagagttgggagagagttgagttgggagcggggtaggatttttataatttgtttagagggaaagttaattttattttttttagtagagttttttgtgtttgaatttagtatttagaaaatttatttttgtggtttgtagtttagatgagagaataatattgttttaaggttaaaagtaattaaggtttttttcgttttttggttcgtatgagagaattcggaggtttttttgatcgatgggagttaattttttttattttgttaattattagttattgattggaaatacggtgattattaatttatttagatattataattttgtgaggtgggtgtttttgcggttttttttttatatatgggggagttgaggtatagggtgattggtaattgagtaggtggtttttttataggttatgggatgtagtcgggttaagaaaggaaattaggtcgggtatggtggtttatgtttgtaattttagtattttgggaggtcgaagtaggtagattatgatgttaggagatcgagattattttggttaacgcggtgaaatttcgtttttattaaaaatatgaaaaattagttgggcgtggtggtaggcgtttgtagttttagttatttaggaggttgaggtaggagaatggcgtgaattaggggaggcggagtttgtagtgaattgagatcgcgttattgtattttagtttgggtaatagagcgagattttattttaaaagaaaaaaaaaagaaagaaagaaaggaaattagatgggcgtagtggttttcgtttgtagtattagtattttgggaggtggaggcggagatgggcggattatttgaggttaagagtttgagattagtttgggtaatatggtgaaattttgtttttattaaaaatataaaaattagtaggaggcggaggtcgtagtgagtagagattacgttattgtattttagtttgggtgatggagtgagattgtgttttaaaaataaaataaaataaaaataaaaaataaggaagggaaattgtagggagaacgttgtcgttttttggttttggtagtggggagaggattttaaggggtggtttttagggttttttagagaggagggaagggtataggggagatagagaggagtaagaatgggatagaagaaggggaagataggtaggagaagaagaaggagagatttagagaggaaggagagagagcgagtttggaggaagaatattaggatataggggtcgtttgttttcggttttgtttgaagatgaatgtgattgttatgttaatttggttaatattttgttttatttttttaaatttaggtatttagtttagttacggtttttagggttattaagttggagttagggtaggaggtgtagagttgggtgtgcgtttagatataatatagattttattgttttgtttgatttttggttgttattttgtgttttattttgggattttgggggtggggaagtggggtgagaatgtttggttagagagggtgatagcgaagtttaattttgaaggagttttttttagaggaggggaatttattttttgatatttttttgagggagcgagagtaaggaagagagttaagattttagaggtgttttttaaaggataaggagatttagggattgtaaaagtatgatagggatttttggggttttttttaagagtggatatagtagaaggagagataggtttttttttgagttaggtgagaggggggttttttaaagggaattatatgatatagttaagggaatagagtgggaggaggatgtttaaggtgcggggggtggggtgggggggcggcgcggggatagagtttgtaggaatttgaattttcgattttatgggggtggggtagtaagggttttttaaatttaaatcgagaggtttttattgaattttttgtattttgggtgttgtttagtggtttttttttgaggtttagatatatttttgttatttttgagtttgggtttttgttttgcggtttggatagatagatagatagggtggtttggatagttaggggaggggaagggttttcgtttttattttgagttaatattgatgtagtaggatattagtttgattcgtgattttttttattagttttttttttttttataaataaaagttagatttttagaaggtttttagaggttattatattatttattaggtatttttaagttttttttttttttttttttattttagttatatatatagtttatgtttattagagtaaaagttttaagtttttgatttattttttatatttttttttagtttttaggtttttggttaggaggaagttttgttagaagtttaatttttttttttttttttgaaatatttttttttttttttttagtttataaagggtattaagttttttttttttagaaatattttttttaaaatttattttttaaattagtggagggggaagaagaaagaggaagtcggaggaaagtggagaggaaatttttggtgttgaattggatattgggtttggttaggaagggggaaaaatagttaaaatagaggggagggagttagggggtgagtgggaaagtttagagagatttttgtttttaagaagtttttgggatattaagaggtttggatgggggtaaatggagataggtagagaaaaataagataagtgatagagacgtagaaagtagggtagagaatgttataaaggttcggtagtaagagatgaattgagagggtgagagatagagaggttttaaaaagttaagatagcgtatattaatgatagatagatagaaagatagatagatagttagaaaagttaggaagggggtttagtttagagattgttaaggggatgatatagttgttttgggatgaatttagagaatgattatttcgttgagtttagagtagggtgggagtaagatttgttttattttggagagatagagtttcggttttaggtagtgtttgatttaagggagatttagaatagggattattattatttttggagttaggagggtagaaaggagggaggaaaatggagttttttagttagggaagttaaggtttggtgggagagggagaggtttttattttttttaggggagtaagagggataattttttatatatattttttattttttttttagggagggtttatattggtgtttgaggttattgtatcggaaatattttaaagttaattgtttttttttttaaataatgtaggattttgttaattaggttgaaatttgggatagaagagggaggtaggttttttatcgtttatatttagtattattaagttaggggtttttttgtagtattatttagttgtatttagatgttttaagagtaatgagtttatacgtagagttggaggatttgaaaggtaaagagtttgaggagtgaggaggattttgagaagagagtattgggcgggaataaatttaggtttgggggttttgatgtgtaagggtttatattgtagtaggaggaaagagagatagatttgagtaaggaagggttttttaaaaggtaaggaaggggttttgaagaatgggggtatttggataggaattgattttggttaggatttgggttgttattttttgggaggtttagtggtggaagggtggttgagaaaatgaagagaggagagagaataagattagaagaaaaagatgtttagtgaagtagttttaaatattaaaatatttttttaattttaaaatgaattttttatatatttttgttttaaaagataacgaggtaaagggagacgtttaggatgtgagtttgattagggagaaaggagtttagaatttttttttagggatttaggaagttaatattttagttttataatttatttttattgtatttattttagtaattggtaatatgtcggtttaagggggtgtgtggaggaaggttaggaaaaagggagggaggaagttagttttattttgtgagttgtatttgtttgggggtgttttttttattagaaaatgttttttaattttagtagggtttttaatagttttattttttattttatttttttgtaatttttttagtagtaggtatatttaattttgtcgttagtggggagtgacgttattttttaaagggtaggggattttagaggtagttttaggtatagaagagaaagtagaagaggtgggaaagtttttaggattgttgttttggagagaaagtagtaaggttgtgatagtaggaggaaggtaatatattaagttaggtgagttgggttatttttattttttggaaagtaaataagaaagtttaatgttgatggattttgaggtaagagggtaggggttagggataagggattttttaggttgtttttggatagagttgaatttatatttttatgtaattttttttttttattattttgtatttaagagtggggtggagttgattatttatatttttatttttaaggtagaaatattggtgtgtgtttggggaggggtttttttttggggttttggatagtttgatttgagttggagatatagagggggcgtgggtgaatattttaagaaagggtagggagatagttaaggagaatatgtttagttttttttttttattaatttggtgtggtaaatagaatttttttagagttttgggagtgatgttatttggggtttttttttgattttttttgttttttatagaaatttttttgtttttgtttaattttagttatttttttttaaggggtttttgatgggttttttttttttttaaattttttttttattttttttagaagcggttgtaattttaatttttttgtttcgatttttttttttattttatagggttgagaataagagaaaaatatatgataatgataggagttataggtagaagtcggttgtgcggtatttggaggatatttaggaaaagttttttttttttttcggggtagttaattggtggggtgggggtggggggtagagagtttttaagatggtataattgagggatattaaatatgtttttggggatatagttgttttttgattttgtaagtttttttttttaattgaagtaagttagggagagggagggagataatttggttttagagaaaaatttttttaattttaatttggtaagatagaggagggggtgtatgatggtatttagtttagttttgtttttggatgagagggttaagatgataggaggggatgagattttatttttttttaaattagggatttagtttagtttaattttatgattttagtttaatgtttaaagtttgggtaagatttgaattagtgatttataagtaggagaaaaaaatagttgataaaaaaagggaagagaggtattttatttttttaaaaggatgtagttttagtttaagtttaattttgtaatatataaagtgtgtgtgtatggggttttgggtttggaggggtgtagggaataaatagatttattaaaggagtgtgggggtatagttataatttttatttaatttttaattttttttttaatttaaattgtgatgaagttagaagttaggaagaaggtagttttttttatttttttattttagtattttaggttattttttagtttttttttttagtgatgatatttgacgtttttttattttaaagtttttaggaattaagaaggaaaatttaaagttatatagtatggcgagttttttttttttgttttttaatatagttttattttaggttattgatagaggttttgagagggggaagagtttattttagtatttaggtttttagtcggggttttggggtcgattttacgtttaagtagggggttttttttttttttatttatagttttttcgggtttgtttgttttttgttcggtagggtatttttggtttggtttttttttcgagttatagaggttagtgtaaaagttattttttttatttttatttttttttgtagtcgaatattgtaaattcggatttttttataatttagatggggggtggggggttgtgaggatgtaggggaggcggaggtttttttcgaatagagataggaaaagaaggttttttttttttaggattagaaaaatggggagtttttttttttttatttaggtttttggtttttgtttgtgttggggggtttcggaagtattatttgtttagggtttttattttttaaatcggattttattttcgtttttagtcgggtcgttgttgtgttagttggattgggataataaaaggtattttttttcgcgttttttttttttattcgtatgtaggagtgggggttggggagagggtgtttttaggggtttaagggggacgcggaattttatttatcgtcgatagtcgtcgcgattagagttgagagtaggggtagtagtaggagtaacggcggggttagtatggtgtgggttgatgtaagtagtagtttttttttttttggttttgttattttttttttttattttttttagttggggggtttttttttttttttttttttttttttttttttttgtttttattttttttttcggtaaagcgtattaggggcgtgggtgaagaggtagagtttcgagttttttggggagggtttgttgacgggggtgcgttttttgtttcgaaatttaaattttttattttattttttcgttttatttttcgttgtttttttttttttttcgggcgaagtttatagttttatttcggagtcgttttcggttgtaaaaatgtataattgggaggaggcggggagggggggtggggggcgtggatcgggtaggggagtttttggagggggtttgatggagttttgggggttttttttgttttcgtttttttagtgtatgggtttggagttcgtatcgttgtttttcggattgaagtgtcgaggggggggttgatgggggagagggaggggacgggttgaggagggagggagggaaggggcggggaaagaaaaaaggttggtgggtggggggagaaagagttacgcggtaatttagtgagtgcgtatgcgtcgatttgacgcgttgttcgggggagggcgacgcggattcgcgatagggttcggagttttggaaagcggtttaagagtgagggtttcggggattcgttggttagtttggggtttggggcgtttttttttttggttgggtttttttttttggtgttttagagagtagaaggggtcgagggtgggattgggtagtgggcggagagttgagcggtttttttttgaaatttagtgttatattttaggattttaggtttttttcgggggcgttcgggatttagtggtttgggtcgaggttcgattttttaggggaattttgaaggtgttttttttgttcggggtggggatagggatcgttagttcgcggggaaggtgtagtaatgnngtttgttatttgggttgggattggtgatttttagtttttttttttagtttttttagatttttttagagtttttattagggagttgggattgagtgattgtagtttttttagattttttttattcggtttttttttttgtaggagtatcggtagtattagtgtgtgaggagagtaggtagcggttttagttagttttttgattttgttagattatttagttttcggtatagagttgttttataggtaggtaagtgggagaatgttggatggattagagttggtattagggggttgttattttttgattgttttttttttttttttttttttatttgtgtattgttaggtagttattaattgttaatttagaagttgttgggtttagattagggttttaataaattatatttttatagaagtttgcgggtattgggtattgatttttttagtgtttttgagtattttagtttgttattgttttgattgtaattaatgttagtatttatttttatttttttaatttttatttatttatttatttattttttgagatagagttttatttttgttatttaggttggagtataatggcgcgattttagtttattgtaattttcgttttttaggtttaagtgattattttgttttagttttttgagttgggattataggtatgcgttattatgtttagttaatttttgtatttttagtagagatagagttttattatgttggttaggttggttttgaatttttgattttaagtgattcgtttatttcggttttttaaagtgttaggattataggtgtgagttattgcgtttagtttattttttttttgagatggaattttgttttttcgtttaggttggaatgtagtaagtatgatttcggtttattgtaatttttatttttcgggtttaagttattttttagtttcggtttttttagtagttgagattataggtatatgttattacgtttggttaattttttatatttttggtaaagatgtggttttattatgttgtttaggttggttttaaatttttgagtttaagtgatttattcgttttggttttttaaagtgttaggattataggtgtgagttattgtattcggttttatttattattttttgaatatttattatgtattaagttttttatatgtattaattttaatatttttaataattttgtgaggtaggttttttttttttttttattttgtagttaaaaagttaaggtttagagaggttaaataatttgtcgggggttttatagttgtaagtggtaaagttgggttataaattatttgattttagagtttttaattattgtttaagattgttttttattaatagaggtttgggtaatttatggttttaggtagatttgggggtaggagggttgtataggaaagggtagaattttttagttttagaataaataataaaaagaagaaagtttttagaggttttatattaattggaataaaggggattatgatagatgtttaggtatgtttgttgaattattaataaataaaattagattagggattggggattttagttttggaggtttttataggtttagattttaaatttattaaatttattagatttgtagtggaagttataatgagtttggatagtttttgtagttaatagtaatatattatgtattttgtttttttttatttaaattttttaatttgatattttagtaaaatttttttataaaaattttagatatttggaagtgttaaaaattaagttattttttatatttttagtaattttgtgttataaataaataggttgttaggtgttttatgggatgtaaaattttggttaggtaaggtgatttatttttgtaattttagtattttgggaggttgaggcgggaatattgtttgagtttaggaatttgtgattagtttgggtaatatagtgagatttagattttataaaaaaaatttaaaaattaggtgggtgtggtggtttatatttgtagttttagttatttggaaggttgaggtgggaggatcgtttgagtttaggaggcgggtaaggttgtagtgagttgtgatggtggtattgtattttagtttgggcgatagagtaaaattttgttttaaaaaaagaggtaaaaataaaaatttaagaatttttgttttagattggggtagattaaagagttagttgttatggatgaagtttgattggattttggaaaaggaaaaataaagttttaaaggatatgtttagaagtttataaaggatatgtagagaaatttgagagtggatcgttgttggatgagtgatgttgatttttttaggtgtggtgatggagttatgattgtgtaagagaatgttttagtttttgggagaggtatgttgatattttagggtaaaatgttatgatatttataatttattttaggatggtagggtagtaaggatttgtgtaaatgtgtatatgtatgtatttatatgtatatatatgtgtgtgtgttagagtatatagatagtgtaaggtgttaatattattagttggtgtatttagatgaggaatatatagtatatagatgttaattgtatttttttttaatttttttgtaagttaaaaaaatttttaaaataataagttatattgaatttttaaaatattatattatgttatttttttgtataaattttttaatggtgttttattttattttttattatagtttataaggtttattatgatttgtttcgatttattttttgattttttttttttttgtttaagtgattttggttattttttttttttttttttttttagatagttttgttttgttatttaagttggagtgtagtggtgcgattttggtttattgtaatttttatttttcgggtttaagcgatttttttgttttaatttttagagtagttgggattataggtatgcgttattatgtttagttaatttttgtttattttggttttttaatgtttttggaatatgttgttatttatttttgttttagggtttatttttttgtattatagtagatgttattatttgatattatattatatatttatttgtttgtgtagttggtttttttttttattttatagtagaatgtaagtttagtgaaaatgaagattttgtttattgttatgttttagtatttagaatagttttaggtattaagtagatatttaataaatgttgattagtgaaaaaaaatgtgagatttgggattttgttttataaggatttagtgtttagaaaagggagttgttttttatgtaaataattgtagtataaagacgagtgtaggtaaattgttatggggttttaaagaaaggagaggtaattcggggtttggggaattagggagggttttgagttgattttttaggttggtagagttgagttaagagagtatcgagagttaaggtatatagtgattatgtatgggttgggtaggggtatgggaaagagttttgttcgggtggtgtgtttagggaatgtaggggttttgcgatatgaggttgggtttttaagtgttagggaggaaatttaggagagaaaagtatttttagtgaaattttgggaaaggttagagagaaggaggaagagtatgggattttggatagaggttggagtaaattgtaattgattttcgttgattggatttttgatcgtggttaggattttgattattgtttatttagatatgagatatatttgtttatagtttttttttgttgttcgagggtttggattttttagtttaagagaggaatgggggttttgaagttttgggtttttttattgtttttttgaatttatttgtttttttttttttgtttttttatttgttttttttttttttgaatggaggttgatatgtttggatttgattgatttgagaggaggggaaatttggtatttagttaatagttgatatagatagtggttgttatttgtaggtaattgtgaatagaaggaatagaaagttataggagtaaaattttgagattagtttttatattggttttttttattttattgttttgggtagtaggtttttggttggaattaatcgttttttttttttagttttttatttatgtttttatttttcggttttaagtttgtattttttgttgaaaaagatttaagaggtgatttttttttatttttttagttttattttttgttttttattgtgggttaatttttttttttgaagtggtaggatttgggtgttagtttgtttgttaggaagtgttttttattattttatttttaatttttttggttttaaattaggtatagaaatttttattggggttgaagaa

SEQ ID NO: 163 - DNA, 5760 bp, Artificial Sequence
  chemically treated genomic DNA (Homo sapiens)
attttgggtttttgtttttgtttttgagatagagtttcgttttgttgtttaggttagagtgtagtggtttgatgattttggtttattgtaatttttagtttttaggtttaagcgatttttttgttttaattttttgagtagttgggattataggtatatagtattatgtttggttaatttttttttttttttgagacggagttttgttttgttgtttaggttggagtgtagtggcgcgttcggtttattgtaattttcgtttttgggtttaagcgatttttttgttttagttttttaagtagttgggattataagtatttattattatgtttagttaatttttgtattttcggtagagatggggttttattatgttggttaggttggttttgaatttttaatttcgtgtgattcgtttgttttagttttttaagtgttgagattataggcgtggtttattatatatggttaattttatgttttttaatggttgttttttagtttttagttttttttaatatttgttttgtagtttttaattttgatttttgtgttagaaggatagatgtttgtttaggatttgatttttgtttttatgatttggttttatgtgatcgttatttatatattttatgtatgtatatatatttttatttttttttttagtacgttattttttttgttatagttgtttgtgtttttggagtgttatatagtgttttttgaagataatttggtttttttttagttttattttcggattttggttattggtgcgtttcgtttacgttggtgtttcgtgttttatgttgtggttgtggtttatgttaatagttttatttttttttaggatttatagagtttagtaagttatatttttatttttagaggaaggaagggagttagtaattgagttgtttttgggttagttggggaagaggtaagtgttaagtaaggttagtggtgggtattagttttcggtttagtgttatttttttttgttttgtttttaggatgaggttaaagttgttcgtaggagtatgttgtagaaaatatggttgttggtagatgaggtagggttagggttattaggagggtgggatattagaggattttgggggatagagattataataggattttattatttattttataagtttttttttttttttgtagggttttcggtagtattttttgtattataagttttttaattttacgtttttagagggttttgagttttatttttagttgttttttttgcgttagtattatttttagagattgattttaatagtgttttaaaatggggtattagagatttaggatagttgatatagatggaaagatgggtacgttgttttgtatttagttttttaatagatgtttggttagacgaagaatattgtgttttaatggtaggtaggagattaaggagtagaaggtttgtttttttgggagtaggttgtttgagttgttttagagtagtgagttttattattatattttgatatttggggtttttgaaggtttgtgttgggagtgaagagtggtttagttatttattcgttttttggggatagggtaaattaaatgtatttttttttatttaatttttaatttttgttttgggttgaggtatatgaatgttatagttgtgtattaaaataaatgttttttattttttggaaatttgatttggattgattttagttatgttagtttagggttagtatttgggggtgggttattttaggtgaggagtaggattgttgtgagagagatggggaagaattataagtgggaggtaaaaattttgtttatatttggagataataagaatgtggggtttgttaggtatagtggtatatatttgtagttttaattatttgggaggttgaggtaggatgattatttgattttaggaatttaattttagtttagttaatatagtgagattttatgtttgtttgtttgtttgtcggtcggtttgtttatttatttatttatttatttatttatttatttatttatttatttatttatttttgagatagggttttgttttgttgtttaggttggagtgtagtggcgtgattatagtttattgtagtttcgattttttgggtttaagttatttttttattttagttttttgagtggttgggattataggtaagtgttattacgtttggttaattttttgtatttgtagagacggagttttattatgttgtttaggttggttttgaatttttgagtttaagtaatttatttattttagatttttaaagtgttaagattataggtatgagtcgttatatttggtttattttggtagtttttatattgttttttggtttgaattttaaattttaggtttttttagattgttttttgttgtgtggattatttattgtgtttgtaagtaattagagttagagtagtgtgttaaggtttagttttgttagtaggtagagagaatttagtttttataaatggagttgttgaatatagaattatttaataggtttttttgggtttttttttttttttttttgatacgaagttttgttttgttgtttaggttggagtgtagtggggtaattttagtttattataatttttttttttttagtttaagttatttttttgttttagttttttaagtagttgggattataggcgcgtgttattacgtttggttaatttttgtatttttagtagagatggggttttgttatgttggttaggttggttttgaattcgaatttttgattttatgattcgtttattttagtttttaaaagtgttggtattataggtatgagttattgggtttagttttttttttttttttttttttgagatagagttttattttgtagtttaagttagagtgtagtggtatgattttggtttattgtaattttcgtttttgaggtttaagtgatttttatgttttagtttttcgagtagtaggggttataggtatgtattattatattcggttagttttttgtatttttattagaagcggtgttttgttatgttgtttagggtggttttagatttttaagtttaggtaattcgtttattttagttttttaaagtgttgggattataagtgtgagttatagtatgtggttttaataggttttattaagtaattattgtattagtaaatattaatgatttttaaattttgtgataaaaattatttggaggatattttaaaatagattattgggttttattattagaagttgttgatttagtatatttggggtgaaatttaagaatttgtatttttaataagtttttaggtaatattgatgttgatgtttagaataaattatataattataatttgaagagtagtggtttaaagagattttgtaaggtaaattttgtgattttatagtgtgatatttagtgttaagtagggtatagagattagggtttttttgttttttgttttttttgagatggagttttattttgttatttaggttggagtgtagtggtgtaatttcggtttattgtaatttttgttttttaggtttaagtaattttttgttttagttttttaagtagttgggattataggtatttgttattacgtacggttaatttttgtatttttagtagagacggggttttattattttagttaggttggttttgaatttttgattttgtgatttattttatttttatcgtttttttggttttttaaagtgttgggattataggtgtaagttattacgtttggttgagattagattttttataaaattattgttttgtttatattttgaattatatttagattttattaagtagttaattattataattttttttttgaagtattttgtattaaatataggttttagatttttaagttaggatttttttttttttttttttttttgagatggggcgttgtttttgttgtttaggttggagtgtaatggtgcgatttcgtttttgtaatttttgttttttaggtttaagttatttttttgttttagtttttagagtagttgggattataggcgtgcgttattatgtgtgtttgattttgtatttttagtagagacgggattttgttatgatggtttagttagtttcgaatttttgattttaggtgatttgttcgttttagttttttaaagtgttaggattataggtatgaattattgtattcggtaaatgattatttaagtaaatgatcgaagatttaagatataaaattatttgaagggagtggtttttatatttgtagggtattttatagagtaatttttttttatatgattttgtaggtggtggggaaatttttcgggtagttgtggtttgtgttatattatttattgattagaggtgttagtattagtgtttaagattaatcgatcgatcggtttatttatttattatttattgatttttagtgttattaaaaatattcggattttttaacgtttggtttagttttttattttattatagtgagaggttgtgtataggggtaatataggtaacggaattatatgaggtaaatatagagatttaggtttttgggagtagtaatgaggtttagttttgtagttataaaggtattattaaaaggtataagtaatggtaggtaatgaggttttatttggagtagtttagagtattttttacgtgtggtgacgtatgttatatatttattattattattattgttataaatgaagtgtatattttattgtttttgtttttaggaatttggaagtttttatttggtgttcgaggtgtggtttttattttaagcgtggggtatttttttttcggttttaaatttatcggagtttttagtaggttgcggtatatttgacggttggaaattagaatttttgggtggggattttttaaggtttttttcggaagcgtagggatttcgttgtttatacgtttttttttttttttttttggcgttttggggtttgaggtgggcgtggttagattagttttaggttcggggagtgtttcgttagcggtagtatatttttgtaagtggtggttagggttgtcgtggtaaaatgagttgttaattttaggttgataggggtgtggtcgcgatcgtaagggtttttgttgtcgggtggatttaatagggatgggttgttggggatagttgttggtgtggttcggagtcgcgggtaagtgttatttggcggttaggggatcgtttagtttgaggtatttttttaggtttgggggtggtcggttaataggttaggtgttagtggtttttttagaggtttcgaatttttatagttaaattttttcggttcgtgtttttggagtgcgggtcgagaagcgttaagtgcgtgcgaattttagagtttggattacgtagtttgggaaggaggaatattttttggggttttagtatcgttttggggcggggttattaatttaagttgaggaaagtattggggaggttgtaggattaaatttattgcggtttttaagttatttattgggaaaggcgttcgaggagagaaattggtagatttattagcgcgtattcgcggggtttttgcgatcggagtcgggtagtggtttttaggttgagagcgcggttgggtcgggtgacgggtgtggtcgcgatcgtaagggtagttgttgcggggtttttttttttttttatattttatttttattcgttttaacgttttgcgtttttttttaatattttttagg

SEQ ID NO: 164 - DNA, 5760 bp, Artificial Sequence
  chemically treated genomic DNA (Homo sapiens)
tttgaaaggtgttgggagaaggcgtaggacgttaaggcgggtggaaataggatatgaaagaaagagagaatttcgtaatagttgtttttgcggtcgcggttatattcgttattcggtttagtcgcgtttttagtttggaagttattattcgatttcggtcgtagaagtttcgcgggtgcgcgttgataggtttgttagttttttttttcgagcgttttttttagtgaataatttaggggtcgtaatgaatttggttttgtagtttttttaatgttttttttaatttagattggtggtttcgttttaaggcggtgttgagattttaaagaatgttttttttttttaagttgcgtgatttagattttgggattcgtacgtatttggcgtttttcggttcgtattttagaagtacggatcggagaaatttggttgtgagagttcgaggtttttggaggaattattgatatttggtttgttgatcggttatttttaagtttaggaaagtgttttaggttggacggttttttgatcgttagatagtatttattcgcggtttcgaattatattagtagttgtttttagtagtttatttttgttgggtttattcggtaataaaagtttttgcggtcgcggttatatttttgttaatttaaagttgatagtttattttgttacggtagttttggttattatttataggggtgtgttgtcgttggcgagatatttttcggatttaaagttggtttggttacgtttattttagattttaggacgttagaggaggaaagggaggggcgtgtgggtagcgaggtttttacgttttcgggaggagttttaaggagtttttatttaggggttttagtttttagtcgttagatgtgtcgtagtttgttgggagtttcggtaggtttgaggtcggagaggaggtgttttacgtttaaagtgggagttatatttcggatattaggtgggggtttttaggtttttgaggataggagtagtggagtgtgtattttatttgtggtagtggtggtggtggtgagtgtgtggtatgcgttattatacgtgggaagtattttaaattgttttaagtaaggttttattatttgttattatttgtgttttttagtggtgtttttgtgattgtaaggttgaattttattgttatttttagaaatttggatttttgtgtttgttttatataatttcgttgtttgtgttatttttgtgtatagttttttattgtgatggggtgaaagattggattagacgttagaagattcgagtgtttttagtagtattgaaggttaatagatgataggtaggtagatcgatcgatcgattgattttgagtattagtattggtatttttggttaatgggtgatgtagtataggttataattgttcggagagtttttttattatttgtaaaattatatgaagggaaattgttttgtaaggtattttataaatgtgggagttattttttttaggtagttttgtgttttgagttttcgattatttgtttaaatgattatttgtcgggtgtagtggtttatgtttgtaattttagtattttgggaggttgaggcgggtagattatttgaggttaggagttcgagattagttagattattatggtaaaatttcgtttttattaaaaatataaaattagatatatatggtagcgtacgtttgtaattttagttattttggaggttgaggtaggagaatggtttgaatttgggaggtagaggttgtagagacgagatcgtattattgtattttagtttgggtaataagagtaacgttttattttaaaaaaaaaaaaaaaaaaaaaaattttaatttgaaagtttgagatttatgtttaatataaaatattttaaaagagaagttatagtagttagttatttggtaaagtttgagtataatttaaggtgtaaatagaatagtgattttgtaaaaagtttggttttagttaggcgtggtggtttatatttgtaattttagtattttgggaggttaaggggacggtgggggtggggtggattataaggttaggagtttaagattagtttggttaagatggtgaaatttcgtttttattaaaaatataaaaattagtcgtgcgtggtggtaggtgtttgtaattttagttatttgggaggttgaggtagagaattgtttgaatttggaaggtagaggttgtagtgagtcgagattgtattattatattttagtttgggtgatagagtgagattttattttaaaaaaaataaaaaataaaaaaattttggtttttatgttttatttaatattagatattatattatgagattatagaatttattttgtaaagtttttttaagttattgttttttaaattgtggttgtgtggtttgttttgaatattagtattagtattatttgggaatttgttagaaatgtagatttttgggttttattttagatgtattgaattagtagtttttggtggtaggatttagtgatttgttttaaaatattttttagatgatttttgttataaagtttgagaattattggtatttgttgatatagtagttgtttaataaaatttattggggttatatgttgtggtttatatttataattttagtattttaggaggttgaggtgggcggattgtttgagtttaggagtttgagattattttgggtaatatggtaaaatatcgtttttaataaaaatataaaaaattagtcgggtgtggtggtgtatgtttgtagtttttgttattcgggaggttgaggtatgagaattatttgagttttagaaacggaggttgtagtgagttaagattatgttattatattttggtttgggttatagagtaagattttgttttaaaaaaaaaaaagaaaaaaaggttgggtttagtggtttatgtttgtaatattagtatttttgaaggttgaggtgggcggattatgaggttaggagttcgagtttaagattagtttggttaatatggtaaaattttatttttattaaaaatataaaaattagttaggcgtggtggtacgcgtttgtaattttagttatttgggaggttgaggtaggagaatggtttgaattagggagggggaggttgtggtgagttgagattgttttattgtattttagtttgggtaatagagtaagatttcgtgttaaaaaaaaaaaaaaaaaaatttaaaaaaatttattggataattttgtgtttagtagttttatttatgaagattgggttttttttatttattgatagggttaggttttggtatattgttttgattttggttatttgtaaatataataagtaatttatatagtaaaagatagtttaagaaagtttaaagtttagaatttagattaaagaataatgtagaaattattaaaataggttaagtgtagcggtttatgtttgtaattttagtattttgggagtttgaggtgggtggattgtttgagtttaggaatttaagattaatttgggtaatatggtgaaatttcgtttttataaatataaaaaattagttaggcgtggtggtatttgtttgtggttttagttatttaggaggttgaggtgggagaatggtttgagtttaggaggtcgaggttgtagtgagttatgattacgttattgtattttagtttgggtaatagagtaagattttgttttagaaatagatagatagatagatagatagatagatagatagatagatagatagatagatagatcgatcgatagatagatagatagatatggggttttattatgttggttaggttggaattgaatttttggaattaagtgattattttgttttagttttttaagtagttgggattataggtgtgtattattgtgtttggtaggttttatatttttgttgtttttagatgtggataaagtttttattttttatttatgatttttttttattttttttatagtagttttgttttttatttgggataatttatttttagatattaattttgaattaatatggttgaaattagtttagattaaatttttaggagataaaaaatatttattttaatgtataattatagtatttatatgttttagtttagggtaggggttgggagttaggtaagaagggatgtatttagtttgttttgtttttaaagagcgggtaaatagttaagttattttttatttttagtatagatttttagaagttttagatattaggatgtaatggtagggtttattgttttaaaatagtttaaataatttgtttttaggaaggtaagttttttgttttttggttttttgtttattattaggatataatgtttttcgtttggttagatatttgttgaaaggttggatataggataacgtatttatttttttatttatattaattattttaggtttttgatattttattttggagtattgttgaagttagtttttggaggtagtgttgacgtagagggggtaattgagaatagagtttaaagttttttgggagcgtggaattgggaagtttatagtgtaggaggtgttgtcggagattttgtagaaaggaaagaaaatttatgaagtgggtaatgagattttgttgtggtttttgttttttaagattttttaatattttatttttttaatggttttgattttattttatttgttagtagttatgttttttgtagtatatttttgcgggtagttttgattttattttagaagtagaatagggagaggtggtattgagtcgagggttggtatttattattggttttgtttgatatttattttttttttagttggtttagaggtagtttaattgttagttttttttttttttttgaagatggagatgtaatttattgagttttgtgggttttgagagaagatgaagttattgatatgagttatagttatagtatagagtacggggtattaacgtgggcggagcgtattagtaattagggttcggaagtagagttgaaggagggttaggttgtttttaggaggtattgtgtaatattttagggatataggtaattgtgataggggaaatgacgtgttgagggggagggtaggaatgtatatatatatataaggtgtgtggataacgattatatgaaattaaattatgagggtagagattaggttttagataaatatttgtttttttagtataaggattagggttaaagattatagagtagatgttggggaaaattgggaattgagaagtagttattaaaaagtatgaaattggttatgtgtagtgggttacgtttgtaattttagtatttgggaggttgaggtaggcggattatacgaaattaggaatttaagattagtttggttaatatggtgaaattttatttttatcgaaaatataaaaattagttggatatggtggtgggtgtttgtagttttagttatttgggaggttgaagtaggggagtcgtttgaatttaggggcggaggttgtagtgagtcgagcgcgttattgtattttagtttgggtaatagagtaagatttcgttttaaaaaaaaaaaaaaattagttaggtatggtgttgtgtgtttgtaattttagttatttaggaggttgaggtaggagaatcgtttgaatttgggagttagaggttgtagtgaattaagattattaggttattgtattttagtttgagtaatagagcgagattttgttttaaaaataaaaataaaaatttaaaat

SEQ ID NO: 165 - DNA, 5575 bp, Artificial Sequence
  chemically treated genomic DNA (Homo sapiens)
gatagagaaggtttgtgtttatttatttgtatattagttttttgttttggttttgatattttatttttattttattattttgttgtatgtattgtatttttgtaaaaagatttagggtgtaaataaataatatatttattattttttttatagattttagtttttttgttggtttcgtgtttggggtagattttttttatatattttttttggaaggagtaatttttttgtgttttgttgacgtgattgattcgagaattttatagagaattttcgaggtgttttttggtaggagagtagatgtgattttgagcgatatggcgtttaatgttatagggtttcgggatttcgattatgataggtttattagtttgtgtttgattttttttagcgtgattttagatattttgtaatttggggggatatttttttgtaaaatttgggttggaagttaaagtcgtcggttatagaggagattgatagaggaattttagaatgtaaggattattaaatttgaagttagtaggaaagagttattagaagtgtattttttggttatatagtattacggaaggaagggtattgtgaagtagtgaggattttttgtgttatttttataatggttattagttttttttaagttagaaacgtagtttgagtttttgaagagtttttgggagatttgagttgattttggagatggagtaggataagtggggagtttttttttttttttttttttttttttttttaattaaaaagagatgataaaattaagtttaggggttatggaaaatgaaaaagttcgttatattgtgatttgggaagagaaagttattaagagaaagaggtgaggatggaaggatggagaaaaatagattgtgggaaggattagaaggaattcgtcgaggtagggatgggtgtgtttatgtgtgttttgacgggattttattttatagattgttaaattgttatatataaataggttttttatttttgttttgagagtattacgtatagatttttagtttttagtgtggttgtttaaagtagaaaatttgggggttgggtgaggttatttatgtttgtaaatttagggttttagaaggttgaggttgggggattgtttgaagttaggagtttaagattaatttgggtaatatagtaatattttttatgtttataaaaatgaaaaattaaaaagtaaattaaaagaaaaatttgaaatttttatttggggattaatttttgtttttttggtgaataatatagtaatttacgtattttttaagtagtaaaagttttcggaataattagggaagacgtatggtttgaatttatttaggtagtgggtttgttttggtttttgttggaaatttatattagtgtttgggtttttaagaatataaatgtaattgttaaagtaagtagtgatgtggtgtgtttatttttttttatttatttaggaatttgacgtagttttatatttaataaaataatagagattgtattattttaaggtatttttatgttttgaagttttgttttttttaaattggtttttttaaagttattttttggaggtgtatttattttttaagaagagtttgttgattatgattaaattttaaggattagtgggggaagtttggaaatttaggaatttttattaggaatttggggttttgtttagtttttcgaaggaaattgcgggttagatgttttgatttttttttttttttgagaaatagaattttattttgttatttaggttggagtgtagtgaagtgattttggtttattgtaagttttatttttcgggtttacgttattcggttttagtttttcgagtagttgggattataggcgtttattattacgttcggttattttttttttttttttttgtatttttagtagagacggggttttatcgtgttagttaggatggtttcgattttttgatttcgtgattcgtttgtttcggttttttaaagtgttgggattataggcgtgagttatcgcgttcggtcgttagatgttttgattttttattttatttttggttgtagttaggttgttaagtttagggatttttgttttattttatttcgtttttttattttattttattttcggggtatataatttggaagtttttttttgaaagaaggaaaatttattgtagatttttaggaatagtatttttttagagggaagttaggggttgggtagagacgggaggaggagaggaagagaatatggaaacgagtaaggtatattttttttaggaaggttttaatttgaaggatagataaaggttattataataatggtggggtttgattttattttattggatgttgtgttttggtttgtagagtattgggaaggtagtttagtagtataaattgtatttttagtgggtttagaaaaaagtaaaataacggattgatttaagttgatattgagtagtaaaattttgggaagagttaacggtgtaagtttgttcgaggaggttgtcgtgggcgcggttattttatatattacggcgcgaggcgaaagttttagtggaagcgcgttttgcgtaaagtcggggggttttcgattgcgttttggtttagttttcggtttcgagtttttttcgtgcggagttttttaggggtggcggtttcgggtgcggacgcggagtttttaggattagtcggtgcgtagattcggttttttacggttcgattgttacgtaggtttcgcgagagcgtaggcgtaagtgtcgcgataaatgggcgtcggcggagcggagggagattcgagcggcggcggtaagttggttgcgagcggttgaggtaagcggttcggttcgcgcgggcggcggggtttcggggtttcgggggtttcgggaatggtaagggaggggtcgagggttcggatcgggtgtgttcgttagggtggggtataacgatttagatttcgtgttttaggatttcgcgttcgtttcgttttttatgggcgcgtttttttttttgtgttttttttttttttttttatttttttgtttttattttttttttgggttgtgttggggatagcgggtttttcgtttgggttttcgtagtcgttttttgtgttagggcgggcggtcgaggggcgcgtgttcgtggttttagtttcggggtttcgttgtttatcgtgtgggttttcgggttagggtgtcggcgcgtcgaggaaggggtttgagttggcgtttggtggagaagtcggggttgtaggggtttttggtattttggtggttcgcgtcggttcgtttttaggaagggggcgtgtgggttcggttttttttcggggatggtaagggttattttgatttcgtttgggtaatggaggaattgggttgtggagtttttttttaggcgggtttgtttttgcggggttggtagtttggggagtttaggtttttgtttgtattaggttaaggtttttgttaaatggaaatttagaaattgtgtagttgtagaagttttatttttggtttttaaacgcgtttggttgttttttagttgtggttggtgggtcggtttgttatgagtttatagtaagcgtcggtgttgggggtgtaaagttttttattgcggtttgtttttagttttttaaagttagatagatttaagttttaattttcgttttgtaattttttgaagtttcggttttattatttttagaatttgtgtaaaaagatttaatttattattttgttgagattgagtttataaatatagtgttggttaatttgtagtcgtatttttattatttagcggtggaagatttgagggatattggtttcgttttttataattttgtaagtagattttattgttatgagtttatagatgaggaaattgaagtttaagaagtttcggtgttcggaaatgttagatatttttttttttgatatttagttgaaaatagtagtagtatttattaatgttattagaaataaataatgaaaatgagtatagttgtgatgattattatttttattgttattgttgtatgtttcgtttttgatttttagaggttagattttttttttaattaattattattattttttgaaacggagttttgttttggtatttaggttggaatgtagtggcgcgattttagtttattgtaatttttattttttgggtttaagaaaattttttgttttagttttcggagtagttgggattataggtgtacgttattatatttggttttagtagagatggggttttattatgttggttaggttggtttcgaatttttgatttgtggtgatttgtttattttggttttataaagtgttgggattataggtatgagtaatagtgtttggtttatgtttatttatttatttatttatttatttatttattttgagatattgttttatttcgttatttaggttggagtgtagtggtgcggttttaggttattgtaatttttgttttttagttttaagcgatttttgtgttatagttttttgagtagttgggattataggcgtatattattatattcggttagtttttgtattttattagaggtggggttttgttatgttggttattttggttttgaatttcggatttgttttcgtttttcgaagtgttgggattagaggcgtgaattattttgtttgggtaagaggttagattttgttgtgagtgtttttggtaggtagttttaggtattaattgattggatttaggaatttttagaaatttgggaaagtattatttttggttttgggtgtgtttgttgagggtgtttttagaggagatgagtttgggagtttgagtggattaggtgttgaagatttatttttagagttaggggtagtatttaagagtttgggggtttggagaggataaaaatagagaaaaggcgaatgtgtttatttgtttgtaggagttgggatatatttttttttttttttttttaatagtagtattttaagttcgtcggtttttggtttttaggatttgttttagtagtttttcgaattgagaattatattatcggatttttggttttgaggtttttagatttggattgtgttatattgttaggtttttagggttttaatttgtagacggtttgttgtgggatagtttttgtaatcgcgtgagttagtttttttaataaagttttttttttgtgtttgtttttgtgttttgttggttttgtgtttttggagaatttttttatagtgtagttgggggacgtgttatttgagtgttgagtttcgtttttcgggcgttagttgtttatttgtttatgtgtaattgagatttaattggtggtttgttggtggggatttggtggtatgtttttttgtttttattttttgtttggtaaattggtagtatggtttttagttgttattgaagaatgtggttataggtatgggtgtattatgagttttaatgtgcgttaggggagtggggttgtttagaggttttgttgattgtacggttgatggtacgtggaaaggttgtttttgattagttttttgtttgttttcggaagg

SEQ ID NO: 166 - DNA, 5575 bp, Artificial Sequence
  chemically treated genomic DNA (Homo sapiens)
tttttcggggatagataaaggattggttaggggtagtttttttacgtgttattagtcgtgtagttagtagagtttttggatagttttatttttttaacgtatattggagtttataatatatttatgtttgtaattatattttttaatggtaattgggagttatgttgttaatttattagataaaaaatggaagtaaggaagtatgttattaaatttttattagtaagttattaattgagttttagttgtatatggatagatggatagttggcgttcgggaggcggggtttagtatttaggtggtacgttttttaattgtattgtaagagggttttttagagatatagagttaataggatatagagatagatataagagaagggttttattggggaaattgatttacgcgattatagagattgttttataataggtcgtttgtaagttggagttttggaagtttggtagtgtgatatagtttaagtttgaaggttttagagttaggggttcgatggtgtaatttttagttcgaggggttgttgggataagttttggagattaaaggtcggcgagtttggagtgttgttgttgaggagaggagaggaagagtgtattttagtttttgtaggtagatggatatattcgttttttttttgtttttgttttttttaggtttttaggtttttagatattgtttttgattttgaggatggatttttagtatttggtttatttagatttttaagtttattttttttggaaatatttttaataggtatatttaaaattaaaaatgatgtttttttaggtttttaggaatttttgaatttagttagttgatgtttgaaattatttattaggagtatttatagtaaagtttggttttttgtttaggtagggtggtttacgtttttaattttagtatttcgggaggcggaggtaggttcggagtttaagattagaatggttaatatggtaaaattttatttttaataaaatataaaaattagtcgggtgtggtggtgtgcgtttgtaattttagttatttaggaggttgtggtataagaatcgtttgaaattgggaggtagaggttgtagtgatttgagatcgtattattgtattttagtttgggtaacggggtgagatagtgttttaaaataaataaatgaatgaataaataaataaataaatataagttaggtattgttgtttatgtttgtaattttagtattttgtgaggttaagatgggtagattattataggttaggagttcgagattagtttggttaatatggtgaaattttatttttattaaagttagatgtggtggcgtgtatttgtaattttagttatttcggaggttgggataggagatttttttgaatttaggagatggaggttgtagtgaattgagatcgcgttattgtattttagtttgggtgttagagtaagatttcgttttaaaaaataataataattaattaaaaaaaaaatttggtttttgggaattagaaacgaggtatgtaatagtgatagtaaagatgatgattattatagttgtgtttatttttattgtttatttttagtgatattaataagtattattattatttttaattaggtattagaaagaaaggtatttgatattttcgagtatcgagattttttgaattttagtttttttatttgtaaatttatgatagtgaaatttatttgtaaagttgtggggaacggggttaatattttttaagttttttatcgttagatgatgggaatacggttgtaggttgattagtattatatttgtaagtttagttttaatagggtggtgaattaggtttttttatatagattttagagatgatgaaatcgaagttttaaaaagttatagaacggagattggaatttgggtttgtttggttttggaaggttgaagataaatcgtagtaaagaattttgtatttttaatatcggcgtttattatgggtttatggtaggtcggtttattagttataattagggaatagttaagcgcgtttaaaagttaaaggtagaatttttgtagttgtatagtttttgagtttttatttaataagaattttggtttggtgtaagtagaggtttgagttttttaggttgttagtttcgtagaggtaggttcgtttggaaggaggttttatagtttaatttttttattgtttaaacgagattagggtggtttttgttattttcgaggggaaatcgggtttatacgttttttttttgagagcggatcggcgcgagttattaggatgttaagagtttttgtagtttcgatttttttattaggcgttagtttaggtttttttttcggcgcgtcggtattttagttcggggatttatacggtaggtagcgggatttcggggttgggattacgagtacgcgtttttcggtcgttcgttttggtataagggacggttgcggagatttaggcgaggggttcgttgtttttagtatagtttaaagggggagtggggataggggagtggggagaggaggggagagtatagagaggagagcgcgtttatgggagacggggcgggcgcggggttttgaggtacggggtttgggtcgttgtgttttattttggcgagtatattcggttcgggttttcggttttttttttgttattttcgggattttcgggatttcgggatttcgtcgttcgcgcgagtcgggtcgtttattttagtcgttcgtagttagtttgtcgtcgtcgttcggattttttttcgtttcgtcggcgtttatttatcgcgatatttgcgtttgcgttttcgcgagatttgcgtggtaatcgggtcgtaaagaatcgagtttgcgtatcggttgattttggggatttcgcgttcgtattcggagtcgttatttttgggagatttcgtacggaaaggattcggaatcgaaggttgagttaaggcgtagtcgggggtttttcggttttgcgtaggacgcgtttttattaaggttttcgtttcgcgtcgtaatgtgtggaatagtcgcgtttacggtagttttttcggataaatttgtatcgttgattttttttaaaattttgttatttagtattagtttgaattaattcgttattttgtttttttttgggtttattagaaatgtaatttatgttattaggttatttttttagtgttttgtaagttagggtatagtatttaatggggtgaggttaggttttattattattatggtaatttttgtttattttttaaattggagtttttttgagaagagtgtgttttattcgtttttatattttttttttttttttttttcgtttttgtttagtttttggtttttttttaagaagatgttgtttttaagggtttgtaatgaatttttttttttttagagaaagatttttaagttgtgtgtttcgggaatgaaatggaataagagaacgaggtggagtagggtaagagtttttggatttaataatttgattgtaattagaaataaaatgaaaagttaaaatatttggcggtcgggcgcggtggtttacgtttgtaattttagtattttgggaggtcgaggtaggcggattacgaggttaggagatcgagattattttggttaatacggtgaaatttcgtttttattgaaaatataaaaaaaaaaaaaaaaaatagtcgggcgtggtgatgggcgtttgtagttttagttattcgggaggttgaggtcgaatggcgtgaattcgggaagtggagtttatagtgagttaagattattttattgtattttagtttgggtgatagagtgagattttgttttttaaagaaaaaaaaaaattaaaatatttgattcgtagtttttttcggggagttggatagagttttagatttttgatggagatttttgggtttttagattttttttattggtttttggaatttaattatagttaataaattttttttgagggatgagtatatttttaggaaatggttttgaggaagttagtttaaaaaaaataaaattttaaagtatgaaagtattttaaaataatgtaatttttattattttattaaatataaagttgcgttaagtttttagatgagtaaaagaaaataaatatattatattattgtttgttttggtaattatatttatgtttttgggagtttagatattgatataaatttttagtaaaaattaaagtagatttattgtttggataaatttagattatacgttttttttaattgtttcgggaatttttgttgtttgaagaatgcgtgaattgttatattgtttattagaaagatagaagttaatttttagatggaaattttagattttttttttggtttgttttttggttttttatttttgtagatatggggggtgttgttatgttgtttaggttggttttgaatttttgattttaagtaattttttagttttagttttttaaagttttgggtttataggtatgagtggttttatttagtttttagattttttattttaaatagttatattaagaattggaaatttgtgcgtggtgtttttagagtaggggtggaaagtttgtttgtgtgtgatagtttaatagtttataagatgaagtttcgttaaggtatatatgggtatatttatttttgtttcggcggattttttttgattttttttatagtttgtttttttttatttttttatttttattttttttttttgataattttttttttttaaattataatatagcggatttttttattttttatggtttttgaatttagttttgttatttttttttggttaaaaagagagagagagaaagagagagagagattttttatttgttttgttttatttttaaaattagtttaaattttttaggaattttttaggagtttaggttacgtttttagtttaaaaggagttaatgattattatgaaaatggtataagaaatttttattgttttatagtgttttttttttcgtggtattgtgtggttaagaagtatatttttgatgatttttttttgttggttttaggtttgatgatttttatattttggaatttttttgttagttttttttgtaatcgacggttttgatttttagtttaggttttataaaggaatgtttttttaggttgtaggatgtttggggttacgttgagaagggttaggtataggttgatgagtttgttatgatcgaggtttcggaattttgtggtattgggcgttatgtcgtttagaattatatttgtttttttgttaggaagtatttcgaggattttttgtgaggttttcgggttagttacgttagtagggtatagaaaagttgttttttttagggggaatatgtgaagaagatttattttaagtacgaagttaataggagagttgggatttatggaagaaatggtgaatgtgttatttatttatattttgaatttttttataaaaatatagtatatgtaataaagtgatgaaataaaaataaaatgttaagattaaggtaaagagttaatgtgtaaataggtaaatataggttttttttatt

SEQ ID NO: 167 - DNA, 5992 bp, Artificial Sequence
  chemically treated genomic DNA (Homo sapiens)
ggaggttaagtcgggtagatgataaggttaggagttggagattagtttggttaatatagtgaaatttcgtttttattaaaaatataaaaattggtcgggtatggtggtacgtgtttgtagttttagttatttgggagttcgaggtaggagaattgtttgaatttgggaggtagaggttgtagcgagtcgagattatgttattgtattgtagtttgggcgatagaataagattttgttttaaaaaataaataaataaaaaaggatattagttttgtaatatattatgattttatatgttattttgaagtattttatatatattagtattttagaaaataataaatttatttttttttgaattaaagtatatttatatgtattattggtattaaaaggtagtatttcgtatgtatacggtgttattttgtggtagttgtaagtatttgtgtatttatataaaattatggttcgtattaaataattgttattttttttgataagttatgtgtataggttattgagtaaaaatttttagtttaaaagtcgttgtttttttttaaaataatttttgaaaaagaatattttttagaatgtttttagatggatataatttaaaaggagattaagttagaaattttagattgtttgttaattatattattgttaagatattgaattttagataaattgtatagttattttggattttagtttttatatttttaaggttgtttaattaattattaattaagttatttttaatttaaaattttatttgattttagttttagaaaattgtttttatttttagtatttaatatgaaataaagggttgtttatgatatattttattttttttattaatatgagtttgtttggttatgtattttgtttgaattttttttagaaaaaagttttaatttatttttttttttgtttaaataggttttttttaaataatatatattaaaaagattttattgaattataaagaaaagtaagttaaagtaattgaaaataagttttgaaatattttgtaaagataagtgtgtatgtatttgataagatgcggttaatggtaaattaagtttttaaaagttaatgtggaagaagtttttttaaagtttttagaattttgggtgttattttgataaataagaattagtacgagtttagagtttgggtagttttttttattataatgtggattaaatattattttgtattgtagatgtggtattttagatttatttgaattatcgttttatttttttattattaattattaatttagtttttgttttaaaatgtttttttttaaagtatttttttttatttaatttttttggtatttatttattttagatatttaattttttagttttgtaggttaaaatatttattatagtattttgttttttagagattggtttaagaatttgtattagaattatttggaatgtttgttaaaatatgttattttttatattttatattgtagataaatattgtttaataaaaatatacgagttatatatataattttaaatgttatggtaattatattgaaaataaattaaaaagaagttagtgaaattattttaataatatattttatttaatttaatgaatgtaaaatattattttaagatgtaattaattagaaaatatattaatataatattttatatttattagtttagatgtttttgaaatttggtattttatatttgtagtatgttataatttggattagtatattttaggtgtttaagtgtggtttgaattagttttggggaaggtggaataaaagttaggaatttataaaatatataggtaatttttttatatgattaagtttgaggttattaatttagattgttttgtatataatttattttataattattattgaattaatatttgaaaaaaaaaatgtttttttaattatgttaattttaagaatttagaaaattttggtatttttaatttaattaatatagataggtatttatagttttttaaaagtgattttatttatttatttaatttattttttaattagaaaatgttttggatttttatataaagtttttttaagtaaatatttatttatttaataaatatttgttgagaatttattaaatgttattatggattttataggtgttaaaaaaaaataaaataaaaatggaagttatagtttagatatatattaagattaattgtttataattatataaattaaaatttaagttattttgatttttttgaaatgttttaattataaatataaaatataagttttatatttttgttagtatgatttcgtgaaattaagttaattaattgtagataaattaatttaaatagttgtttgttattttttaataaaattttaatgtataaggattaataatggaaaagtttaaaatgtttttttttttatttttataagttgtgttgttattggtgagtgtaagttttttattattttttttatttgatttgaagttttttggattttgatttgtattttttttatgataataaatttttagatttattttaattttatttttgatataggaaaatagattaggtataatataaattattatataattttttataataaaataaatgttttgaaatagtattatgagatgttatgaaaatattttagagaggtttttatatagtttgaagggttaaggaaaatgtttttaagtaaagtaatatttaagttaagaaagagtgtgaatataattaggaatttgagtagataaaatgaaatttttaggtagagaaggaatatatattatggaaagtattaaggtggaaaagaatattggagggttaagttattgaaagaagtagatagatgaggaaagtaatttgatagggggttttttaggtaggtagaaattagataaggttaaatttatgagtttttaatttttttttaaaaaaaaagtataaatatttaaattaaagtagattataaattttttaaaagatatagattattttttttaaattttatgttttatgtttttttatagagtatagatatttagtattttttttgtatatagaaaaatcgtaattgtgttagttttttaatttttagaatttttaggttatattaataattatgtgtagttttaggtaatttaaaaagtatattattatgaaatttaagaaaattttttttaaagtgttgagttttaatataaaattttttagaaagagagggagtttttatgtggaaagatatgggtattatggtttattagcgtgacgttaaaattttagttttatttaagtttttagtggaaggggtgaaggatatttaatttttttgtttttttattttttattttttttgatattgttttttatattaaagattgtgatttatatatatatagagattaaaggatttaaggaaaaaaattttattgggttaagttaatttgttatttattatatttatgttttatttttttaattaatcgaaatatgatatatataacgttgtataggtagaattttaagttagttttttatatttttggtttttagagagcgtatttatataatttttttttttggagtttgggtagaatttataaatatgagtagatattatttttgggattaggtttattaaaagggagatttgattgagttttatttaattaggtgagtttttaaaaggggttgggggttttcgaaagttacgaagatgggaagtgttagaaggtttgtaaaaggtttagttgatatatagttggtttttggttaatagttggcgagataaaaagggattttagtttaataattataacgaaattttgttagagggtttagaaggattttaaattttagatgagattttatttgtagattttttgattttaattttgtgtgattgagtaaaatcgttaattatgttacgtttagatttttgatttataggattgagaaaacgaataggtgttttgaagttattgatttgtggtaattcgttatgtagtaatagaaaattaataatatttaagtattttttatataacgttcggtagatatgaaagttttttaggcgttattttataaatatttttttagttgttttaagaataattttttttttaaatttgatatgaatattaattgtgtaatatttttttaataatttttattttttttaatgaaaagttattgagtttggtgagttaagatttattgaaatatttttttatgttgatgggtttttttggtgaggtgattttatttttgttttgttttttaagggtgggtagggtggatagaacgtagtttggattttcggacgtagttttttatcgtttcggattcgtttatttttttggtttttgaggagggttttaagttaggatagacgtggaaaaagggtagtaaaaaggatgtagtttttttttttaatttttaatttaatttttcgggaaaagttgcgtttttatatagaaggcgaattttgtaaagttgtggtttggttgtcgcgtacgtagtcgttttacgaatttttaaagtatttagcggaagtttagatcgtttattaggggttatatgggttatttcgcgagtagttggcgaatagttttttttagtttgaaagtatttttgaaattcggaaattgtgttttttggttttttagtttataagtttagagagtggttattgaaattggaatcgttatttttttttttcggttttaattagtagattacgattagaagatatattttaatttatatttatcgtagtgttatattcggtatagcgcgattaggtttattaattgcgtttgcgcgaatcggtcgttttcgcgatattataggaaggttgagagaaagggtaggttttcgttgcgtggggttgggtttaaaggttcgtcgcgtttgcgtaaaggatttgacgacgtgttgcgtcgttatttttgaaacgtttggcggggaagtgttgttggagtcgttgtggttgttgttcgcggagtggaagcgcgtgtttttgtttgtgtttttggttatggcgttgtagttttttcgggagtagggaattattttgcgcggggagcgtcgaaatcgtggtcgagtttttttgtaagttttcgcgtaggttaatatatcggggggaacggagtcgtgacggtttagtaggtttatagttcggtttttgatattagagaagtaatttggggagaggcggttgtaggcgttttttttagacgcgttgttaacgtggagttgtaggtttgcgtgttgttggggtttatttcgcggcgtagtttttttcggagcgtttttttttttaagtgtagattcgttttattttttattttttatttttcgatataggatacggtgtgattggggtgggttttagtgtatgcgtatgtgtgtgttttttttttttttttttaattgcgagagtatttttatttttttatttaaagtgattattgggtatgaggttggtagtagataagattttgggaatttttgttttcgaataggttagttgtacgttttaaaggaatttggtaggatttgggagggaaaggggaagataaaggtttgtttggagtatagtgattatttagttagttgttaattcgaatgtaatagtttattttgatattttttagttttataatttgaatttggatttggattataatgaggtgaaatttggtaataataagttgatatattttggttttttttttttgttacgtgaaagtaattatttgttttatttagaagtaagatttttaaggatttttaatgttattttgtatttattttgtttttagtaagatatacgtgtgtttagttatttatagttgtatagtttaatgaaaatatagtaatatttaaatatattttattttttagagttatgtagggataatgaattttttgtaatattttttttgtttgtagt

SEQ ID NO: 168 - DNA, 5992 bp, Artificial Sequence
  chemically treated genomic DNA (Homo sapiens)
gttgtaagtaaaagaaatgttatagaaaatttattatttttgtataattttggaaaataaaatatatttagatgttgttatatttttattaggttatatagttataaatgattgaatatacgtgtattttgttgaaagtagagtaggtataaagtggtattaaaaatttttaaaagttttgtttttaagtaaaatagataattgtttttacgtggtaaaaaaaaaaagttaaagtgtattaatttattattgttaaattttattttattgtaatttaagtttaaatttagattatgaggttagaggatgttaaaataggttgttgtattcgagttagtaattgattgaatagttattgtgttttagataagtttttattttttttttttttttttaaattttgttaggtttttttagaacgtgtagttggtttgttcgaaaataagggtttttaaagttttgtttattgttagttttatgtttaataattattttgagtgggagggtgagggtgttttcgtagttaaaaaaaaaaaagaaaaatatatatatacgtatatattggggtttattttagttatatcgtgttttgtatcggaaagtaaggggtgggaggtgggacggatttgtatttaaaggaagaaacgtttcggaagaggttacgtcgcgaggtaggttttagtagtacgtaggtttgtagttttacgttagtaacgcgtttggaggaagcgtttgtagtcgtttttttttagattatttttttggtattagaggtcgagttgtgggtttattgagtcgttacgatttcgtttttttcgatatattggtttgcgcgagaatttatagaagaattcggttacgatttcggcgtttttcgcgtagggtgattttttgttttcgggagagttgtagcgttatggttagggatataaataaaagtacgcgtttttatttcgcggatagtaattatagcggttttaatagtattttttcgttaagcgttttaaaagtaacgacgtagtacgtcgttaggttttttgcgtaggcgcgacgagtttttaagtttagttttacgtagcggggatttgtttttttttttagtttttttgtgatgtcgcgggagcggtcggttcgcgtaggcgtagttggtggatttggtcgcgttgtgtcgggtgtgatattacggtaggtgtaggttaggatgtgttttttggtcgtggtttattagttggggtcgagggaagaagatgacgattttaattttagtagttattttttaggtttatgaattgaaagattaaggagtataattttcgagttttaaagatatttttaaattgaaaggaattgttcgttagttgttcgcgaagtggtttatgtgatttttagtgaacggtttaaattttcgttagatgttttgggaattcgtaaagcgattgcgtgcgcggtagttaagttatagttttatagggttcgttttttgtgtgggaacgtagtttttttcgagaaattgggttagggattaaagagaagaattgtattttttttattgttttttttttacgtttgttttggtttagggttttttttagaggttagaggggtaggcgagttcggggcggtagggggttgcgttcggaagtttaggttgcgttttgtttattttgtttatttttagggggtaggataggaataaggttattttattaaagaggtttattaatatggaagaatattttagtgaattttgatttattaagtttagtgattttttattgaaaagggtgagaattattaaggagatattgtataattaatgtttatgttaagtttgaaaaaaaaattatttttaaagtagttaggaagatatttgtaaaatgacgtttgaaaaatttttatgtttgtcggacgttatatgagaaatatttgagtgttgttagttttttattgttgtataacgaattattataaattagtggttttaaaatatttattcgtttttttagttttgtaggttagaagtttggacgtggtatagttgacggttttgtttagttatataaggttgaaattaaagggtttgtaagtgggattttatttgaggtttggggtttttttaagttttttggtagaatttcgttgtggttgttggattgaggtttttttttgtttcgttagttgttggttagaggttagttgtgtgttagttagattttttataggttttttaatattttttattttcgtggttttcgggagtttttagttttttttaaaggtttatttgattaagtaagatttagttagattttttttttgatgaatttagttttagaagtgatatttgtttatatttgtaggttttatttaaattttaggggaggggattatgtagatgcgttttttaggggttaggaatgtggggaattagtttagaattttgtttgtatagcgttgtatatattatgtttcgattagttggaagagtaaggtatgggtgtgataggtaataggttgatttgatttagtaaaatttttttttttaaattttttaatttttgtgtgtgtataaattataatttttgatatgaagagtaatgttagggaaagtgaggagtaaagaagtaagggagttggatattttttattttttttattgggagtttgggtagagttagaattttggcgttacgttggtagattatggtgtttatgtttttttatataaaaattttttttttttttaaggaattttatgttaaaatttagtattttaggaaaggtttttttgagttttatgatgatgtgttttttaagttatttgaagttatatataattgttagtataatttggaaattttagaaattaaaaggttggtataattacgatttttttatgtatagaggaagtattaaatatttgtattttatgaggagatataagatatgaggtttagaaggaatggtttgtgttttttgaggagtttgtagtttattttggtttaaatatttatattttttttttaaaggaaaattggaagtttatgagtttggttttatttggtttttgtttgtttgggaagttttttattagattattttttttatttgtttgttttttttagtaatttggttttttaatgtttttttttattttagtgttttttataatgtatattttttttttatttagaaattttattttatttgtttagatttttaattatatttatatttttttttaatttaaatgttattttgtttaaagatattttttttggttttttagattgtataaggatttttttgaagtatttttatagtattttatagtgttattttagagtatttattttattgtaaaaaattgtgtaatggtttgtgttatatttgatttgtttttttgtattaaaaataaaattaggatgaatttaaaagtttattgttatagaaaaagtatagattagaatttaggagattttaaattaagtgggaagagtggtaagaagtttgtatttattagtaatagtatagtttataaggataaaggaggaagtattttgagtttttttattattggtttttatatattaagattttgttggggggtggtaaatagttgtttaagttgatttgtttatagttgattggtttaattttacggaattatattaataaaaatgtaaagtttatgttttatatttatgattagagtattttagggaaattaggatgatttaagttttggtttatgtggttatgggtagttggttttgatgtatatttaaattgtgatttttatttttattttatttttttttaatatttgtaagatttatgatggtatttagtgggtttttaataaatatttgttgaatgaatgaatatttgtttaggaaagttttatgtaagaatttaaaatattttttaattgaagagtaggttggatggatgaatgaggttatttttagagaattgtgaatatttatttgtgttgattgaattggaggtattagggttttttaggtttttaggattgatataattaaaggggtatttttttttttaaatgttaatttagtaatggttgtagaatggattgtgtataggatagtttaggttagtggttttaaatttgattatgtagaagaattatttgtgtgttttgtaaatttttggtttttattttattttttttagaattggtttaggttatatttaagtatttgaagtatgttgatttaaattgtaatatgttgtaagtgtaaaatattagattttaaagatatttaaattaatggatataaagtattatgttaatatgttttttaattgattatattttgaaataatattttatatttattgaattaaataaaatgtattattaaaatgattttattggtttttttttagtttatttttagtgtgattattatgatatttaaaattatgtatgtgattcgtatatttttattggatagtatttgtttatagtgtggggtatagagaatgatatgttttaataagtattttaagtgattttgatgtaagtttttagattagtttttaaaaaataagatattgtgatggatattttagtttgtagggttaggaagttgagtgtttgaaataaatggatgttagagaggttgaataagaagagatattttaggaaaagatattttgaaataaggattgagttgatgattgataatggaagaatgaagcggtagtttagataaatttgaggtgttatatttgtaatatagggtagtatttgatttatattatggtagaaagagttgtttaaattttgaattcgtattagtttttatttattaaagtaatatttaagattttaaaagttttggagggattttttttatattaatttttgggaatttgatttgttattgatcgtattttattaaatatatgtatatttatttttatagaatgttttaaaatttgtttttagttattttaatttatttttttttataatttaatgaaatttttttaatgtgtattatttaggggaagtttatttggatagggagaagaataaattaagatttttttttgaagaaaatttaagtagaatgtataattaaataaatttatattagtaaaagagataaggtgtgttataaatagttttttattttatattaagtgttaaaaatagaaataattttttaaagttaaaattaaataaaattttaggttgaaagtgatttaattaatgattagttgaataattttaaagatatggaaattgaggtttagaatggttatatagtttgtttaagatttagtattttgatagtggtatagttagtagataatttagggtttttgatttagtttttttttaaattatatttatttgaagatattttgaaaaatgtttttttttaaaggttattttgaaaaaaaataacggtttttaggttaaggatttttatttaataatttatatatataatttgttaaaaaaaatggtagttatttaatacgaattataattttatgtagatatataaatatttataattgttataaggtggtatcgtatgtatgcgaaatattattttttaatattaatagtatatgtgaatgtgttttagtttaaggaaaaatgaatttgttattttttaaggtattaatatgtgtggaatattttagaatgatatgtggaattataatatattataaaattggtatttttttttgtttgtttgttttttgagatagagttttgttttgtcgtttaggttgtagtgtagtagtatgatttcgattcgttgtaatttttgttttttaggtttaagtaatttttttgtttcggatttttaagtagttgagattataggtacgtgttattatgttcggttagtttttgtatttttagtagagacggggttttattatgttggttaggttggtttttaatttttgattttgttatttgttcgatttggttttt

SEQ ID NO: 169 - DNA, 5997 bp, Artificial Sequence
  chemically treated genomic DNA (Homo sapiens)
gtttgatttagggaatggaaggtaggtttatggattttcggaaagagaagttcgaggtatttttttttttagttgggattagggaatttaatttgatttagtaattttatattagtttgttaattttaattttttatttttggtattattttgagtattaagaatttttttgattgtaagtagtagaattttttcgggaagaaattaaaaaagaaagattggttgttaaaattaggtgttacgtgaattttaggtatcgttggttttaaggatacggaattagttttttttttgggatttagtgtttttttttgttttttggttttgttttttttaggttggttttttttttaggtaggttaatgggtttagttattaagattaaggagagacggttaggtttatatttattatatagtgagataagagagttagtgtttttagtaaggggtttttttagggagattttgttttaggaagtatggggatgtttttgaggaaggttttttttaaatggtgttatatgagttgtgtgtgggagagtgagtttggagaggttagttggatacggcggggaagggtattttaggggagagggaatagttagtgtaaaggcgtggaaatttttgtagttcggatttattagaatattaggtttttggagggaggaggagaaaatgggatttgggagattagttggaggttaaatatgaagagttttggatgttaggttgagtattttaggtttttttttgtaggtagtggggagttatggaaggatttagagtgagggaggatatagttacgttttttttttttggttttgtagtgaaaggtgaaaatttggaggtagttaggacgttagaaaggggattgttttgttattagtttgtattaggagggtgatttgtagattagagaatttttgaaattaagttgatagggggttattaaggatgagaggtggagggtggggagtttaggattgggggaatttgggtgtttagtttatttatttaggttggtataaggaaggggtgagttttttagttttttggtaggaagtattagaaattggtgcggttatttttggggtttgaaagagttttagagtttttgtgatttaaagtggttaatttttggttaggaggttaggagttttaggttagtttggttaatatggcgaaattttgtttttattaaaaatataaaaattagttgggtatggtggcgggtatttgtaattttagttatttaggaggttgaggaaggcgaattatttgaattcgggagatggaggttgtagtgagttgagatcgcgttattgtattttagtttgcgtgataggagtgagattttattttaaaaaaatataaatataaatataaaagttagtagggcgtggtggtacgtatttgtaattttagttatttaggaggttgaggaaggagaatcgtttgaatttgggagatggaggttgtagtgagtcgagattaggttattgtattttagttcgggtaatagagtaagattttattttaaaaaaaaaaaaaaaaaaaaagtaaagttgttaatttttggatgttttatttttttttgaggttattttttttgtggttttgatttaaataaatcgtaggtttaaatttatttttttagagttaggtatagtttagtgtttatgtttttatttagttaggggagttttttgttttagttagtttttgataatttgcgaatttaatattagttttttaagttcgtttttttttgggtttaagattttggttttttttattattttttttggggtgaggttttttgttcggagttttggggtttttcgggaggattgatattaatattattgatttgtagagagaggaagaggagaaagtttttatggggtgttagagtattttaaatgttttttttatgtagggatatttttttgttgaacgaagagaaggtagatttcggcgagggattcgtggttagtagtagtttttggtgagaattaaattaggcggttgggtttttcgttgtagatattttgatttaatatttttagtttaggtaagtgatggtggtttgttatatatggtgggttcgtagtgattgtgatagaaggatagttgtagcgtttttagttttttttggggagttatattttagattattttatagttagatttacgaagttgtgggtgttaaaattgtagatacgggtatttttttagaagattttttaatagtaaattataattttatgaaagaaagttgaggtcggtaaattatgcgtcgtggtttacgtttataattttagtattttgggaggttaatattggtagattatttgaggttaggagtttgaaattagttgattaatatggtgaaattttgtttttattaaaagtataaaaattagttgggtgtggtggtatgtgtttgtaattttagttatttaggaggttgaaataggagaattgtttgaatttaggaggtagaggttgtagtgagttgagatagtgtagtggtttatatttggaattttagtattttgggaggttaaggttggaggatcgtttgagtgtagaaatttgagattagtttgggtaatatagttagattttatttttatttttttttttttttttttttttggagatagagttttattttgttgtttaggttggggtgtagtggcgcgattttggttttttgtaattttcgttttttaggtttaagtaattttttattttggtttttcgagtagttgggattataggtatttattattatattagattaatttttgtatttttagtagatagggttttattattttggttaggttggtttcgaatttttgatttcgtgatttattcgtttcggttttttaaagtgttgggattataggtatgtgttattacgtttagttaatttttgtagttttagtagagacggggtattattacgttggttaggttggtttagaatttttgattttaggtgatttgttcgttttggttttttaaagtgttgggattataggcgtgagttattgggtttagtttatagatgggattaagttgatgttattgagatgagagagtattttggatgttttaggtatataatataatataatataatataatataatataatataatataatataaatattaataatataatatatataatagtatggtttaattaggtattatggtgtgtacgtgtagttttagttatttaggaggttgaggtaggaggttcgtttgagtttaggtatttgaggttagtttgggtaatatagagagatttttagttttaataatgataataataataatatagttttttagtttgttgtataatgttttttaatatagttgttttgtaatttttttgtaattgggtttttgtttttcgtaaaattatgtgatgtttttaagtttagatatatagttttttggggtaatagaagattaaatatgggcgtaggttatttgggtatttcggtttattgtttttttaagatgaattttatttttgttttagaggatttattttttagaaaggatgataaggtgtaaggcgtggtggtttacgtttgtaattttagtattttgggaggtcgaaatgggaggatcgtttgattttaggagtttaagattagtttgggtaataaagtgagattttattttaaaaaaataaaaataaaaatataaaagttagtagggcgtggtggtacgtatttgtaattttagttatttaggagggtgaggaaggagaattgtttgaattcgggaggtggaggttgtagtgagttaagatagcgttattgtattttagttcgggtaatagagtaagattttattttaaaaaaaaaaaaaggtaaagtggttaatttttggattttttttaggatagggaatttatttttttttgaggttattttttttatggttttatgaaaatttgggaaaaaaaaaattattttgtggttttagttatacgggaggttgaggcgggaggttggtttgagtttaggtggttaaggttgtagtgagttatgattacgttattgtattttagtttaggggatagagtgagattttgttttaaaaaataaatgaataaaaataaagataaaggtttgtattgggtgaaagtagattgggcgttttggttattttaattataaagttatcgttgggggttagggttttgtttattaagattaagtgagattaaattgttttgtgaggtgaaagcgggtggggtttttattttttatatgggggaggaaatttcggttggaaaaggggtattttttatttacgggtagagttaggtttttttaatttttaggttttttttttattttttaaggagggtagttttaagaagtttgtattcggatgattatagttttcgatgattttgttattttaatttttttttaatgttgatgattatgataatgatattgatagcggttgatattttgaaagttttttttttgttaattattaatagttttttgagacggtgggtgtttaaatgggcgatattgagggagttggaattgtagagtacgaagtgttttttgggagttcgggtttggcgttttgtttattttttcggacgggtagtttatttttttttattttcggttttcgtcgcgcgtattggcggcgttcgttttacgttttaagaatttcgttttttagggtgggtggggggtgtacgttcgatagggttaggttagggttaggcgtggagttcgcgtgcgtttcgggatttcgttcggggcgcgcgggaggcgtcgggggtcgcggaggcggggcggggaggggtcggcggcggcggcggcgcgcggaggagatcgtagtgcggtcggcgttaggattcgcgggggttttttaggtcgcggcgtttttcgtttttttttatttttcgattttttttcgtttttaaaatgaggaaacggagtaattcgttttaagttgtgtagtcgggatcgtttcggggtgtgtagtcggttcgcggaggtttttttgggggcgggcgcggggcgcggttcgggggcgttttttgagtaggtgagtacgtcggcggggagacgtggagagatttcgaggtcggggtggggggaaatttcgagggttttaggcgggggtgggttcgggacgtgcgtaggaagggtcggtgtgtgcgcgagtgtgcgcgtttcgggcgcgtagcgggtgcgcggttggggcggagggtgtttagaggcgatcggatttcgcgtggtggtggttggggttttttgggtgcgggtgtgcgcggttacgagtttcgggcgtgtgtattcgcgcgtttacgtggagggttgtgcgcgtgtggtcgaaaagcgtgtgcgcggttttgcgtagcgttttgcgtgttcgagtggttcggcgttggcgtttaggtgttttagtgtggggcggttgtgtgtgtgtcgggggcgggggataggtgcgtacgtttttaggtgtggagcgtttgtgcgcgcggatgcgcggggacgtgtgcgtatatttgtttttacgtggacgtggttttttgtttgtttgcgcgtagttgtgttcgagttttgtgtgtttttgtgcgtgtgtatgtattcgtatgcgtgtgagtatacgtgggattggaggattttatgggaggcgtattttggaggggtcgagatttattttttagtatcgtttattttttagttattagcggtcggggagatgggggaggtagggaggtttttttatttttgtagtaatgagtgattttgtgtgtttgttttgggtttggggggggattagagaggtttagcgggtggtcggaggagtttagtagggttataggattcgtttttgtttttagttttattttacggttagagatttttgggaatgattttgatttatttttatttttttattttgtttttgtttattaattaga

SEQ ID NO: 170 - DNA, 5997 bp, Artificial Sequence
  chemically treated genomic DNA (Homo sapiens)
tttggttggtaggtaggggtagggtggggaaatagggatgagttaaggttatttttaagaatttttgatcgtggggtggagttgggggtaggggcgggttttgtagttttgttgggttttttcggttattcgttgagtttttttgatttttttttaaatttaggatagatatataaagttatttattgttgtaggggtgggggagtttttttgttttttttattttttcgatcgttagtggttgggaagtgggcggtgttggggggtgagtttcggtttttttaagatgcgttttttatgaaattttttagttttacgtgtatttatacgtatacggatgtatgtatacgtatagaaatatatagggttcggatatagttgcgcgtagataagtaaaggattacgtttacgtggaaataggtgtgcgtatacgttttcgcgtattcgcgcgtataagcgttttatatttgggaacgtgcgtatttgtttttcgttttcggtatatatatagtcgttttatattggaatatttgggcgttagcgtcgggttattcgggtacgtagggcgttacgtagggtcgcgtatacgtttttcggttatacgcgtatagttttttacgtggacgcgcgggtatatacgttcggggttcgtagtcgcgtatattcgtatttaggaaattttagttattattacgcggggttcgatcgtttttgagtatttttcgttttagtcgcgtattcgttgcgcgttcgggacgcgtatattcgcgtatatatcggttttttttgcgtacgtttcgggtttattttcgtttagagttttcggggtttttttttatttcggtttcggggtttttttacgttttttcgtcgacgtgtttatttgtttagggggcgttttcgagtcgcgtttcgcgttcgtttttaggagggttttcgcgagtcggttgtatatttcgaggcggtttcggttgtataatttggagcgagttgtttcgtttttttattttgggggcgaagaagggtcggggagtgggggaaagcgggaggcgtcgcggtttgggaggttttcgcgggttttagcgtcggtcgtattgcggtttttttcgcgcgtcgtcgtcgtcgtcggttttttttcgtttcgttttcgcggttttcggcgtttttcgcgcgtttcgggcggggtttcggggcgtacgcgggttttacgtttggttttgatttggttttgtcgggcgtgtattttttatttattttgggaagcggggtttttggagcgtggaacgggcgtcgttagtgcgcgcggcggggatcgggggtgagggagagtgagttgttcgttcggggagataagtaaggcgttaagttcggatttttagaggatatttcgtattttgtaattttaatttttttagtgtcgtttatttgagtatttatcgttttagagggttattggtggttgataaaaaaaaagtttttaaaatgttagtcgttattaatattattattataattattaatattaagggaaaattggagtaatagaattatcgggaattgtaattattcggatgtaaattttttagagttgttttttttggagggtaaaaggggggtttgggagttggagggatttggttttgttcgtaggtaggaggtattttttttttagtcgggatttttttttttatatggagggtgggggttttattcgtttttattttatagaatagtttgattttatttggttttggtggatagggttttggtttttagcgatggttttgtggttggggtgattaaaacgtttaatttgtttttatttaatgtaggtttttatttttatttttatttatttattttttgagatagggttttattttattttttgggttggagtgtagtggcgtgattatagtttattatagttttgattatttgggtttaagttagtttttcgttttagtttttcgtgtagttgggattatagggtaatttttttttttttaaatttttatagagttatagaaggggtagttttaggagggggtgagttttttgttttgggaggaatttaagaattggttattttgtttttttttttttttgagatggagttttgttttgttattcgggttggagtgtagtggcgttattttggtttattgtaatttttatttttcgggtttaagtaattttttttttttatttttttgagtagttgggattataggtgcgtgttattacgttttgttaatttttgtatttttatttttatttttttgagatgaagttttattttgttgtttaggttggttttggatttttgggattaagcgatttttttatttcggttttttaaagtgttgggattataggcgtgagttattacgttttgtattttattattttttttaagggatgagttttttgaaataaagatgaagtttattttaggagggtaatgaatcgagatgtttaggtggtttgcgtttatatttaattttttgttattttaaaaggttgtgtgtttggatttgggggtattatatgattttgcggggagtagaggtttagttataagagaattatagaatagttatattaaggaatattatgtagtagattaggaaattatattattattattattattattagagttgggggtttttttgtgttgtttaggttggttttaaatgtttgggtttaagcgaattttttgttttagttttttgagtagttgggattatacgtgtatattatggtgtttggttaaattatattattatatatattatattattaatatttatattatattatattatattatattatattatattatattatattatatatttggggtatttaggatgtttttttattttaatagtattaatttaattttatttgtaggttgggtttagtggtttacgtttgtaattttagtattttgggaggttaaggcgggtagattatttgaggttaggagttttagattagtttagttaacgtggtgatatttcgtttttattaaaattataaaaattagttgggcgtggtggtatatgtttgtaattttagtattttgggaggtcgaggcgggtggattacgaggttaggagttcgagattagtttggttaagatggtgaaattttgtttattaaaaatataaaaattagtttggtgtggtggtggatgtttgtaattttagttattcgggaggttaaggtagagaattgtttgaatttgggaggcggaggttgtagagagttaagatcgcgttattgtattttagtttgggtaatagagtgagattttgtttttaaaaaaaaaaaaaaaaaaaaaaatagagatgggatttggttatgttgtttaggttggttttaaatttttgtatttaaacgattttttaattttggttttttaaagtgttgggattttagatatgagttattgtattattttagtttattgtaatttttgttttttggatttaagtaatttttttgttttagttttttgagtagttgggattataggtatatgttattatatttagttaatttttgtatttttagtagaaatagggttttattatattggttagttggttttaaatttttgattttaggtgatttattaatgttggttttttaaagtgttgggattataggcgtgagttacggcgtatggtttatcggttttaatttttttttatggggttgtaatttattattagaagattttttgggaggatgttcgtgtttataattttagtatttatagtttcgtggatttggttgtgggatagtttggggtgtggttttttagaaagggttggggacgttgtagttgtttttttgttatagttattgcgggtttattatatatggtaaattattattatttgtttgaattagaagtgttaagttaaaatatttgtagcggaaaatttagtcgtttaatttgatttttattagaagttgttgttgattacgggtttttcgtcgaggtttgtttttttttcgtttagtagggaaatgtttttgtatgagagggatatttaagatgttttagtattttatgaagatttttttttttttttttttttgtaaattaatgatattagtgttagttttttcgaggagttttagggtttcgggtaggaggttttattttagaagaaataataaggggaattaaggttttgagtttagagaagggcggatttaaggagttggtgttgggttcgtaaattgttaagggttggttggggtagggagtttttttgattgggtggagatatagatattgagttgtgtttgattttagggggatagatttgagtttgcggtttatttgaattagagttatagaaggggtagttttaggagggggtgaggtatttaagaattggtaattttgttttttttttttttttttttttgagatggagttttgttttgttattcgggttagagtgtagtggtttgatttcggtttattgtaatttttattttttaggtttaagcgattttttttttttagttttttgagtagttgggattataggtgcgtgttattacgttttgttaatttttgtatttgtatttgtatttttttgagatagggttttatttttgttacgtaggttggagtgtagtggcgcgattttagtttattgtaatttttatttttcgggtttaagtgattcgttttttttagttttttgagtagttgggattataggtgttcgttattatgtttagttaatttttgtatttttagtagagatagggtttcgttatgttggttaggttggtttggaatttttgattttttgattaagaattagttattttgaattataaagattttagggtttttttaggttttagaggtggtcgtattagtttttaatgttttttgttaaggagttgggggatttattttttttttatattagtttgagtgggtagattggatatttagatttttttagttttgaattttttattttttattttttatttttggtgattttttgttaatttgattttagaagttttttgatttgtaggttatttttttggtgtaggttggtgatagagtagttttttttttggcgttttggttgtttttaggtttttattttttattgtaaagttaagggaaagaaacgtgattgtgtttttttttattttaaatttttttatagttttttattgtttgtaggagagagtttaaaatgtttagtttggtatttagggttttttatgtttggtttttagttgattttttaggttttattttttttttttttttttaagaatttaatattttagtgagttcgaattgtagaagtttttacgtttttgtattggttgtttttttttttttggaatgttttttttcgtcgtgtttagttggtttttttaagtttatttttttatatataatttatgtggtattatttggggaaagttttttttaaggatatttttatattttttagagtaaggtttttttgaaagggttttttgttagaggtattagtttttttgttttattgtgtgataggtgtgagtttggtcgtttttttttggttttggtgattgagtttattagtttgtttgagaaggaggttagtttggaggaaatagagttaagaagtagggagagatattgaattttaagggaaagattggtttcgtatttttagaattagcgatgtttggaatttacgtgatatttagttttagtagttagttttttttttttgattttttttcgagggggttttgttgtttataattaaagggatttttaatatttaaaatagtattagaagtggggagttaaaattaatagattaatgtggaattgttgagttaaattagattttttgattttagttgggaagagggatgtttcgagttttttttttcgagagtttataaatttgttttttattttttgagttaggt

SEQ ID NO: 171 - DNA, 5989 bp, Artificial Sequence
  chemically treated genomic DNA (Homo sapiens)
ttttaggtataaataatttttttgttttagttttttgagtagttggtattataggtgtttgttattatgtttagttaatttttttgtattttagtagagatgggttttattatgttggttaggttggttttaaatttttgattttaggtgatttgtttattatagttttttaaagtgttgggattataggcgtgagttattgtatttcgtttatgataaagttttattaatatttttagggtggtaagggagttatggaaagttaagtatattgtaattttgaaaaaaaaaaaatggggttttgttagaaaggaagaaagggaggataaatgttggataagacggttgggcgtggtggtttatatttgtaattttagtattttgggaggttaaggtgggtggattatgaggttaagagtttaagattagtttggttaagttggtgaaatttcgtttttattaaaaatataaaaattaggttatgtatggtggtttatgtttgtaattttagtattttgggagggtaaggtgggtagattataaggttaagagttcgagattagtttggttaatatggtgaaattttatttttattaaaaatgtaaaaattagttgggtgtggtggcgggtgtttgtaatcgtagttatttgggaggatgaggtagagaattgtttgaatttaggaggcggagtttgtggtgagtcgagatcgcgttattgttttttagtttgggcgatagagtgagatttcgttttaaaaaattaaaaaataaatattggttaagacgagtagtaatgtttgttatattttttgagagattattgaattttagttatatgttagtgttatttggggagatttgggtttgaatttttttttttttttgggggattttttggttaaaaatgtatttgaaattgggtgtggtggtttatgtttataattttagttatttaagaggtttaggtgggaggattttttgaggataggagttgtagattattttggataatatagtaagattttgttattttttttttttttttttttttgagatagagtttcgttttgttgtttaggttggagtgtagtggtacgaatttcggtttattgaaagttttgtttttcggatttatgttatttttttgttttagttttttgagtagttgggattataggtattcgttattatgtttagttaatttttcgtattttttttttagtagagacggggttttatcgtgttggttaggatggttttgattttttgatttcgtgatttgttcgttttagttttttaaagtgttgggattataggcgtgatatcgtgttcgattaagatttgttttttaataaatagggttagttgtaatggtttatgtttataattttagtattttgggaggttaaggagggtagatggtttgaggttaggagttcgagattggtttggataatatggtgaaattttatttttataaaaaaatataaaaattagttaggtatggtggtgttggtttgttgttttagttatttgggaagttgaggtaggagtattattttagtttaggaggttaaggttgtagtgagtcgagattgtattattgtattttagtttgagtaatatggtgatattcgttttaaaaaataataataataaataatgaataaatgtaatttattttaaagtgaaatttgtatttttttttttagtttttgtataaggaaaaattattgttttttttatttttttaatttttttttattttattatttgataaaattttattttataaagtatgagagtaaagttattttttttataatatttttttttagtttttttagtttaaagtgaattttttaattttttaattttaaaatgaagttgttaatgttttgtgtagagtatatattttattttatattatggttagttgttgtataagattagatattttttaaatagagaaattattttttatttattataattataaaatgttttatttttgttatttatattataaatttttatggttttaggttttgtttaaaatataaatgggtggtatggacgtcgtattattttattaaattgtgatattttggggattaggaatttttggttaagagggagatttacgtttataattttaatattttatttatttatttatttttgagatggcgtttcgtttttgttgtttaggttggagtgtaatggcgtatttttagtttatcgtaattttcgttttttaggtttaagcgattttttcgttttagttttttaagtagttgggattataggtacgtgttattacggttcggttaattttgtatttttagtagagatggagtttttttatgttggttgggttggttttaaatttttgattttagatgattcgttcgttttggttttttaaagtgttgggattgtaggtgtgagttattgcgttaggttttattattattattattttttttgagattaagttttgttttgttgtttaggttggagtgtagtggtattattttggtttatcgtaattttcgttttttgggtttaagtagtttttttgttttagtttttagagtagttggtattatagatgcgtattattatatttatttaatttttgtgtttttagtagagatagggtttcgttatgttttttaggttggttttaaatttttgggtttaagcgatttatttattttagttttttaaagtgttgggattattggtatgaggtatagagttcggtttgtaattttaatattttgggaggttaaggtaggaggattatttgagtttaggagtttaagatcggtttgggtaaaatagtgatattttatttttataagaaataaaaaaattagttaagtataggggtatgtatttgtgtttttcgttattcgcgaggttgtggtgggaggattattttagtttaggaggttgaggtagtaatgagtattgatggtgttattgtattttagtttgggtgatagggtaagattttattttaaaaaaataaataaaaagtgagtttgtttattttttttatgttttttagtattttgtttttgaattttagttattatttttatagattttttaataaaaaggttgttttaattaacgttaattaatatatatggtatataagaagatttttgtttttaagggttttataaatttttagagttaaatgtgttttattattagtataaaaataaatggtgttagttgggtgtagtgatttatatttgtaattttagtattttaagaggttgaggtaggtggattatttgaggttaggagtttgagattagtttggttaatatggtgaaattatattgttaggtttttgagtttaagttaagttatcgtattttttgtgatttgtacgtatatatttagatggtttgaagtaattgaagatttataaaagaagtaaaaatagttttaattgatgatattttattattgtgatttgtttttgttttattcgaattgattaatgtattttgtaattttttttatttttaagaaggttttttgtaattttttttatttttgagaatgtattttgtgagatttatttttgtttataaaatattgtttttaattttattatttattttaaaatttgtaagaattaatgataatttattattttttgttgatttttttttcggatttagttcgtttgtatttaggtgaaataaatagttatgttgtttatataaagtttgtttggtggtgtttttatatagacgcgtatgaaatatatttttattaaaaatataataattagttgggcgaggtggtttatagttgtaattttagtattttgggaggtcgagataggtaggttatttgaggttatgagttcgagattagtttggttaatatcgtgaaaattttatttttattaaaaatataaaaattagttagatgtggtggcgtacgtttgtaattttagttattcgggaggttgaggtatcgaatcgtttgaacgtgggaagtggagtttgtagtgagtcgagatcgttttattgtattttagtttgggtaatagagttagattgttttaaaataaataaaaaatggtgttaagatttttagacgagattttaatggattaaggtttatatgtaaatagtattaaagattatggaatagagatgggagaagtaagtagggaggtaggaatagtttagttgtggtagttttagtttagtttatttatataaatggttttttagggtagtacgtggagtatttttatttttaaatattggattgagagtagagagttgtgtaaaataattataagtttttaattatgtttttttaattatttttattatttaagattgttgtttttatttattattgaattttttcgttttttttttttaatttttgtgttagttaatggttgaaattttgatttggtaaaaaatttttggcgaaaattagtaaaaagggtttataaattaggttttagggaagtatagaggtagttacgagaaggttcgaggtgtttatggaaagagttcgagtttaggagttttgggaggattttaggcgttcggagtcgtcgttacgtaatcggtatttagagttttcgaagatcggaaggtttcgtttaggtttcggtttaggtttcggtttcggtttcggtttcggtttcgtttcggttcggtcgggtagttggtaggtgtcgtgcgtaatttttcggaagttgtcgtttttttttttttttatgggaatattttttttaaaaaaaaagagttcgttggcgttatttcgtaggattggtcgttttaaaatcgtgataaaggagttgttcgttattttttattttcgtttttttttagtaaggagtcggggttttttttagtttttttagttaggcggcggcggcgattggtaatgtttggttttaaaagaaacgcggtaatcggatttaatttttattgtgggggggtcggtttgggggtcggtagcggcggcgttattcgttcgggagggcgatttttggttacggagaaggaggtttcggttcggcgagagatagggggaggggaggtcggcgcggtgattggcggaagcgtcggcgtaagtttttcgtttatttttacgttagattttcggagggtcgcgcggtcgtcgtttattggcgtcgaggttttcgacgttatcgcgattttcgcgaggttgttttttttcgcgtttattcgtcgcgcggcgtcgtttgaggagatggaagtttcggtcgttgacgttattatgtcgttcgaagaggagttggacgggtacgagtcggagtttttcgggaagcggtcggttgttttgtcgttgttggagttggtcggggaatttggtaataatattagtacggacgggttattattttcgacgtcgtcgttagtagaggaggaggaggacgagttgtatcggtagtcgttggagattatttttcggtattttcgggagtaggttatcggcgttaaggatataaagttaatgggtaggtttggggttattagtaggaaggcgttggagattttacgacgggttggggatggcgtgtagcgtaattacgagacggttttttaaggtaagggggtttattaatcgttaaggttttatttttttttttttattttttttcggatttattcgttaagggtgggttggaaatcgaaacgagttagtgttgaaacgtgttttattttatttttgaagttagaatattttggttatgagttattgttttcgtttattttgatttttttggaaatggtagtttttgtttaaagatcggaaagggtgggatgttaattttaagtggggttaatttgagttttgtaaattttagtagcgattttttcgtcgcgggtgggtaggcgaattttgcgtcggtttagataaaggaggtcgtgaggatttgtatgttttttttttttagg

SEQ ID NO: 172 - DNA, 5989 bp, Artificial Sequence
  chemically treated genomic DNA (Homo sapiens)
tttgagaaagaaaagtatgtaggtttttacggttttttttgtttaaatcggcgtaagattcgtttgtttattcgcggcgggaaaatcgttattgggatttatagaatttaggttgattttatttgaaattgatattttatttttttcggtttttgaataagagttgttatttttaaaagaattaagatgggcggaaataatgatttatggttagaatattttggttttaggaataggatgagatacgttttaatattgattcgtttcggtttttaatttatttttggcgggtgagttcggggagagatggaaaaaagggagtgaggttttggcgattaatgaatttttttattttggaaggtcgtttcgtggttgcgttgtacgttatttttaattcgtcgtaaggtttttagcgtttttttgttggtggttttagatttgtttattggttttgtgtttttggcgtcggtggtttgttttcgaaggtatcgagagataatttttagcgattgtcggtataattcgtttttttttttttttgttggcggcggcgtcgagggtagtgattcgttcgtattggtgttattattagatttttcgattaattttagtagcggtaggatagtcggtcgtttttcgagaggtttcggttcgtattcgtttagttttttttcgggcgatatgatggcgttagcggtcggggtttttatttttttaagcggcgtcgcgcggcgggtgggcgcgaagaaaagtagtttcgcgggggtcgcggtgacgtcggggatttcggcgttaatgggcggcggtcgcgcgatttttcgggagtttggcgtgagggtggacggggggtttgcgtcggcgttttcgttaattatcgcgtcggttttttttttttttatttttcgtcgggtcgaggttttttttttcgtagttaaaagtcgttttttcgggcgggtggcgtcgtcgttgtcggtttttaagtcggtttttttatagtagaggttgagttcgattatcgcgttttttttgaggttaaatattgttagtcgtcgtcgtcgtttggttgagaaaattggggaagatttcgattttttattggaaggaagcggaagtgagaagtggcgagtagtttttttattacggttttagggcggttagttttacggggtggcgttagcgaattttttttttttaaaaaaagtatttttataaaaggggaaaggggcggtagttttcggagggttgcgtacggtatttattagttgttcggtcgggtcggggcggggtcggggtcggggtcggggtcggggtttgagtcggggtttgagcggggtttttcggttttcggaggttttgagtgtcggttacgtaacggcggtttcgagcgtttggggtttttttagagtttttgggttcgagttttttttatgagtatttcgggttttttcgtggttatttttgtgtttttttgagatttgatttgtgagttttttttgttggttttcgttagaggttttttattaaattaaaattttaattattgattaatataggggttgaaggaagaggacggggaagtttagtgatggatgggaataatagttttagatgatagggataattaagagggtatagttggggatttgtggttattttgtatagttttttatttttagtttaatgtttggaaatgaggatgttttacgtgttattttaaagaattatttatgtaagtggattaagttaaaattgttatagttaaattatttttgtttttttgtttgttttttttatttttgttttatagtttttggtgttatttatatataggttttaatttattagaatttcgtttgagagttttgatattattttttgtttgttttgagatagtttagttttgttgtttaggttggagtgtagtggggcgatttcggtttattataagttttattttttacgtttagacgattcggtattttagtttttcgagtagttgggattataggcgtgcgttattatatttggttagtttttgtatttttggtagagatggggtttttacgatgttggttaggttggtttcgaatttatggttttaagtgatttgtttgtttcggttttttaaagtgttgagattatagttgtgagttatttcgtttagttgattattgtatttttagtagagatgtgttttatgcgcgtttgtgtgaagatattattaaataggttttgtgtgagtaatatggttgtttattttatttgggtgtaggcgggttgagttcgaaaagagagttagtaaagggtgatggattattattagtttttataggttttgggataggtggtgaagttgagagtaatgttttgtgggtaggggtggattttataaagtatatttttaagggtggggagaattataaagaatttttttaagggtgggggagattataaagtatattgattagttcgggtggggtagaaataaattataatggtggaatgttattagttaaggttatttttattttttttgtggatttttagttattttaggttatttggatgtatacgtgtaagttataggggatgcgatggtttggtttgggtttagaggtttgataatgtggttttattatgttggttaggttggttttaaatttttggttttaggtgatttatttgttttagttttttaaagtgttgggattataggtgtgagttattgtatttagttgatattatttatttttgtattgataataaggtatatttgattttagaggtttgtaaagtttttgagaataaggatttttttatatgttatgtatgttagttaacgttaattaaagtagtttttttgttaaaagatttgtaaaaataatagttaaaatttaaaagtaaggtgttgagagatataggaaaggtgagtaagtttattttttatttatttttttgagatgaggttttgttttgttatttaggttggagtgtagtggtattattagtgtttattgttgttttaattttttgggttgaagtgatttttttattatagtttcgcgagtagcgaggaatataggtgtatgtttttatatttggttaatttttttattttttgtagagatggggtattattattttgtttaggtcggttttgaatttttggatttaggtgatttttttattttggttttttaaagtgttgggattatagatcgggttttgtgttttatgttaataattttagtattttgggaggttgaggtgggtggatcgtttgagtttaggagtttgagattagtttgggaaatatggcgaaattttgtttttattaaaaatataaaaattagatgggtgtggtggtgcgtatttgtaatattagttattttggaggttgagataggagaattgtttgaatttaagagacggaggttgcggtgagttaagatagtgttattgtattttagtttgggtaatagagtaagatttggttttaaaaaaaataataataataatgaggtttggcgtagtggtttatatttgtaattttagtattttgggaggttaaggcgggcgaattatttgaggttaggagtttgagattagtttaattaatatggagaaattttatttttattaaaaatataaaattagtcgggtcgtggtggtacgtgtttgtaattttagttatttggaaggttgaggcgggagaatcgtttgaatttgggaggcggaggttgcggtgagttgagagtgcgttattgtattttagtttggataataagagcgaaacgttattttaaaaataaataaataaataaagtgttggaattataggcgtgagttttttttttggttaaaagtttttaatttttaaaatgttatagtttagtaaggtgatacggcgtttatattatttatttatgttttgggtaggatttagaattataggggtttatagtatgagtggtaaggatagagtattttgtggttatagtgaataagaaatagtttttttatttaaggaatgtttaattttgtatagtaattaattataatgtgagatggaatgtatgttttatataaggtattaataattttattttggagttaagaggttgggaaatttattttgggttgagagagttagaggaaagtgttatggaggaggtagttttgtttttatgttttataaagtaaaattttattaggtggtaaagtggaaagagattgaggaaataggaggagtaatgatttttttttgtatagaggttaaaaaaggaaatgtaagttttattttaaaataaattgtatttatttattatttgttattattattttttgagacgggtattattatgttgtttaggttggagtgtagtggtgtagtttcggtttattgtaattttgattttttgagttaaagtgatatttttattttagttttttaagtagttgggataataggttagtattattatgtttggttaatttttgtgtttttttgtagagatggggttttattatgttgtttaggttaatttcgaatttttggttttaagttatttgttttttttggttttttaaagtgttaggattataggtatgagttattgtaattggttttgtttgttaggaaataagttttggtcgggtacggtgttacgtttgtaattttagtattttgggaggttgaggcgggtagattacgaggttaggagattaagattattttggttaatacggtgaaatttcgtttttattaaaaaaaaaatacgaaaaattagttgggtatggtggcgggtgtttatagttttagttatttaggaggttgaggtaggagaatggtatgaattcgggaggtagagtttttagtgagtcgagattcgtgttattgtattttagtttgggtaatagaacgagattttgttttaaaaaaaaaaaaagaaagaaagtaataaagttttgttatgttatttaggatggtttataatttttgtttttaagggatttttttatttgagttttttgaatagttgggattataagtatgagttattatatttagttttaaatatatttttgattagaggattttttaagaaaaaaaaaaaatttaggtttaagtttttttaggtaatattagtatataattagagtttagtagttttttaggaggtgtgatagatattgttattcgttttagttagtatttattttttaattttttgagacggagttttattttgtcgtttaggttggagggtagtggcgcgatttcggtttattataaatttcgttttttggatttaagtaattttttgttttatttttttaagtagttgcgattataggtattcgttattatatttagttaatttttgtatttttagtagagatggggttttattatgttggttaggttggtttcgaatttttgattttgtgatttgtttattttgtttttttaaagtgttgggattataggtatgagttattatgtatggtttaatttttgtatttttagtagagacggggttttattagtttggttaggttggttttgaatttttaattttatgatttatttattttggttttttaaagtgttgagattataggtgtgagttattacgtttagtcgttttatttaatatttattttttttttttttttttttgatagaattttatttttttttttttagaattataatgtgtttagttttttatgatttttttgttattttgaaaatgttaataaaattttgttatgggcgggatgtagtggtttacgtttgtaattttagtattttaggaggttgtggtgggtagattatttgaggttaggagtttgagattaatttggttaatatggtgaaatttatttttattaaaatataaaaaaattagttgggtatagtggtaggtatttgtaatgttagttatttaggaggttgaggtaggagaattgtttgtatttggga

SEQ ID NO: 173 - DNA, 6809 bp, Artificial Sequence
  chemically treated genomic DNA (Homo sapiens)
taggtaagagaaagaaataaaaagtatttaaataagaaaaggagttagataattttttttttttgaagataagaattttttttttttttttttttttttgagatagaattttattttgttatttaggttggagtgtagtggtacgatttcggttttttgtaatttttattttaagtagttgggattatagattatatgtttagttaatttgttttttagtatttttagtagagatggggttttattgtgttggttaggttggttttaaatttttggttttaagtgatatattcgttttggttttttaaagttttgggattataggtatgagttattgcgttttattttttgaagataagattttatatttagattttattaaatggtttttagaattgataaataatgtcggtatagttttaggatataaaattaatgtataaaaattagtagtatttttatatattaataacgtttaagttgagagataagttaagaatatagttttatttataatagttatatatatatatatatatacgtatataatttaggaatatatttaattaaggaagtgaaagatttttataaggagaattataaaatattgttgaaggaaattatagatgatataaataaatagaaaaatattttacgttgatggattggaagaattaattttgtttaaatggttatattgtttaaagtaatttatagatttaatggtatttttaagaaattattaatattattttttatagaattagaaaaattattttataatttatatggaattaaaaaggagtttgtagaatagtaggaaaaaataaaataaaataaaataaaattttaaaagagtttgaatagttaaagttaaagttagaggtattatattatttaattttaaattgtattataaggtaatagtaatttaaatagtacggtattggtataaaaatagatatttagattgatggaacggagtagagaatttagaaataaagtcgtatatttatcgttatttgatttttaataaagtcgataaaaataagtaatggggaaggattttttgtttaataagtggtgttggttagttttatgtagaataaaattggatttttatttattattatatataaaaatttatttaagatgggttaaagatttaaatgtaagattttaaattttaggaattatagaagaaaatttaggaaatattattttagatatcggttttgggaaagaatttatgattaagttttgaaaagtaatttgtagtaaaacgaaaaattgatagacgggatttaatttaaatagtttttgtataattaaagaaattatgaatagagtgtggtgttacgatatatattggtttttatttgtggtttttggtttgtaatttttataattttcgttatagttttttgttatgttgagtgtgttaggttttagaggtaggtttttaatttttttttgttttttttttatttgttaataattttttatttttttgattgtgggttttaagatttttttaggagagggttttattggatatatatggatataaagatggtaataatagatattgcggacgggagggaaggagggagtaagggttgaaaaattaattgttgggtgttttttttattatttgagtgataagaataatcgtattttaaatttgagtattatgtaatatatttatgtaatttgtatatgtattttcgaatttaaaataaaatttgaaattattttaaaaaaagtattattttgtatagtttagtgatttttaggaatttatgtgtgtttttatagtgggagtgattgtgttttttttagagtattttttttatgtatttttttaaatattttttatattttagaaatttttttagattttttttatattttttaattaaaataatatgttgtaatagtatgaatgtagaagtagaaatgagaatttattgttatttattaagttagatattaaaaagatttgtgaaaatgtataacggtgttattattttttttgttttgttttgtaaaatatcgttattttttattaaaaaaatttattttagttttttagttgtttaatttagatttataaaaattttatagttaaagggaattttgattgtagatttattttttggatttttgtttttttttttagaattttgttagttagttttttattattttataattttatgttatggaatataaattatttaaatcgtgttttttaggtagagggagaatttttggattagttagaagtagaattttaatattgtattggggtttgggtgtttaatataaaaaatatatttaaagttaataaattaaaaaagttagtaaagtaaaataaaaaataaaaattgtgtatgaaaatggttttgaaaggatttggaaggaaagtataaagtgagagggtataaaaagttatagttttggaaaatagtttgatatataattttagattttgtatttttatagtaaaatgttatttgagtatttaggcgttttagttttttatatatgaattttatcgatttttagagtttgtggtttttggtgaggatagcggggaggattattttatttttataaggttttggaggtttgataagttgttgaaaatattaaaaggtatataattattattagtttagtaatattttgttttagtataattattgatttattatttattttattattgatattaattttaaaagttagtgtgggttatatagattttattttatatgaagaatataaagtttttttattagaaatttatttttattattttatatatttttagaaaaatttaatgttatattgatttattgatatagttgtgtagcggttaggtgtttttttttatgattattttttttttttttttaattattatttttttttaagatgggggttttattatgttgtttaggttgattttgaatttttgggtttaagtaatttttttattttggagaaaattaaagaatttttttttttaattttttttttttttttttttttagatggagtttcgttttgtcgtttagtttagagtgtagtgtcgttatttcggtttattgtaatttttatttttcgggtttaaacgatttttttgttttagtttttcgagtagttgggattataggcggttgttattacgtttagttaatttttgtatttttagtagagacgggggttttattatgttggttaggttggttttgaatttttgattttaagtgatttgttcgtttcggttttttaaagtgttgggattataggcgtgagttattgcgtttagatttttttttaattttttattatttagttattttattttttttttttatttagtttgaaatgtaatttatggttgggttgggtggtttacgtttgtaattttagtattttgggaggtcgacgcgggtatattatttgaggttaggagttagagattagtttggttaatatggtgaattttatatttttttttttttcgtttttattaaaaatataaaattagtttggtgtggtggcgtatgtttgtaattttagttattcgaaaggttgaggtaggggaatcgtttgaattcgggaggtagaggtcgtagggagtcgaaatcgcgttattgtattttagttcgggtaagaagagcgaaatttcgttttaaaaaaaaaaaaaagtaatttatatttttttttgttttttttataggatttattagttttagtttttggagatgggaagtataaaatttgtttttttatttagttgtaatttgtattggtttttttaataattatagtattttggggttttttgggaatttatatatttgttttttgttttttaaataagtaggtattttttttgattgtttttaaataatttgggtatttttttttcggtttcgcgtgatgtagtttaaaaaatagaataggttacgttatttttttgttttattttgttgataatttgtggagtcgggtagagattttattttttattttaagtatttggcgtttgtgggggaattaagattttaaatgagaatattaagtttttcggtagttggtattaattaattatttattattgataacggaatgagttattggaaattttaaaaggaaaagtatatgggagaatttgattaatttagttagttatttttggagtgttatagttattaatgaagtaatttttagtgtaggttttggttttagggcgttatgtataattttttgtttcgcgtaacgtgggtttttcggagtttattttgttagcgtcgcgtacggttttagtttattaggtcgttaaggttcggaggggggcgttttagtcgcggggaatattggaaatgttttaggggcggatttcgaagatcgagtattgtttcgagggattttttgcgttatttcgtaatcgtttgcgttttaggttttcgtaggtgggggtcgggtgggtgaagattgggattttatgttacgcgtagtatttagaggagggttggggttttagggtcgtagcgcggttagtttagttcgggttcgagttttttagtagcgttttttttgggggttggttttgattttcggtgtcgttacgagtgggtggttagaagttggtggtggagagggagagcgtttgtaaggaacgacgaggttggcgtcgggattacgcggcggaggcgatcgaaagagaaacgaggttaggtaaggaggaggaaatttattcgatgaaggcgagttgtcgtttaagagggaggagggttttttcggttgtcgttgttgttgtttcgggacgtcgtttggggagttagttcgttcgtaaggtgcgcgttaggtagtttcgtatttagggggcgttttttttggttttttttagagcggtcgggacggaaggagttgcgcggcgcggcgcggcgcggcgcggcgggtggcgagggcgggttgtatttcgagcgcggcgtttttgagttgtatcgcggcgtaggtttgcgagtcgatttgttagtcggttaagaaaaggaagtttcgttttttttcgtttattcggtttttttattttttgtattttaaattttgtagagggcgagcggcgcggttacggaggcgtcgaggaggagcgagtcgtcgtcgggtagcggcgtgttttcgggggagagggcgtcggagaggaggcggcggcgcggcggcgagggcgcggcgcgcgatggtagttgtttagttcggcgggcgcggagtagtttcgagttgtggttggttaggcggtgcggttgggcgggggacgtcgtcgtcgttgttgttcggttcggagagatgagtacggaggcggacgagggtattattttttttgtgttatttttcgttttttcgggtttttgtattattttcgagggcggtatttgtaggaggggaggagcggcggcggtgggcgagggcgaggagtattagttgttatcgtcgtcgtcgggtagtttttggaacgtggagagcgtcgttgtttttggtatcggttgttcggcggttattttttcgagtagtgttattcgaggtcggggtagttttgttggcgggggtagtcgacggattacggtggtatatgtgattaacgaagcgagttaagggtaattggtggtggtcgagagcgaggttttgtagagtttgcgggaggcgtgcgagatagtgggcgttattttggaaattttgtattttgggaaattcgattttggagaaattatcgtgttggatcgtttttataatgtaggtgcgtgtgtgattttttttttatttcgcgcggtcgggattcgcgtttaatttggcggttttcggggtattttatttttttgggcgggaagtatttattttttgttttattttgggggtagcgagcgtcgttgcgtgattgtttttgtcgttcgtcgtttcggagagagcgtgtgtgtttgtgtaagagtttgtgtgtatttgtgcgatagatttatggatttatttatcgtttagcgttggagttttgggtttatgcgatcgatttgaattgttttttagtagtgtgagatatttgttttagttagtttttttttttttagtgtttcggtttcgtttttgtgaggtttggtttttgttttttttttgtatatatttgtgatcgttttagatgaggttttttttttttttgtgtagttttgagagtacgggaacgatgatatattatgtacgtagagtgtaattatattaatttgtatgttatgtgatgatttttttaatttattttattttcgataagttttagtagtttgaatttttttttattaatttagattttgaagtaattatagtgtttttaaaggtaataatattataatttatattgaatttgtgtgttatttttgtaaggattttggtgaaagaattagggtttgttttttattattttataaattatggtgggttagaaagtttgtaatttaatattgtttaaaatatttgtatgttattttaataataagattagtttcgttattaaagtgattgttagtataatttatgaaagaaatgtattttttaatttattttaaattttagaaaatgttaaggtagttttagtaattgaagtatttagttgttagtaaatgttaggaataatattatattatggaaattaatttttagttttttgtacgtttagtgttgagaatatatatatatttatgtttatatttgtgggtaaaaatttggtttagtagttttaaaataatatatttttt

SEQ ID NO: 174 - DNA, 6809 bp, Artificial Sequence
  chemically treated genomic DNA (Homo sapiens)
aagaagtgtattgttttgaaattattaaattaagtttttatttataaatgtaaatataaatatgtatatatttttaatattggacgtataggggattaaaggttaatttttataatatggtattatttttaatatttgttaatagttaagtgttttagttattagaattgttttaatattttttgaaatttgagataggttgaaagatatattttttttatggattatgttagtaattattttaatggcgaaattaattttattattaggatagtatataggtgttttagataatgttaaattataaattttttagtttattatggtttatggggtaataaaaaataggttttggtttttttattaaaatttttataaagataatatataagtttagtgtaagttgtaatgttattgtttttggaagtattgtaattattttaaagtttgggttggtgagaggaaatttaagttattaaaatttatcgaaggtaaggtgagttgggaagattattatatggtatgtaaattaatatagttatattttgcgtgtatggtatgttatcgttttcgtatttttaaaattatatagagaaaaggagaattttatttaaaacggttataggtatatgtagaaagaaaatagggattaaattttatagaagcgaaatcgagatattgaaaggagaaagattgattggggtaaatattttatattgttggagaatagtttaagtcgatcgtatggatttagggttttagcgttgggcggtgggtggatttataggtttatcgtataagtatatatagatttttgtataagtatatacgtttttttcggagcggcgagcgataggagtagttacgtagcggcgttcgttgtttttaaagtggggtaagaagtaaatgtttttcgtttagaaaaatgaaatgtttcgaagatcgttagattaaacgcgggtttcgatcgcgcgggatgggaaaggggttatatacgtatttgtattgtaaaagcggtttagtacggtggtttttttaaagtcgagttttttaaaatgtagggtttttagggtggcgtttattgtttcgtacgtttttcgtaagttttgtagggtttcgttttcggttattattagttgtttttggttcgtttcgttgattatatatgttatcgtggttcgtcggttgttttcgttaatagagttgtttcggtttcgggtggtattgttcgaggaggtggtcgtcggataatcgatgttaggggtagcggcgttttttacgttttagaagttgttcggcggcggcggtggtagttggtgtttttcgttttcgtttatcgtcgtcgtttttttttttttgtagatgtcgttttcggggatggtgtagaagttcgagggggcgaagggtggtatagagaaagtgatgttttcgttcgttttcgtgtttattttttcgggtcgggtagtaacggcggcggcgtttttcgtttagtcgtatcgtttggttagttatagttcggggttgtttcgcgttcgtcgggttaagtagttgttatcgcgcgtcgcgttttcgtcgtcgcgtcgtcgtttttttttcggcgttttttttttcgagggtacgtcgttgttcggcggcggttcgttttttttcggcgttttcgtggtcgcgtcgttcgttttttgtagagtttagagtataaggggtggggaagtcgggtgagcgggaagggacggagttttttttttttggtcggttgataagtcggttcgtaaatttgcgtcgcggtgtagtttaagggcgtcgcgttcggggtgtagttcgttttcgttattcgtcgcgtcgcgtcgcgtcgcgtcgcgtagtttttttcgtttcggtcgttttgggaggggttaggaagggcgttttttgggtgcggagttatttggcgcgtattttacgagcgggttggttttttaggcggcgtttcggaatagtagtagcggtagtcgaaaggattttttttttttttaggcggtagttcgtttttatcgggtggatttttttttttttgtttggtttcgtttttttttcgatcgttttcgtcgcgtggtttcggcgttagtttcgtcgttttttgtagacgttttttttttttattattagtttttggttatttattcgtagcggtatcgagggttagggttagtttttaaggagggcgttgttaggaagttcgagttcggattgaattgatcgcgttgcggttttgggattttagtttttttttgagtgttgcgcgtggtatagggttttagtttttatttattcggtttttatttacgaagatttggagcgtaagcgattacggggtggcgtagaaagtttttcgaggtaatattcggttttcggagttcgtttttgaagtatttttagtgtttttcgcgattagggcgttttttttcgggttttggcggtttggtggattgggatcgtgcgcggcgttggtaggataggtttcgggagatttacgttgcgcgaggtaggaggttgtatatagcgttttggagttagggtttgtattggaggttgttttattagtgattgtggtattttagaagtggttggttaaattgattaggtttttttatgtatttttttttttaaaatttttagtggtttatttcgttattagtaatgagtaattgattagtgttaattgtcgaaggatttagtatttttatttaggattttaatttttttataagcgttagatatttaagatagaagatggagtttttattcgattttataaattattaataagatgaaataggggaataacgtgatttattttattttttaaattgtattacgcgaggtcgggagggaaatatttagattgtttaagagtaattaaaaaaagtatttgtttatttggggagtaaagaatagatgtgtaagtttttagagaattttagaatgttgtaattgttaggaaagttagtgtaagttataattgagtaaagaaataggttttgtattttttatttttaggaattgagattagtgagttttgtgaaaaaggtagaagaaaatgtaaattatttttttttttttttgagacggagtttcgttttttttgttcgggttggagtgtaatggcgcgatttcgattttttgcgatttttgtttttcgggtttaagcgatttttttgttttagtttttcgaatagttgggattataggtatgcgttattatattaggttaattttgtatttttagtagagacgggagggggaggggtgtggggtttattatgttggttaggttggtttttaatttttgattttaggtgatatgttcgcgtcggttttttaaagtgttgggattataggcgtgaattatttagtttagttatgaattatattttaaattgggtaagaaggaaggataaaatagttgaatagtaaagaattaaaggaaagtttgggcgtagtggtttacgtttgtaattttaatattttgggaggtcgaggcgggtagattatttgaggttaggagtttaagattagtttggttaatatggtgaaattttcgtttttattaaaaatataaaaattagttggacgtggtggtagtcgtttgtaattttagttattcgagaggttgagataggagaatcgtttgaattcgggaggtggaggttgtagtgagtcgagatggcgatattgtattttagattgggcgatagagcgagattttatttaaaaaaagaaaaagaaaaagaattaaaggaaagagttttttaattttttttaaggtgggaggattgtttgagtttaagagtttaagattagtttggataatatagtgagatttttattttaaaaaaaaataataattaaaggaaggaaggaaatagttatgaggaaaaatatttagtcgttatataattgtattaatgaattaatgtgatattagatttttttaaaggtgtataaaataatagaagtaaatttttagtaaggaaattttatattttttatgtaaaatggaatttatgtgatttatattagtttttggaattaatattaatagtaaaataggtagtgaattagtgattatattgaaataaaatgttgttgagttagtaatagttatgtgttttttaatatttttaataatttgttaaatttttaaaattttgtaggagtaagataatttttttcgttatttttattaagaattataaattttggaaatcgatgaggtttatgtgtggaaaattaaaacgtttaaatgtttaagtagtattttattgtagaaatataaaatttgaaattatatattaagttattttttaaagttgtaattttttatatttttttattttgtgttttttttttagatttttttagagttatttttatatataatttttattttttgttttattttgttggtttttttgatttattaattttaaatatgttttttatgttaggtatttaaattttaatataatgttgaaattttgtttttagttggtttagagattttttttttatttaaaaggtacggtttaggtaatttatgttttatagtatagggttatgagataatgaggaattagttggtaagattttggaagaaaggataggaatttagagggtgagtttatagttagggttttttttggttgtgggatttttgtggatttgaattaggtagttgaaaggttgaagtgaatttttttaatgaaaaataacggtattttgtaaaataaaataaaaagaatggtgatatcgttgtgtatttttataaatttttttaatgtttggtttaatagatgatagtggatttttatttttgtttttatatttatgttgttgtagtatgttgttttggttgaagggtataaagaaaatttggagaagtttttgaagtgtaggaggtatttgaagaagtatatgaagaaaatattttgggaggagtatagttatttttattgtgaaggtatatatgaatttttaaaaattattgagttgtgtaaaatagtgttttttttaaagtaattttaagttttattttagattcgggggtatatgtgtaggttatatggatatattgtatgatgtttaagtttagggtacgattgtttttgttatttaggtagtagaaagagtatttaatagttggttttttaatttttgttttttttttttttttcgttcgtagtgtttgttgttattatttttatgtttatgtgtatttaatgggatttttttttgggaaggttttaagatttatagttagaaaggtggggggttgttagtaggtaaaaggagagtaggaaaaaattagaggtttgtttttgaggtttaatatatttaatataatagaagattataacgagggttatgggagttataagttagaaattatagatgaaaattaatatatatcgtaatattatattttgtttatagtttttttggttgtgtagaagttgtttagattaggtttcgtttgttagtttttcgttttgttgtaaattgttttttaggatttagttataaatttttttttaaggtcgatgtttagaatggtattttttaggtttttttttatgatttttagggtttgaggttttatatttaaatttttaatttattttgagtgaatttttgtatatggtgatgggtaggggtttagttttattttgtataaggttagttagtattatttattgaatagggagtttttttttattgtttatttttatcgattttgttgaagattagatggcggtaggtgtacggttttatttttgagttttttatttcgttttattagtttgagtgtttgtttttgtattagtatcgtgttgtttgggttattgttgttttatagtatagtttgaagttaggtaatatgatgtttttggttttggttttagttatttaggtttttttggggttttattttattttattttatttttttttgttgttttataggtttttttttggttttatatgaattgtagaatagtttttttaattttgtggaaaatgatgttggtagttttttaggaatattattgaatttgtagattgttttggatagtgtggttatttaaataagattgatttttttaatttattagcgtggaatatttttttgtttgtttgtgttatttatgattttttttaatagtgttttgtaattttttttgtagggattttttatttttttgattggatgtatttttagattgtgtgcgtgtgtgtgtgtgtgtgtgtggttattataaatggaattgtgtttttgatttgttttttagtttgaacgttattggtatatgaaaatgttattgatttttatatattgattttgtattttgaaattatatcgatattgtttattaattttaggagttatttggtggagtttaggtatagaattttgtttttaggggatgaggcgtagtggtttatgtttgtaattttaggattttggaaggttaaggcgggtatattatttgaggttaggagtttgagattagtttggttaatatagtgaagttttatttttattaaaaatattgaaaaataaattagttgagtatgtagtttgtagttttagttatttgagatggaggttgtagagagtcgagatcgtgttattgtattttagtttgggtaatagagtgagattttgttttaaaaaaaaaaaaaaaaaaaaaagatttttatttttagggaagagagattatttgatttttttttttatttggatgttttttattttttttttttgtttg

SEQ ID NO: 175 - DNA, 5908 bp, Artificial Sequence
  chemically treated genomic DNA (Homo sapiens)
gttaagtagaggagagtttttttagattggtttttgggttttttagatatgattatagtaggtttttatttttatgtttttagagtatttttgtttgttgatgtgataaaatgttttagggttattttgtaggttttttgtttcggatttggaatttattatttttataaggaaatttaattttttttaatggaaaatggtttttaaggttataatttaggatgtaaggatatttataattatggggtaaatttaaggtttttttagtggatatataaggaaatttgttttattttaaattttgaaagataatatattatgagtttattttgatatttttagtatagaatttattgaatgttataaggagttagattttatttttgatgtttgatgttcgattgttggtggttttaaagttttatttttttttttttttattttttaattttatatttgggtaaattaataagaaagttttagttttttttttaatttatagaggttttgttattagtttttaataggttttagttttaattataagttagatttttttttgtttttttaggttattttatatttttttgggaggtttatttgttgttttaaagagtttaattatgtgagtaataattttttttatattttttgggtggatgtgtggtattattagttttgatatttaaattaaattttgggtggggatttttttttgtttttgtatagtggttataaaatataattttttgattttatatttttttttttttaggttaaaaaaattttatttttagtgatgtttaaataatcgtttatttgttttattttattataatatataggtttagaaaaatattaatattattattaatataatttttggaaattgattaattttggtttttagtttattttatttttagagaatgtttgtttagagaagtatttttatattggtgtgtttaaaataattaaattatttttttttatggagttatattgttgtatgatatatagttgtattttaatttttatttttagggttttttttttttgtttttattgatttaattggttttatatttatgtaaatatttataaggtttaaaagttaagtttattaaagaagatagtttagagaaattgggtttttatttttatttttttttttttttatatttacgttgtatggtttatttttttgtagtttttttttaataaaagtagatgtgtatatatatttataagtttatattttttgatgttatgttttgttttattgtttttttttaaagttggagagttgagatttatgttttggtttttttttgtttaggtggttaatttgtgtgcgggtaggtgggttgatgtagaattttttgtggttggagtaggtttttatcggttaaggtatatttaggttgattttttttttggaggttttataatatttgttttaggagtggtttatttagttataaagtttatttttttttttttttttaggaagtcgatatagttggttaatatgttaaaatttgattttattaaaagtattatatatatatatatatatatagtaatatatatattaattatatatagtatatatattttatatataattgttatatatagtatatatattatatataattattatatatatagtatattatatatatatatatatattatatattatatatagagagaggatattatatatatatatatatatatatatatatatatatatatatagcgatagtatattatatatatatatatatatatatatatatatatatatatatatatatatatataatatatatatatatataaattgtgcgtggtggtttatatttgtagttttagttatttagggggtcgaggtaggagaattgtttgaatttaggagttagaggttgtagtgagttaagattgtgttattgtattttagtttgggtgatagagtgagatttagttttaaaaaaaaaaaagtgaaattttatttttattaaaaatataaaaaaaaaaaatagttgggtttagtagtagatatttgtaattttagttatttgggaggttgaggtaggagaatcgtttgaatttgggaggcggaggttgtagtaagtagagattgtattattgtattttagttcgggggatagagtgagattttattttaaaaaagaaaaataataatagtaataatagaaaagaagtaatttaaaatgttttaaagaagtaatttaaaatgttttttttttttttttttttttttttttttttttttttttttttttttttttttttttttttttttttttttttttttttttttttttttttttttttttttcgttttttttttttgttttttttttttttttattttttttttttgatggagtttcgttttgttgtttaggttgaagcgtagtggcgtgattttggtttattgtaattattgtttttcgggtttaagtgatttttttgttttagtttttcgagtagttgggattataggcgtgtgttattatattcgattaatttttgtatttttagtagagatggggttttattatattggttagtttggttttgaatttttgattttatgatttatttattttggttttttaaagtgttgggattataagtatgagtttttgcgtttggtttagtattttttagttttaattaggttgtatttatgagggtggaagaattgtttttggaaataagtagtaattaggatgagaaaagttgtgttttatggggttatgtagtggtgggttttgtttgatcgtttaatgggggaaaatatggaaatttatgttttttaaaacgtttatataatagtattttcgtattgaatttttttacgttagatttggtttatataatttagagttgttgttttgtgtttttatgttgtttttttagtttttttatttttattagtagttgatatttttgtagttgttttagagtagagggtttagtttttttaattttgtggtttttttatatttttaagaattattgagaattattaggaatttttgttaatgtggatgggttatatttagttatatttatatatttaaagttagggttaaggaatttaaaaatatttatttattgatttattttaagatagtgatgtatttattttatgttaatattaataatttatttttatggaaaaaaaataataaaatgaaaatagcgttttagtttatatttttgtaaatttttgtaatatttggttgaaacggagatagtgggagtttttttattgtttttgtatttgtagaattatattttatatttttgggagtatgagaatgagaagggtaagtaatatagagggttattagataaatggttttgattttatggattttttgaaaggaataggaagtttttaggggttttttgtatcgaggtttttttgattaagggagttaagttttaagggttgttggggagttggaggaggtgagatggggtagagaggtcgttgttattaaaagcgtgtttaggttttatttattttattttaggtggtttattgagtttatatggttattagcgtaattgaagtagatttcgatagaattttgtgtagaattattttaggatttatttattttggtatgtataagttattttaattgaagaatgttttttaataataaaatattgtaaatttaagtatgtggtaatagtaatgattaagtaaattatggtttttcgaagtttagtgttttgtagttattagagagtaaaagcgagaatgtgtttagtggagatagttttaggatatttaaaagtagagagtataaagtatagaatcgtgttgtgtatgttatgatttttttttttgtgtttttgaaaaagagaatatacgtatagtaggaaaagatatattaaattattttatataattggttgtttttgtgtttggtaagatgtatgtattgaagaggaaggtttcgattttttttttttttttttttttttttttgagatagggttttgttttgtcgtttaggttggagtgtagtggcgcgattttagtttattgtagtttcgatcgtttcggtttaagcgatttttttattttagttgttttagtagttagaattataggggcgttattacgtttggcgaattttttgtagagatgggttttttttaggtggtttaggttggttttgaattttcgggtttaagggatttttttgttttagttttttaaagtgcggggattatcggcgtgagttatcgcgtttcgtttgtttttaatttttagtagttttaaattttttggtaatgagtaatgttatagtgttttagatgtttggttttttaagaaaaggatagtaggacgggttatttcggtgggagcgtgttttatttttgtttttcgttagtcgttttcgtcggggatgtatttaggtattttttttcggatgcgtgagtggttcgttcgcggatacgttagtttcgtttcgcgagttcggttttttcgtttttttttcgtttacgttttgcgttttttttttattggttttatgtcgcgttttttcgtttaatcgtagcgtttagcgttagaatttgaattttcgttttcgtttgaattgggcgggcgcgtcgggttggaagaaggaagtggagggttgacgttgcgggcgggcgggcgggcgggaggattcgattcggtgggagtcgttagagtcgggcgttcggggacgtagtttgtagggttatcgggttttcgttagaggcggcggcgggagtagcggggattgtaggtcggggtgtagcgaacgtttttcgcgggttgcggttcggtgtgtgcggagcgtggcgggcgtagtttatcgggtcgaggtgagcgcggcgtcggttttttttgcggcggattttgggtgcgatttgacgagcggtggttcgataagtggttttgcgggtcggatcgttttaggtgagttgcggtcgggatttttgggagttgttcggggtcgagggttgagtcgcgtgttattggttgtaggtaggcgtttgaagatattgtgcgttttcgggtgtttttatagtgggtatttttggttattggggatatagagaatgaaggaaggaagttatatatttgttttttggttttttgtggtaataggaaaatgggatagaaagtttttttgtttggaattcgagaacgtttttttttatattgttgttttgtttggtggtggtaataattttgtttttgtataataggtatagttgttgatagtgttttattagtttttgatatgtgttttattagaggtttgagaaggggggttatttttcgtgtggttattttttagattatacgggatttaggttttattttgtttttttaattttatttcggttttattttgtttttttaattttattttttattttgtttttttcgtttaaggtattttaagtttttgtttattttggtattttttatatatttggaagtttataatgggaaagttttttttttttttaagtttgtgtgatttttattatttaggtattaggtgaaatgttatttttgaggaagttttgtatgaaaatttgtatttttaattttatagttttaggggtgagttgtgggtttgttttttattaggttgagttttttaaaggtaaagattgttttgttattaattacgtgtgtagggttagggatggtgtttggtatagggggtgtgattaatatttagtattttggtaagggttagtagaaatatgggttggagttatggatttgtaattttttgagaatagtggtttttataggagggttatttaattttttaggatttatttgaatttttatgttata

SEQ ID NO: 176 - DNA, 5908 bp, Artificial Sequence
  chemically treated genomic DNA (Homo sapiens)
tgtgatatggaaatttaaatgaattttggaaggttagatgatttttttgtgagaattattgtttttaagagattgtaaatttatggttttagtttatgtttttattgatttttgttagaatgttaggtattgattatattttttatgttagatattatttttggttttatatacgtgattagtaataagatagtttttgtttttggggagtttagtttagtgggagataaatttataatttatttttgaagttgtggggttggaaatataagtttttatgtaaggtttttttagaggtgatattttatttgatgtttgaatgatggaaattatataagtttgaggaaggggagaatttttttattgtaaatttttaagtgtgtaagaagtattaaggtgaataaaggtttggaatgttttaggcggaaggaataaggtaggggatggggttgggaggatagggtgaggtcgggatggggttgggaggatagggtgaggtttgaatttcgtgtggtttgggaaatgattatacgggaaatgatttttttttttaggtttttagtgggatatatgttagaggttgatggggtattgttagtaattatatttgttatatagggatagggttattattattattaaataggatagtaatataagaggaaacgttttcgaattttaggtaggaagattttttgttttatttttttattgttataaggagttaagagataagtgtatggttttttttttttattttttgtgtttttagtggttagggatgtttattgtggaggtattcgggggcgtatagtgtttttagacgtttgtttgtagttagtgatacgcggtttagttttcgatttcggatagtttttaggagtttcggtcgtagtttatttgggacgattcggttcgtaaggttatttgtcgaattatcgttcgttaagtcgtatttaaagttcgtcgtaggaggagtcggcgtcgcgtttatttcggttcggtaagttgcgttcgttacgtttcgtatatatcgggtcgtagttcgcggggggcgttcgttgtatttcggtttgtagttttcgttgttttcgtcgtcgtttttgacggggattcggtggttttataggttacgttttcgggcgttcggttttagcggtttttatcgagtcgagttttttcgttcgttcgttcgttcgtagcgttagttttttattttttttttttagttcggcgcgttcgtttaatttaaacgaaaacgaagatttaaattttggcgttaagcgttgcgattgaacgggaaagcgcggtatgggattaataggaagggagcgtagggcgtgggcggggagggggcggggaaatcgggttcgcggggcggggttggcgtgttcgcgggcgagttatttacgtattcggaggaaaatatttgggtgtattttcggcgagggcggttggcggagggtagaggtggaatacgtttttatcgagataattcgttttgttattttttttttaaaggattaaatatttgggatattataatattatttattgttagaagatttaaaattgttaaaaattaaaaataggcgggacgcggtggtttacgtcggtaattttcgtattttgggaagttgaagtaggaagattttttgagttcgggagtttagaattagtttgggttatttggagagaatttatttttataaaaaattcgttaggcgtggtggcgtttttgtagttttagttattgggatagttgaggtgggaggatcgtttgagtcggggcggtcgaggttgtagtgagttgagatcgcgttattgtattttagtttgggcgatagagtaaagttttgttttaaaaaaaaaaaaaaaaaaaaaaaaaaaatcgaaatttttttttttagtgtatatattttattaaatataaaaataattaattatataaagtagtttggtgtgtttttttttgttatacgtgtatttttttttttaaaagtatagaaaaaaaggttataatatatataatacgattttatattttgtgttttttgtttttaaatattttgaggttatttttattgaatatattttcgtttttattttttgatggttgtagagtattgggtttcgggaaattataatttatttaattattattattgttatatatttaggtttataatgttttgttattagaaaatattttttaattgaaatggtttgtgtatgttaagatgggtgaattttaaaataattttatataggattttatcggggtttgttttagttgcgttggtggttatgtgggtttagtaggttatttggggtgaagtgaatggagtttaaatacgtttttggtgataacggtttttttgttttattttattttttttagttttttagtaatttttggagtttggtttttttgattagggaggtttcgatgtaggggatttttgaggattttttattttttttagagagtttataaggttaaaattatttatttaatgattttttgtgttatttgttttttttatttttatgtttttaagagtgtggggtgtggttttgtaaatgtagaagtagtgaggagatttttattgttttcgttttaattaggtattatagagatttgtaaaaatgtgaattaaagcgttgtttttattttgttgttttttttttataaaaataagttattggtgttagtatgaaataggtgtattattattttaaaatgaattaataaatgaatatttttaaattttttagttttaattttaaatatataaatatagttagatataatttatttatattaataaaaatttttggtggtttttaataatttttaagagtgtaaagggattataagattgaaaagattgagttttttgttttagagtaattataaagatattagttgttgatggaaatagagaaattgggaaagtaatataaaagtataggatagtaattttaaattgtatgggttaagtttgacgtagaaaaatttagtgcggggatattattatataaacgttttagggggtatgagtttttatgtttttttttattaaacgattaaataaagtttattattgtataattttataaaatataattttttttattttaattattgtttgtttttagagatagtttttttatttttatggatgtagtttaattagaattagaaggtgttaggttaggcgtaggggtttatgtttgtaattttagtattttgggaggttaaggtgggtggattatgaggttaggaatttaagattagattgattaatatggtgaaattttatttttattaaaaatataaaaattagtcgggtgtagtggtatacgtttgtagttttagttattcggaaggttgaggtaggagaattatttgaattcgggaggtagtggttgtagtaagttaaggttacgttattgcgttttagtttgggtaatagagcgagattttattaaaaaaaaaaaatagaaaagagagagagatagaaagaaagaacgaaggaaagaaagaaagaaaaagaaagaaagaaagagagagagaagaaaaagagaggagaaaaagaaagaaagagagaagaaaaaggaagaaagaaagaaaaatattttgagttatttttttgaaatattttgagttattttttttttgttgttgttgttgttgttttttttttttgagatgaagttttattttgtttttcgggttggagtgtagtggtgtaatttttgtttattgtaattttcgttttttaggtttaagcgatttttttgttttagttttttaagtagttgggattataggtgtttgttgttaagtttagttattttttttttttgtatttttagtggagatggggttttatttttttttttttgagattgagttttattttgttatttaggttggagtgtagtggtatagttttggtttattgtaatttttggtttttgagtttaagtaatttttttgtttcggttttttgagtagttaggattataggtgtgagttattacgtatagtttatatatatatatatattatgtgtgtgtgtatatatatgtatgtgtgtgtgtgtgtgtgtgtatatatatagtatattgtcgttatatatatgtatatatgtatatatatgtgtgtatatatatagtattttttttttatatatagtatatagtatgtgtgtatatatatagtatattgtatatatagtaattatatatagtatatatattatatataataattatatatagagtatatatattatatataattagtatatatattattatatatatatatatatatatagtatttttagtagaattaggttttaatatgttggttagttgtatcgattttttggaggagggagaggaggtgagttttgtgattggatgagttatttttggagtaggtattgtgaagtttttagaagaggaattaatttggatgtgttttgatcggtgaagatttgttttagttatagggggttttgtattagtttatttgttcgtatatagattaattatttggataaaagggaattagggtatagattttaattttttaattttagagaaaggtagtgaaataaaatataatattaaaaagtatgggtttatgagtatatatgtatatttgtttttattaaaaagaagttataggaagataaattatataacgtaaatatggagaagggaggggatagggatagaagtttagtttttttgaattgttttttttggtagatttgatttttgagttttataaatatttatataaatataaaattaattaaattaataaagataaaaagaagaaattttaaaagtagaaattaaaatataattgtgtattatgtagtaatatagttttatagagaggaataatttagttattttaaatatattaatgtaagggtatttttttagatagatattttttgaggataaaatgaattgaaaattaagattaattagtttttaagaattgtgttggtagtgatattgatgtttttttgaatttatatattatgataggatgaggtaaataagcgattatttgaatattattaggaataggatttttttagtttaagaaaaaaggaatataaagttaaaaagttgtgttttgtggttattgtgtaaaagtagaagggggtttttatttaaaatttggtttgggtattaggattgatggtgttatatatttatttagagggtatgggaagggttattatttatataattgagttttttggggtaatagataggttttttaagagggtgtgaaatggtttgagaaagtagggaaggatttggtttgtggttagggttggggtttgttgagagttggtggtagggtttttgtgggttgaggaagaagttgaagtttttttattagtttgtttagatgtggggttggggagtggggagagggaaggatgaggttttaaggttattagtagtcgaatattaaatattagaaatggagtttgattttttatggtatttagtaaattttgtattgagaatgttaggatgaatttatggtgtattattttttaaaatttaaaataaaatagatttttttgtatatttattgaagaggttttgaatttattttatagttatgagtgtttttatattttagattatgattttgaaaattattttttattaaaaggagttaagtttttttgtagaaatggtggattttagattcggagtaagaaatttataggatgattttggagtattttgttatattaataagtaaggatgttttaaaaatataaaaataaaaatttattgtgattatgtttgaaggatttaggagttaatttgaagagatttttttttgtttaat

SEQ ID NO: 177 - DNA, 9373 bp, Artificial Sequence
  chemically treated genomic DNA (Homo sapiens)
ttattttatttttatttttatatttagtttgagtttttgttgtttgttttttttattatttttgggaggggttttttgttgtatgttataaaagattatttaattatttttagagttttcgttgtggttttgtttaatgggttgttgtagtttagtagaagttgagttgagtaagatatagatggttaaaatggggggagtttgagttttggtattggatggagtttttggtgaggtaatttagtttttagttgaaatttagaatttagtttttttttagttgtaggtttttgaggaaattgtttttgtttaggtttttttatgaagggttgtatgttttagtttttttattttagttagtgtatttttttaaatggtttttaagagtgagttgagggtttgagagaaggtttagttgattttttaaggtagaagtgggtttgttataataagagttaatattgttacgtgtattcggttttttttagttattttagtttttggtatggtataggtagatttgtatggggtattatggatatttaggaggttcggtagtgaaagtttagttttatttattttattataggatttagggtataatgtagagagtttttattttgttgtcgggggattttttagttttggttttagggaatataaggtttaggaagtatttattggagaaaattgttttttgaatgtggtttttagattgttagagagaattatttttatgtagtttttgagagttgagttaatattttttgttattaaaattaagttatattgaagaatgagtttgtgtgggtgatatggatttagggtatattggaatagttgtatttattgttttagaaaatggtagtatagtttttgtttttggttttattgtggtttatattggaatgggtatggtagtaggttattagtttagattttaaagttttcggggagtagttataggtttggtgggtgttgtttattttgtatatatgttttgggttttttttatgtttgttttttgtttttgttttttttttgtttttagtaagaatattaaattattgtttttggggtttgggtgatgttaagttagttgtttttgattgttattggtattttggttaatagtgagtttttaagtgttttttttggttgttttgatttttgtaggttttttagtttttgtgtagtttagtatatattttggggagattatagttggataaatgtgtatatttaggattataggtatttaggagtgtggggtgtatttgtttggagattaggggtgggaagatagataaatagggaaggtgttcgtagtggaagagttagtatgtgtaaagggaaggatttggtaagaatttagtataggtcgggtatggtggtttatgtttgtaattttaatattttgggaagttaaggattgtatattattggaagttaggagttttagattagtttggttaatatggtgaaattttgtttttattaaaaatacgaaaattagttgagtatggtggcgtgcgtttgtagttttagttatttaggaggttgaggtaggagaatcgtttgaatttaggaggtagaggttgtagtgagtcgagattgcgttattgtattttagtttgggcgatatagtgagatttcgttttaaaaaaaaaaaaaaaaaaagaatttaatataatttgtttgtagtgaagttggagtggtttatataagggttggggtttttaaattttaggtaatttgtagtgtgatgtggttatattatagttagagagatttttttgttattgttaaggtgattttgggattagagaaagaggttagatttagttttttagaatagtgtttagaggggattgagagtttaaggagggaaaagtggttagtatttttttaaggcgttaggtgttagggtagtcgagtaggtttttagttagttatgttagtttgggggtgtttttgtatttggtatttaagagttttattagttgattttttttatatattttgattgtttttttttatagaggcggtagatggcgagagggggaaggggtgtttttgtgtatttttgttgttgagaattaaggttgttttataggggattttagtttggggatagttattagcgcggttatacggtggtagcggagaattaacggatggttgtcgtaatattatttttaaaaaggggtgggtggggtgatttaagagggtttgtgaagtttttttttaattattagagatttttttgaaagtttggaggtgggatttgggttattagaatttttgtttgtgcgttaggttgagaatgttttattttagttttgttttgtttatttttagatgtgttgattgtggaatgtaggaattacgttacggtttttttcgggtgtttatttattttttggttaattttgttttggaaaaggatgttttttatgttattttagggtatagtattaattttgtattgggtgtggtcgtttttatttttatttttttttttagtttttaggtgtttatggagttttaggttggaaggagggggagttttgtattggggatggaggaagtgaagtatttagagtaaattgtgttggggtgagtgtagtattgggtttgtgagatttaggagaggggattggtaaagtttggattaaaaaggttttttggaggaggtgttatttaggtggtaaaaggagaaaagggaaagagtgtttttggaaggaggaatagtatttataaaggttaggttaggaaggggatgtaggtatagaagtatgaattgaaaggggagtgaggagatatagttttttaagttaggttaaattttgttgggttgagggttttttttttttttagtttttttatttatagttttggggtttatagtttatagtttagatttattttgtggattttttttgttttttagggtttaggtttatttaattgaggggtttgttaggttaaggttgttttttaggggttttagtttagtgttgggggattagttattaaggggtagttgttgagatttaagtgtgggattaggtttttttatttttattttttataaatagaagagagaattttgggaaattatttagtcggaattacgttttttttttttttttttggagatggagtttcgttttgttatttaggttggagtgtagtggtataattttagtttattgtaattttttattttttaaatttaagttatttttttgttttagtttttttagtagttgggattataggtatttattattacgttcggttaatttttgtttttagtggagatagttttattatgttggttagatttgtttgtttattatgttggttttgaatttttgattttaagcgatttattcgtttcggttttttaaagtgttgggattataggcgtgagttattacgttcggttatatattttattttaaaaatatttttagtagtttttttgttttgttgagttttgttatgttgtttaggttggttttgaatttttaattttaagtaatttttttgttttggttttttaaaggagtgttaggattataggtatgagttacggtgtttagtttagaattatatttttattgaagagaataagatttagtaaggtttatagagtatgttggaagtgttttgagagttaaagtttatgatttttttatattaggggggtattgggtagagttaggaaggaagggggagtttttaaggtttatattgtggattttattatatagtttttatatattgaggttgtagaggaggtatgggtttttatttacgtgtttttttgattttgaggtttagttagtaaggttagattttattttaagatttttatggttttgggagagtagggtataatatatttttttttgatattattttgtcgttgatagtttaggagaagtatatggaagaatggtttcggtcgggcgcggtggtttacgtttgtaattttaatagtttgggaggttgaggcgggcggattatttgaggttaggagtttgagattagtttggttaatattgtgaattttgtttttattaaaaatataaaattagtcgggtgtggtggtgcgcgtttgtaattttagttatttaggaggttgagataggaggaggttgaggttggagaatcgtttgaatttgggaggcggagtttgtagtgagtcgagatcgcgttattgtaatttagtttgggttatagagtaagatttttttttaaaaaaaaaaaaggatagtttttttttataaagggtggcgttttataatattttttgtaagtgttttatattttttttttggttttttatataattttggtttttgttttttatatggtgggtttttaggttatttttgggtattagttattgaggttgttgttattaagtgtaaattagttttatcgtaagtaaagagtttagtgttttgttttttttttcgttgcgaattagtcggtagtggggggatgggatgggacggtttagattggtttatttttttttaggttatattatgtatatttatttataggtcgttgagaaaaaggcgttaagacgttaggtgaaggtataggagttaggtttttaagggtcggaagagtcggatgggcggagggtttgggttaggttaagtttttttcgcggtttcgtttttatagttcgatttcgttcgtttagttcggcgttttcgggtcggttgagcgttaagcgttagtgtatagcggcggttggggcggtaggtgaggcggttggggcgttgttgtcgtgcgttcgtaggcgttaggtgtttagattcgagggtcgggaagggatttgggttttataggaatttggggcgggggttcgttattttggggttgtcgggatcgttgtttaaatttggtttagtttagatttcgagtcgggtttttagttaggtttacgtttaggtttaggtttaggtcggtagggattttttagggttttagttcgtttcgatggagtttttttcgtcgttgttttagttttttttgttgttgttgttgttgtttgttaagttcgcggcgggcgaggattggtagtgttcgcgtattttttacgcggtttttcgcgattttgacgtgaagtacgtggtgtttagttttttcgtcggaggtttggtataggttatggtgatttacgagggcgatagaaatgagagtgttgtgtttgtagttatacgtaatcgtttgtatgtgtttgggtttgatttgaagtttgtttagagtttggttacgggttttgttggagattttggttgttagacgtgtgtagtttgtggtttaggattttacggttttttcggtgatatagatataaaggtgttggtgttggatttcgcgttgtttgcgttggttagttgtggttttagtttgtagggtcgttgttttttgtatgatttagagttttaagggatagtcgtgtatttggtagcgttagtttgtttttttttagtttattataatcggttcgatgattgtttcgattgtgtggttagtttattgggtattcgtgtaattgtggttgagtaaggttaggttttttatttttacgtggtatttttattggacgtagtcgtggttgttagttttagtttacgtttagtgtttattaggcgttttaaggttgacgtttcgggattcgtatcgggttttgtggcgttgttagtgttgtttaagtattttgttttttatagtattgaatacgtgtatagtttttatacgggagttttcgtatattttttgattgtatagtcggttagcgtgatagatgattttagtgttttgtatatacgtttggtacggtttagcgttattgagttagagttgggtgattatcgggagttggttttcgattgtagatttgttttaaaacgtaggcgtcggggggttttagaaggcggatagttttattttgtgttgcgggtggtttatttcgttttagtgggtgtttaatttgttattgagttgagtatcgtcgagggttaggaagtattatttggggtttttgtgattggtaaggatggtggttttggcgtgggttttaattttgtcgtttgtgttttttttattgatttgttggatatattaattgatgagggtgtggagcgttgttgtgaatttttagtttatttaggttttcggcgaggtttcgattttttttagtcgtttagtttttgttttaattcggtaagttgaaagaaggggtttttatttgtgagttgtatgtatatggttgaatataggttgttttttttttattattgaggggatttgggggcgcggtgggggggtaggcggaaagaagtatttttttttatttagtttttaagtgttggggtggtgtgagaaattagttagataaaggttatattggaggtttagtttttaggttggtttttgtggttgttttattttgtttttttttttatttgtttattatggtttttggttttttaggtagtttttttggttatgtgaggatagggttatataatcgtgtttttgttagtatagtttttgaatgttgggtagaatgatgggtatttttttttatttgtttattatttatatttttagggatatacgtagaaaaatagtatttttttttttttttttttattttcgttattattattattattacgtataaatatatagggagatgtttatagatttatagatttatagttgtttgttaatagttttatttttttttgttttgttttgttttttaaagggggtgggacgggagttgttagagaattttttttttttttatattttttttttttatttatttttatttttttgttagttattacgttttagggagttttttgggttttggaagttgggagtttgttagggagtttgtatgttttgggttttattaacgtttttgttatgattgggggtgattgggggagtatttagaatttatggaatggtagtttggttttagaaggttttgggagttttattttagttttatgtaagtaattataaatatttggggataagtaaaggtttaggaagggttggttggaattggtttattttagatttttttttttaattgtatttggagttttattttaggtaggaagttttaaagtttgtgttgaattgggggttttttttatagattttatttaggttttttttagttatcgtgtaggtaatagtagtaagattggattaaggaatgggatttatagttattgtttttagattttttagtaattattttgtggttttgggtttgttgtgatattttcgaaagattttttttcgtttttattgatgtttcggagatgggagaatttatatttaatgtgaggttgggggtttttagtttttttttttttgttgagtatatttgggttgagaggttttagggttggggattttttgtttgggtttgggtaggtttgtttggtttttttttttttttaatggggagttagaatttttttttagtttgtttagtggttagtgggttagaagatatttagtacggttgggtagtgttaggttttaggaagattaattttggtttttgtttataggttggttaggtttttaggaggtgtgtgaattatttcgtttagtgtttgtttagtaattttgggtatgtagttattagggtagtatttatatagtggttggttttaggaggtttgagggatttagagttggtgtttgttttttatgggatattggatatttacgtgtttttaggagttgggggtttttatttaagtttgggaatttagagttaaggttttggggttagggataagtaggttagggtgtgggtttgattaaggtagggttttatttttttttagagttttatttgtttttgagttatgttagaaatatttggtagtttttcggttcgggttaagttaagtcgattttttgttttaagtgaggataaaattttagtttttatttattttaagttgtaggtataaggtgtatggggtttcgaggtttagttttatatttatttttgtttttagggttattaattagtgttgaggttttaggattgggttaagtttttgtggtttgatggagtttttagaggtttttgtttcgaggagtgtttttcgggttggtgagagagagttttaagtatttagggttggttattgagtttcgtttgtatttcgtatttagttttaatatcgcgagtttatattttggtgtattggttttttagagtttttatagtttttttttggagcgtgattgtagtttttaaaaatatttttttgttaaaagtaggggagaggttagtattttttagtttttagaatttagttttggtatttaggttgtaggggtttggtttattttttttgtattttgaaggggggtataggaagtagttaggagtataggtagatttttggagtttagggagaaggattatgtttttaattttgtgttggttaattaattttagtatttagttttttatgtaagtggggaaatcgaagtttagaggagatagggtttgttgaagtgtatatagagagttagagaagagttagtagggggtaggagaagatttttgcggagttgagatttttaattgggttttttttttgagggtttatgatgttttggattagagattaaattttttgagtttgtttttttatttgtgagatgtacggggtgggttaggtatcgtggtttatgtttgtaattttagtattttgggagattaaggcggattaattataaggttaggagttcgagattagtttggttaatatcgtgaaatttttatttttattaaaaatataaaaaattagttaggggtggtggcgagtatttgtaattttagttattcgggaggttgaggtaggagaattttttgaattcgggaggtgttgtagtgagttgagattatattattgttttttagttttagtaatagtgtgagatttcgttttaaaaaaaaaaaaaaaaaaaaaaaaaaaaaaagatgttcggggtggttgtgaggatggaatgggggtaatttattattaggatgggtatggtagggtggggtagggagaatgaggagtggattttttagtttgggttttttttttgtttttgttatattgagagttttgtgggggtaatgtgggatggtaatcggtaggtttagggttttttttagttaggttaggtgaggggtgagagtgttgggttgttgtggttattgataaaggttttagagggtcggggtataaggttgaattttgatttttttttttttttgattttttttagt

SEQ ID NO: 178 - DNA, 9373 bp, Artificial Sequence
  chemically treated genomic DNA (Homo sapiens)
gttgggaaaggttagggaagggaaggagttagggtttagttttgtgtttcgattttttggggtttttgttagtggttatagtagtttaatatttttattttttatttggtttgattggagaaggttttgggtttgtcggttattattttatattgtttttatagggtttttagtgtagtaagggtagggagaaggtttaggttggaaggtttattttttattttttttgttttattttgttatgtttattttgatggtgagttatttttattttatttttataattatttcggatatttttttttttttttttttttttttttttttttgagacggagttttatattgttgttggggttggagggtaatggtgtgattttagtttattgtaatatttttcgggtttaagagatttttttgttttagtttttcgagtagttgggattataggtgttcgttattatttttggttaattttttgtatttttagtagagatgggggttttacgatgttggttaggttggtttcgaatttttgattttgtgattagttcgttttggttttttagagtgttgggattataggtatgagttacggtgtttggtttatttcgtatattttatagatgaggaaataggtttaagaggtttggtttttggtttaaggtattatagatttttaagaggagagtttagttggaagttttagtttcgtaagagtttttttttgttttttgttggtttttttttgattttttgtgtgtattttagtaaattttgttttttttgggtttcggtttttttatttgtataaggggttgaatgttggagttaattggttagtataaggttggggatatggtttttttttttagattttaaaggtttgtttgtatttttggttgttttttatatttttttttagggtataaaagggataaattaaatttttatagtttgggtgttagaattaagttttggaagttagggggtattaattttttttttgtttttagtaagggggtgtttttgggggttgtaattacgttttaggggaggattgtggaagttttgggaaattagtatattagggtatgaattcgcggtgttggagttgagtgcgaggtgtagacggggtttagtagttagttttaggtgtttaggatttttttttattagttcggagggtatttttcgaagtaggagtttttgaaggttttattagattatagaggtttaatttagttttgagattttagtattgattagtagttttggaggtaaaagtagatgtggagttgagtttcgaaattttatatattttgtgtttatagtttggggtgggtggggattgggattttgtttttatttgaggtaggaaatcggtttggtttggttcgagtcggaaggttgttaggtgtttttagtatgatttagggataggtggggttttgaaggggaatagagttttattttagttaggtttatattttagtttgtttgtttttagttttaggattttagttttaggtttttaggtttaggtaggggtttttagtttttgaaaatacgtaagtgtttaatgttttatggaggataggtattagttttgagttttttaggttttttgaggttaattattatgtgggtgttgttttagtggttgtatgtttagagttgttgggtaaatattggacggggtgatttatatattttttgggggtttggttagtttgtgagtagggattaagattagtttttttggagtttggtattgtttagtcgtgttgggtgttttttgatttattgattattaggtaagttggggagaggttttgattttttattgggaaggagaaggggttaggtaggtttgtttaggtttagataaggagtttttaattttagggttttttaatttagatgtatttagtagagggagggaggttaaagatttttaattttatattgggtgtaagtttttttattttcgaggtattaataggagcggaaaggagtttttcgagaatgttatagtaggtttagggttataggatgattgttagagaatttaagaatagtagttgtgggttttattttttggtttaattttattgttgttgtttatacgatggttggagagaatttagatagagtttgtggaaggagtttttagtttagtataggttttgagattttttgtttggggtagggttttaaatatagttaaaaaaaaaagtttgggatggattaattttaattagttttttttaggtttttatttatttttagatgtttatagttgtttgtataagattagagtgaggtttttagaattttttagaattaagttgttattttatgagttttgggtatttttttaattatttttaattatggtaaaaacgttagtgaagtttaggatatgtaggttttttaataagtttttaatttttaaggtttaggaggttttttggaacgtggtggttggtagaaggatgggggtgggtggggggagggggtgtggaggaaggggagattttttgataattttcgttttattttttttggaaagtagagtaaaataagggaaagtgaaattgttggtaagtagttgtgagtttgtgaatttgtgagtatttttttgtgtatttgtgcgtggtggtggtggtggtggcgggggtgggggaggggaggggggagtgttatttttttgcgtgtgtttttgaggatatgggtggtggataagtaggagggaatgtttattattttatttagtatttaggagttatgttaatagagatacggttatgtaattttatttttatatagttagggaaattatttaaaaaattagaggttatgatgggtaggtaggggaaagagtaaaatgaggtagttataagggttagtttgggagttaagtttttagtgtagtttttgtttggttggttttttatattattttagtatttaggaattgggtgagagagaatgttttttttcgtttgtttttttatcgcgtttttagatttttttagtgatggaagggaagtagtttgtgtttagttatgtgtatgtagtttataagtaagggtttttttttttagtttatcgggttggggtaaaaattgggcgattggaagaagtcgaggtttcgtcggaggtttggatggattggggatttataatagcgttttatatttttattaattagtgtgtttagtaggttaatggggaaggtatagacgatagagttggggtttacgttaggattattatttttgttagttataaagattttaaatagtattttttggttttcggcgatgtttagtttagtggtaagttgggtatttattggagcggagtgggttattcgtagtatagggtagggttgttcgttttttggggtttttcggcgtttgcgttttggagtaaatttgtagtcgaggattagttttcgatagttatttaattttggtttagtggcgttaagtcgtgttaggcgtgtgtgtagggtattaggattatttgttacgttggtcggttgtatagttaggaagtatacgaaggttttcgtgtggaagttgtgtacgtatttaatattgtaggagataagatgtttgggtagtattgataacgttataaagttcggtgcgaatttcgaggcgttagttttgagacgtttgatagatattgagcgtgggttgaagttggtagttacggttgcgtttagtgaggatgttacgtagaaataggaggtttggttttgtttaattatagttatacgggtgtttaatgggttggttatatagtcggggtagttatcgggtcggttatggtgggttgagaagaggtaggttggcgttgttagatgtacggttgttttttggggttttaggttatgtaggaagtagcggttttgtaggttggagttataattgattagcgtaggtagcgcgggatttagtattagtatttttgtgtttgtgttatcgggagggtcgtggggttttgggttataggttgtatacgtttggtagttagggtttttagtagggttcgtggttaggttttggatagattttaggttaggtttaagtatatgtaggcgattgcgtatggttataaatatagtatttttatttttgtcgttttcgtaggttattatggtttgtattaggttttcggcggagaagttgggtattacgtattttacgttaaagtcgcgagaggtcgcgtagggggtgcgcgggtattgttagttttcgttcgtcgcgggtttggtaggtaatagtagtagtaataggaaggattgaggtagcggcgggaggagttttatcgaggcgagttgggattttagaggatttttatcggtttgggtttggatttgggcgtgggtttggttgggggttcgattcgaggtttggattgggttaaatttaagtagcggtttcgatagttttaagatagcggattttcgttttaggtttttgtgaaatttaaattttttttcggttttcgggtttgagtatttgacgtttgcggacgtacgatagtaacgttttagtcgttttatttgtcgttttagtcgtcgttgtatattggcgtttagcgtttagtcgattcgagggcgtcgggttgggcgggcggagtcgggttgtgggggcggggtcgcgaggaaggtttggtttagtttaggtttttcgtttattcgattttttcggtttttggaggtttggtttttgtatttttatttggcgttttggcgttttttttttagcggtttgtgggtggatgtgtatggtgtggtttggagagaggtgagttagtttgagtcgttttattttatttttttattatcgattggttcgtagcgagaaggggggtaggatattgggttttttgtttgcggtggaattagtttgtatttagtagtaataattttagtggttggtgtttagaggtggtttgggggtttattatgtggagaatagagattaggattgtgtggaagattagaggggagatgtggggtatttataagagatgttatggggcgttattttttgtgggaaaggattgtttttttttttttttgagaaggagttttgttttgtggtttaagttggattgtagtggcgcgatttcggtttattgtaaatttcgttttttaggtttaagcgattttttagttttaatttttttttgttttaattttttgaatagttgggattataggcgcgtattattatattcggttaattttgtatttttagtagagataggatttatagtgttggttaggttggttttaaatttttgattttaggtgattcgttcgttttagttttttaaattgttgggattataggcgtaagttatcgcgttcggtcgggattatttttttatgtgttttttttgagttattagcgataagatggtgttagaggaaggtgtgttatgttttgtttttttagggttataagggttttaggatgggatttggttttgttgattggattttagagttagagaggtacgtaagtggaggtttatattttttttgtagttttagtatatggaagttgtataatggggtttatagtatgggttttggggattttttttttttttttggttttatttagtgtttttttgatatggaggaattatgggttttggtttttaggatatttttaatatgttttgtaggttttgttggattttattttttttaatgagaatgtagttttgggttgggtatcgtggtttatgtttgtaattttagtatttttttgaggggttaaggtaggaggattgtttgaggttaggagtttaagattagtttgggtaatataataaaatttaataaaataaaaaaattgttaaaaatgtttttaaaataaaatatgtgatcgggcgtggtggtttacgtttgtaattttagtattttgggaggtcgaggcgggtggatcgtttgaggttaggagtttaagattaatatggtgaatagatagatttggttaatatggtgaaattatttttattaaaaataaaaattagtcgggcgtggtggtgggtgtttgtaattttagttattagggaggttgaggtaggagaatagtttgaatttagggggtgggaggttgtagtgagttgagattgtgttattgtattttagtttgggtgatagagcgagattttatttttaaaaaaagaaaaagaaaacgtagtttcgattaggtgattttttagagtttttttttttgtttatgaggagtgggggtgggggagtttagttttatatttggattttagtagttgttttttggtaattggttttttaatattagattgaggtttttgggggataattttagtttgatagattttttagttagataggtttggattttagaagatagggaaggtttatagggtgggtttgggttgtgaattatgggttttaaggttgtagataaggaggttgggggagagaggagtttttagtttaataggatttagtttggtttggggagttatatttttttattttttttttagtttatatttttgtgtttgtattttttttttaatttgatttttgtaagtgttgtttttttttttaggagtatttttttttttttttttttttgttatttaaatggtattttttttaggaagtttttttgatttagattttgttagtttttttttttgggttttatagatttagtgttatatttattttagtatagtttattttggatattttattttttttatttttagtgtaggattttttttttttttagtttggagttttatgagtatttgaagattgaaagaggaaatggaagtgggggcggttatatttagtgtagggttgatattgtgttttgaggtgatataaaagatatttttttttaaagtagaattggttaggaaatgaataaatattcggagaaaatcgtggcgtggtttttgtattttatagttaatatatttaaagataggtaaggtaaaattaaaatgaaatatttttagtttggcgtatagataggggttttggtgatttaaattttatttttagatttttagagggatttttggtggttgggagaagattttataagtttttttagattattttatttatttttttttgggggtggtgttgcggtaattattcgttagtttttcgttgttatcgtgtggtcgcgttaatggttgtttttaggttgaggttttttgtaaggtagttttggtttttaatagtaggggtatataggagtattttttttttttttcgttatttgtcgtttttataggagggggtagttaaggtgtgtgggggaggttagttaatgggatttttaagtgttaagtataagggtatttttaagttaatatagttggttaagaatttgttcgattgttttagtatttgacgttttgaaggaatattagttatttttttttttttgagtttttagttttttttgaatattgttttagagaattaggtttaatttttttttttaattttaagattattttagtagtagtaagggagtttttttaattgtaatatgattatattatattgtaggttatttggagtttgagaattttagtttttgtgtggattattttagttttattgtaaataagttatattaggttttttttttttttttttttttgagacggagttttattgtgtcgtttaggttagagtgtagtggcgtagtttcggtttattataatttttgttttttgggtttaagcgatttttttgttttagttttttgagtagttgggattataggcgtacgttattatatttagttaattttcgtatttttagtagagatagggttttattatgttggttaggttggtttggaatttttgatttttagtgatatataatttttggttttttaaagtgttgggattataggtatgagttattatgttcggtttgtattaggtttttattaggtttttttttttgtatatgttggtttttttattacgaatattttttttatttgtttgtttttttatttttgatttttaagtaggtatattttatatttttaggtgtttatagttttaggtatatatatttatttaattatgatttttttagaatatatgttgaattatatagaagttgagaaatttataagagttagggtaattaaaagaggtatttaggggtttattgttgattagaatgttagtaataattagggatagttggtttggtattatttaggttttagaggtagtggtttggtgtttttattaggagtaggggaggaataaaagtagaaaataggtataaaagagatttagggtatgtgtgtagggtgaatagtatttattaagtttatggttgtttttcggaggttttggaatttgggttggtagtttgttgttatgtttattttaatgtgagttatagtggggttaagggtaggggttgtgttgttattttttgggataataaatataattgttttagtgtattttgggtttatgttatttatataggtttattttttaatatggtttgattttagtagtagaaaatattggtttaatttttagaaattgtatgagggtgattttttttgatagtttgaagattatatttagaggatagttttttttaataagtattttttaggttttgtgttttttggggttagaattagaagatttttcggtagtaaagtggaagttttttgtattgtgttttgggttttgtggtagagtaaatggggttgggtttttattgtcgagttttttggatgtttatggtgttttatgtaggtttgtttatgttatgttagggattagggtgattaaggagggtcgagtgtacgtagtagtattagtttttattatggtaggtttatttttgttttagagggttaattgggtttttttttagatttttagtttatttttgaggattatttggaggaatgtattggttgaggtaggagaattgaggtatatagttttttatgggaaggtttgagtagggatagtttttttagaggtttgtagttaaagggagattggattttgaattttagttgaagattgggttgttttattaggggttttatttagtattagggtttagattttttttattttgattatttgtattttatttaatttagtttttgttgaattatagtaatttattaaatagagttatagcgagggttttgaaggtggttgagtagttttttgtggtatgtagtagggggttttttttaggagtgataagagaggtagatagtagaagtttagattgaatatgggggtgggggtagggtag

SEQ ID NO: 179 - DNA, 7069 bp, Artificial Sequence
  chemically treated genomic DNA (Homo sapiens)
cgggttttgttttgttatttaggttggagtgcgatggtgcgattatggtttattgtagtttcgaaattttgggtttaattgatttttacgttttagttttttttgagtagtttggtttataggtatgtgttattatgtttagttaattaaaaatattttttttttttttttggagtggtagtattgttattagaaaggggttttgatttagattttaagagagggttttttggtttcgtgtaagaaataatttgaggtaggaaaaaaaaaatttaaggtgaatttataaagtggaagtaagtttattaagaaagtaaaggattaggtcgggtgttatgttttatgtttgtaattttagtattttgggaggttgaggtgggtggattacgaggttaggatatcgagattattttggttaatatggtgaaattttatttttattaaaaatataaaaattagttgggcgtggtggcgggtgtttgtaatgttagttattcgggaggttgaggtagagaattgtttgaatttggaaggtagaggttgtagtgagtcgagatttcgttattgtattttagtttggtaataaagggagatttcgtttgaaaaaaaaaaaaaaaaaaaaagtaaaggaataaaagaatgtttattttataggtagaggggttattttttgattatatgttaaataagggtggattgtttgtgagttttttgggaaagggatgggtaatttttttttttttttagttgagtgttttttttttttgtagattatatagggtaatttttggttgtttttatggtatttgtaaattgttatggtgttgatgggagtgttttttagtatgtgaatttattatagttagtatataatgagtagtgagggtgattagaggttatttttgttgttattttggttttggtgggatttgatcggtttttttattattgtttgattattaaggtttttgtaatttgtgttttatgttgatttttttttttttttttgaggcggaggtttgttttgttgtttaggttggagtgtagtggtgcgattttagttcgttgtaatttttattttttgggtttaaataattttgttttagttttttaagtatttgggattataggcgcgcgttattacgtcgggttaatttttgtatttttagtagagatagagttttattacgttggttaggttggtttcgaatttttgattttaggtaatttatttattttagttttttaaagtgttgggattataggtatgagttatcgtgtttagtttttgtgtcgattttttattttattttgtgattaagaatggttagttttttgggaatgtagtttagtaggtttaagtttttttttatttagtttttatttaagatggagttgttttggttcgaaagtttttgatagtattttattatattgtgtaggttggttttgagtttttggttttaagagatttttttgttttagttttttaaagtggtgggattataggtgagagttattatatttggtttttttttttatttttaatttttggtaattattaaattagtttattttttatgtttatatttttgttattaatattttataaatgttaaatgtaataatataatagataattttttatgtttggtttttttttagttagtataatttttttgaaatttatttaagggaattatgtatattgtatgtattaatagtttgttatttttttttattgttgagtagtattttatagtatggatgtagtatagtttgtttaattatttatatgatgaaagatatttgggttgtttttagtttttggttattataaataaagttgtaatgaatatttgcgtataggtttttgtgtgaatagagtataagtttttatttttgttggataaacgtttaatagtgtaatggttgggttatatggtaagtatatgtttagttttttaagaaattatcggtcgggcgcggtggtttacgtttgtaattttagtattttgggaggtcgagacgggcggattacgaggttaggagatcgagattattttggttaatacggtgaaatttcgtttttattaaaaatataaaaattagtcgggtatggtagcgcgtttttgtagttttagttatacgggaggttgaggtaggagaatggcgtgaattcgggaggcggagtttgtagtgagtcgagatcgcgttattgtattttagtttgggcgatagagcgaaatttcgttttaaaaaaaaaaaaaaaaaaaaaaaaagaaattattaaatttttttagagtggttgtataattttatatttttattagtaatgtggatttagtttttatatttttttaatagcgtttggtgtattattatttttattttagtattttgataggtatgtagtaatattcgattttggttttagtttgaatttttttggtggttaatgatgttgaatatttttttatgtgtttttttgtttttgtatattttgtttaatgaaatgtttatttatgttttttgtttattttttaattggatttttttaatttgttgagcgtttagagttttttaaatatttaaatttttaaatgaagagaaggtttttatttgatatgtggtttggaaatatttttttttattttagtttgttttttcgttttttttaaaaggttttttataggataaaggttttaaattttttttttgtagggtatagtggtttacgtttataattttagtattttgtgaggttaaggtgggcggattatttgaggttaggagtttgagattagtttggttaatatggtgaaatttcgtttttattaaaaatataaaaattagtcgggcgtggtggtgtacgtttgtagttttagttattcgggaggttgaggtaggagaattatttgaacgtgggaggtagaggttgtagtgagttgagattcgttaaggtattttagtttgggtgatagagtaagattgtattttaataaataaataaataaataaataaataaaggtcgagtacggtggtttatgtttgtaatttttgtattttggtaggtcgaggtagatggaatatttgaggttaggagttcgatattagtttggttagtatagtgaaaattcgtttttattaaaaatataaaaattagggttaggcgcggtggtttatgtttgtaattttagtattttgggaggttgaggcgggcggattacgaggttaagagtttgagattaatttggttaatatggtgaaatttcgttttttttaaaaatataaaaagtagtcgggtgtggtggtgggtatttgtaattttagttgttcgggaggttggggtaggagattcgtttgaattcgggaggcggaggttgtagtgagtcgagatcgtattattgtattttattttgggcgatttggtaaggtttcgttttaaaaaaaaaaaaaaaaaaagaaaaagaaaatatcgggcgtggtggtagacgtttgtagttttagttacgcgggaagttgagttacgagaatcgtttgaattcggatggcggagtttgtaatgaatcgatatcgtgtaattgcgtttcggtttgggcgttaaagcgatattcggttttaaaaagaaaaaaaagaaaataggagaataatgaaattttatttatttattttatttattttttatttttttgagatcgagtttcgttttgttatttaggttggagtgttttggcgtaatttcggtttattgtaatttttgtttttcgggtttaagcgatttttttgttttagtttttcgagtagttgggattataggcgtttgtaattacgttcggtttatttttgtatgtttagtagagacggggttttattatgttgttcgggttggtttcgaatttttgagtttaagtgattttttcgtcgttgttttttagcgtgttgggattataggcgtgagttatcgcgttcggttaaaagttttaaattttagtaagttttaatttattaattttttttttgtatagattggttttttggtgtcgtttaaaaattatttgtttggttttaggttttgaggattttttttaattttttttttttttataagtgatttattgttttatatttaaatttatgatttattttgagtaaattttgtataaggtgagaggtttaggttgaggttttttgggtttatattcgtttaattgttttagtattatttgttgaaacggtttttgattttatttttgtatttttttttcgtttatttttttttagagtagtgggaatgtttttttgttagtgatgatgttatgttttgtgtaaaatttgtattagtattttataatataagatttggttttattttaacggtattttttattattcgatgtttatcgtaatatttggttttcgaagaattattgggttggtttttttattttatgtaggtttattttattattatttatttagagatttttttggttttttttttatagtatttataaaatgcgatttattatatattaatttgtttatttgttttttgtttttttatatttttattttttttagaagttttaagagagtatattgttttatttttagggtttagaataatgcgtttacgtagtaggtatttaaaattttttgtttgataggttagaaaaggtgaataaatataaagcgggagcgaaaagtttatttttaggttaggtattttttggattttacgtaacgtgtgagcgttatttttcgggaagttaatttgttcgcgaacgaaggaagtgagttagagaattcgggggtggagagaagaaagtaagtagttaatcggaaaggtttgaaaaagttagcgtcggaagttaaattgtagaaagttgttttttagaatgattgtttatttttaagaggaagcgtgggcgagcggtgttttgtaaaatgggtttttcggtagcggatttgcgtagaagcgtttcgtgcgtgtaagtgttgcgaattacgtgggtttcgggcgcgtttcgggtgttggcggttgtagtcggagtttaaatttaagtagttggaagggtaagaggtgttcgggattttgagaggaaaaagaaaggagtgtagtcgcgggagtgggttaggtgaggagttagtgaagagatgagtttagttttaagaggcggcgaggaggatcggatgggaggaggggtagggagcgtttgtggataagtgtagatcggtcggcgtacgttttacgttacgtggattcgtttttgtcggtggtcgtttttttcgttaggtcgcgacgatagggttgtgttttatttgtgtttgtcgagagtagtgtcgggtacggagttggcgttttgtaagtgtttgttgaataaatgacgggtgtgtgtgttatttatttagtaagtattgagtgtttattgttgtgttatcgggatcgatgtggagggatatttttagggtgtatttttggcgttttagttttgtttttttttggataatttatgtttgtttcgtattttatcgtgcgatttttcgtagtttttgggttttgtttttttttttttttttttttttggaagttgtagaatggtgataaatgattttttttgtttttattgattgttaggttttgtggttaggtattatagagtttttatataggattaagttagtttggtgtgtaggggaggtagatatataaatagaaaattggattatagtgttaagatgttgtaagaagaggttaattaaaggataggaagatggggttaagagatggtgttattgtttattttagggatcgttttttaaggcgaggggttttttattttaagttgtgatatagggtaggttatgagcgtagttttttgtaaaatgagggatttggacggaatagttattttttaggtttttttttagtatgatgtttcgtattagatatttttaatgtttgtagtttttttatattttatcgtttattggttagttaaaatattttttgtattgtaaagtgtagtataatattataagaatggattaatgggttgggaatgttgggttttggtttttattttggtgttgtggttttgtttttttatttgtaaaatgaagggggttgtaaagatatattttttaaaatttttaatgttatggttgtggtattaagttaaattattattttttattgttttgtatcggatattatttttatattagtaaaattttttattagtgtagttttttttaagtttgattattgagaaagatagtgttttgtttttaatattttgtattttagttttatcgtagtgtttggtatatagtagatgtttaaaagaagtttattaaattaaatggtggttaggtttatggggtttacgtttttaattttagtattttgggaggttgaggtgggtagattatttgaggttaggagttggagattagtttggttaatatggtgaaattttatttttagtaaaaaaaaatatagaaattagttgggtgtggtggtacgtatttgtagttttagttatttaggaggttgaggtaggagaattgtttgtttgggaagtggaggttgtagtgagttaaggtcgtattattgtattttattttgggcgaaagagtaagattttatattaaaaaaaaaaaaaaaaattaaatggggttgggtgtggtggtttatggttataattttagtattttggtaggttgaggtgggtagattatttgaggataagagttcgagattagcgtgggtaatatagcgaaattttatttttaaaaaaattttataaaaattaaaataaatgaaaataaaataaattaaatgggatagaaattatagtttttgtttttggatttttttttatattgatatattagtttatagattaggggattggggaggaattgggtttttattagagggagatttggagttgatttgatagatttaaattagttttatgggataattcgtttgagacggatgacgttgtaggtaagtgatttattgttgttttatttttttatttgtttatttttaga

SEQ ID NO: 180 - DNA, 7069 bp, Artificial Sequence
  chemically treated genomic DNA (Homo sapiens)
tttggggataggtaggtagaggaatgaaatagtagtgaattatttgtttatagcgttattcgttttaagcggattattttataaagttggtttaaatttgttaggttagttttaggtttttttttggtaaaaatttaatttttttttagttttttgatttatgaattaatatgttaatgtgggaaaggatttaaaagtaaggattataatttttattttatttgatttattttatttttatttgttttggtttttgtggggtttttttagagatggggtttcgttatgttgtttacgttggtttcgaatttttgtttttaagtgatttgtttattttagtttattaaagtgttgggattatggttatgagttattatatttagttttatttgatttttttttttttttttggtatggagttttgttttttcgtttaggatggagtgtagtggtgcgattttggtttattgtaatttttattttttaggtaagtaatttttttattttaattttttaaatagttgggattataggtgcgtgttattatatttagttaatttttgtatttttttttattagagatggggttttattatgttggttaggttggtttttaatttttgattttaagtaatttgtttattttagttttttaaagtgttgggattaaaggcgtgagttttatgagtttggttattatttgatttaataagttttttttaaatatttattgtgtattaaatattgcggtggaattaggatataggatgttaaaaataaggtattattttttttaataattaagtttgggagaaattatattgatgaaaagttttattaatgtgaaagtgatgttcggtataaagtagtaagaaataatagtttgatttaatgttatagttatagtattaggggttttagagaatatatttttataattttttttattttataaatgaggaaataggattatagtattagaatgaaggttaaaatttagtatttttaatttattaatttatttttgtaatgttatgttatattttataatgtaaagaatattttgattagttaataaacggtggggtgtgggagaattatagatattaggaatatttgatacgggatattatattgaaaggaagtttagagagtaattatttcgtttagattttttattttatagaagattgcgtttatgatttattttgtattatagtttgagataggaggtttttcgttttgaaagacgatttttaaagtagatagtagtattattttttggttttatttttttgttttttagttaatttttttttatagtattttagtattgtagtttaattttttgtttgtgtgtttgttttttttgtatattaggttgatttagttttgtgtagagattttatggtatttagttatagggtttagtagttaataggagtaaagaaaattatttattattattttgtaatttttaaaaaaaaaaaaagagagagagataaagtttaaagattgcggagaatcgtacgatggggtgcggggtaagtataaattgtttaggagaaaataggattaaagcgttagaaatatattttaaaaatgtttttttatatcggtttcggtgatataatagtaagtatttagtgtttgttgaatgaatgatatatatattcgttatttatttagtaagtatttatagagcgttaatttcgtgttcggtattgttttcgatagatataaataaggtatagttttgtcgtcgcggtttgacgagaaaggcggttatcgataaaggcgagtttacgtggcgtgggacgtgcgtcgatcggtttgtatttgtttataggcgttttttgtttttttttttattcgatttttttcgtcgttttttagagttgaatttatttttttattaattttttatttaatttattttcgcgattatatttttttttttttttttttaggatttcgaatattttttatttttttagttgtttaggtttgaatttcggttgtagtcgttagtattcgaaacgcgttcgggatttacgtggttcgtagtatttgtacgtacggaacgtttttgcgtagattcgttgtcggagagtttattttgtagaatatcgttcgtttacgtttttttttgggagtaggtagttattttagggaataattttttgtagtttaattttcggcgttagtttttttagattttttcggttagttgtttgtttttttttttttattttcgggttttttgatttatttttttcgttcgcgagtaaattggtttttcgagaggtggcgtttatacgttgcgtgaagtttaaagagtgtttgatttagaagtagatttttcgttttcgttttgtgtttatttattttttttagtttgttaagtaaaaaattttgagtatttattacgtggacgtattattttaggttttagggataaaatagtatgtttttttggagtttttgggagggatgggagtataggaaaataagaagtaaataagtaaattaatatgtaatagatcgtattttgtaagtgttgtgaagaaaaggttagagaaatttttgagtaagtgataatagaatagatttgtatgaagtgagggagttagtttagtgatttttcgagagttaagtattacggtggatatcgagtggtggaaaatgtcgttagaatagagttaaattttatgttgtgagatgttaatatagattttgtataaggtatgatattattattaataaaaaaatatttttattgttttaaggggaaatgaacgggggaaaggtataaaaatggaattaggagtcgttttaataaatgatgttggagtaattggacgaatatagatttaaagaattttaatttaaattttttattttatataaaatttatttaaaatgaattatagatttaaatgtaaaataataaattatttatggggaaaaaaaaagttaaaaaaaatttttaggatttagggttaggtaaatagtttttagacgatattaaaagattaatttatatagggaaaaagttgataaattggaatttattgaaatttaaaatttttggtcgagcgcggtggtttacgtttgtaattttagtacgttggaaagtagcggcgggaggattatttgagtttaggaattcgagattagttcgggtaatatagtgaaatttcgtttttattaaatatataaaaatgagtcgggcgtggttgtaggcgtttgtagttttagttattcgggaggttgaggtaggagaatcgtttgaattcgggaggtagaggttgtagtgagtcgagattgcgttagggtattttagtttgggtgatagagcgagattcggttttaaaaaaataaaaaataaataaaataaataagtaaaattttattatttttttgtttttttttttttttttttgagatcgagtatcgttttggcgtttaggtcggagcgtagttgtacgatgtcggtttattgtaaatttcgttattcgggtttaagcgattttcgtgatttagtttttcgcgtagttgggattataggcgtttgttattacgttcggtattttttttttttttttttttttttttttttgagacggagttttgttaggtcgtttagggtggagtgtagtggtgcgatttcggtttattgtaattttcgtttttcgggtttaagcgaattttttgttttagtttttcgagtagttgggattataggtgtttattattatattcggttattttttgtatttttaggagagacggggttttattatgttggttaggttggttttaaatttttgatttcgtgattcgttcgttttagttttttaaagtgttgagattataggtatgagttatcgcgtttggttttaatttttgtatttttagtagagacgggtttttattatgttggttaggttggtatcgaatttttgattttaagtgttttatttgtttcggtttattaaagtgtagggattataggtatgagttatcgtgttcggtttttatttatttatttgtttatttatttattgagatgtagttttgttttgttatttaggttggagtgttttggcggattttagtttattgtaatttttgttttttacgtttaagtgatttttttgttttagtttttcgagtagttgggattataggcgtgtattattacgttcggttaatttttgtatttttagtagagacggggttttattatgttggttaggttggttttaaatttttgattttaggtgattcgtttattttggttttatagagtgttgggattataggcgtgagttattgtgttttgtagaaaagaaatttaaaatttttgttttgtgaaagattttttgaagaggacgaaaaaataagttagagtggaaggaaatatttttaaattatatattagataaaggttttttttttatttgaaggtttgaatatttgaagaattttgaacgtttaataggttaaaaaaatttaattagaaaatgggtaaaagatatgaatagatattttattgaataggatatatagaggtaagaaagtatatgaaaagatgtttaatattattagttattagggaaatttaaattaaaattaaaatcggatattattatatgtttattagaatgttaaaatgaaagtagtgatatattaaacgttattaaggaggtatagaaattggatttatattattggtaggaatataaaattgtatagttattttgaaaaagtttgatagtttttttttttttttttttttttttttttgagacggagtttcgttttgtcgtttaggttggagtgtagtggcgcgatttcgatttattgtaagtttcgtttttcgggtttacgttatttttttgttttagtttttcgtgtagttgggattataggggcgcgttattatgttcggttaatttttgtatttttagtagagacggggttttatcgtgttagttaggatggtttcgattttttgatttcgtgattcgttcgtttcggttttttaaagtgttgggattataggcgtgagttatcgcgttcggtcgatagttttttaaaaaattaaatatgtgtttattatatgatttagttattgtattgttgggcgtttatttaataggaatgaaaatttatgttttgtttatataaaaatttgtgcgtaaatgtttattgtagttttatttgtaataattaaaaattggaaataatttaaatgttttttattatgtgaatggttaaataaattatgttatatttatattgtggaatgttatttaataatagaaaaaaataataaattattaatatatgtaatatatataatttttttggatagattttaagggaattatgttgattgaagaaaagttaaatataaaaagttatttattgtattattgtatttaatatttgtgaaatattaataataaaagtatagatatagaggatagattagtttagtggttgttaggaattagagatgagggaaagggttaggtatggtggtttttatttgtaattttattattttgggaggttgaggtaagaggattttttgaagttaggagtttaagattagtttatatagtataataagatattgttagaggttttcgaattagagtaattttattttaaataggggttgggtaaaaagaggtttagatttattgggttgtatttttaggaggttagttatttttagttataggatgagatagaagatcgatataagggttgggtacggtggtttatgtttgtaattttagtattttgggaggttgaggtgggtggattatttgagattaggagttcgagattagtttggttaacgtggtgaaattttgtttttattaaaaatataaaaattagttcggcgtggtggcgcgcgtttgtagttttaggtatttgggaggttgaggtagaattgtttgaatttagaaggtagaggttgtagcgagttgagatcgtattattgtattttagtttgagtaatagaataaattttcgttttaaaaaaaaaaaaaaagattaatatgagatatagattataaagattttggtgattaaatagtggtaaagaagtcggttaaattttattaaaattaagatggtaataaaagtgatttttggttatttttattgtttattatatgttaattataatggatttatatgttaaaagatatttttattagtattatgatagtttatagatgttatggaaataattagaagttattttatatggtttataaaggggaggagtatttaattgggggagaggggaaattgtttattttttttttagaaaatttataaataatttatttttgtttagtatataattaagaaataatttttttgtttgtagagtagatatttttttatttttttatttttttttttttttttttttttagacggagtttttttttgttgttaggttggagtgtagtggcgggatttcggtttattgtaatttttattttttaggtttaagtagttttttgttttagtttttcgagtagttggtattataggtattcgttattacgtttagttaatttttgtgtttttagtagagatggggttttattatattagttaggatggtttcgatgttttgatttcgtgatttatttattttagttttttaaagtgttgggattataggtatgaggtatggtattcggtttagttttttatttttttaataaatttgtttttattttatggatttattttgaatttttttttttttgttttaaattattttttgtacgaggttaaagaatttttttttgggatttggattaggatttttttttggtaataatattgttattttaaaaagagaaagaaaatgtttttaattagttgggtatggtggtatatgtttgtaggttaagttgtttagaggaggttgaagcgtgaggattagttgagtttaggatttcgaggttgtagtgagttatgatcgtattatcgtattttagtttgggtgatagaataagattcg

SEQ ID NO: 181 - DNA, 6577 bp, Artificial Sequence
  chemically treated genomic DNA (Homo sapiens)
tacgggatatgtatatatataaatagagagtaagagttacgtttttgtgttttttttacgttttatttttattatttgtgttatatttgtatgtatttatattgttatttgtttaaatattttattttaaattggttttttttaaattttaaatatatttttaaaataaaatttttattattttttgtgaggcggggtatatagtaggaatttcgttttttttttttatggttttgtatagagttggtattagatattgatatggaggggagaatatttaattttaggtaatttttagtttttattttgattttagttttttatttttttattgttatttttttttgtttttgggtgtatttatttgtagtaaaatgggtaagtatatagtgggcgtataagtggggtttagttaaggttttagatttgggttagtttttagttttgttatttataaattgagtgatattgagttggtcgtttaaattttttgtgtttcggtttttttattggtgaattggggatagtattataatagtatttgttatataacgttgttggaggattaattgagataataaatggaaagtttagggtttggttgtatttatggagtaagtattagagtaagtgtaagttgggattttagggttgtagttttgttattatttgattgtgtggttttggataagttatttggttttgtttagttttaatttttttatttataaaatggggttagtgattatttttattttataggattgttgtgtggattaaatgtttggtatgtttaagtgttttgtttagtaaacgttagttttgattaattgtttttgtagaaaagtttttaaagttgttaattttcgagggttaattggatttgaattatttttatagtttggtatagaaatagattaaattaatttagtggaaaattaattttaggataatgagtttaagatattttcgtgttgattgttgttagtatggtgtttaggatagtttgggaaggtagggaggagggtatttttttatagtagtttcggaatttttatcgttatttttcggggggtttatttgtttttcgtttgttttttaaggtgttttttgatttttttttagaagaatttatttgttgtatttattattagaagaggttaggaatgcggtttgttgggtgggtagggttaagaagaaggtagtcgtgtaggtttaggaagtcgtaggagatttgttaatttttaggagggggttagttttggattttgtagataggcgttttggggagggtattagaagtttattgtttgtttcggtttgaaggttgtttgttgtgtgattttggtgagttttttaatttttgtgtattattataattattattattatttttattttttttttttttttatttgtcggttaagagaggattgggatagtggttatggttatataatattgtgaatattttaaaaattattgtattttatattttaaaatagttaattggtaattttatgttatgtgaaatttattttaattaaaaattaaaaatatatatatgaatttaatgttataaagggagagagaggatcgggaatttaaaagtaggtgtttgtggtgggacggggatttgtttgaggaaggatattttagaaggtaagttttggtatttatttgttttttgttaaaagggaaattgttattttttgatttttagtaaggataataaatttttatttggttgattttttgtttaatggtttaaagtatttttttgtatttcgtttatttatttttatttttattattttttgttacgagaaaagttaggtttagagagaagtggtttttttaagattatatggtaggttagtagtgaagttgtgtttcgaatttgggattttttaggttaaaggaaattagaatatgttacgtttagatatgtcgatatggtattttgattatttttagttgaaggtatttgagaaagagtagttagagagagggttatttgaattgttttgttttgtttgtagtaagttataaatattttttggagaaagatgtttttttagtattaagatgagaagataatttttattagtttagagatggtattagagttatttataaatataaataaattttgttattttattttttagtttatttttatatgtttatttttttatagtttgttatttttggaagtttataattgtattcgttttgttattttttttttttttttttttttttttttttttttttttttttttttttttttttttttttttttttttttttttttttttttttttttttttttttttttttttttttttttttttttttttttttttgagataggttagggtgtagtggcgcgattatagttttttgtagtttttaatttttagatttaattgatttttttatttgatttttttgagtagttaggattatagtagttgggtatgttattatatttagttaatttatttttaatttttttgtagagattggattttattatgttgtttaggttggtttcgaatttttggttttaagtaatttgtttattttagttttttaaattgttgggattttaggtatgaattatcgtgtttagttattttgttattttttaaaatgtattgttttttatggtagatgttttataagttagagttttaagtcgtagtattgagttatttttattgaggttttttttgcgtggtgtgtattatagatattaataaatttgtttttttttttttattattaatttgttttttgttatagtgttttttttaataaataatttaagatgattgaggagaaattatattttttttttagttggttaattttaaatgtgtttttaagtttggtgtttggatttaaattttgttataggttaagaatgttatattaagtagacgttgtgttagaggggtatttgaggtgatatgtttgatagattatataattgaataattgtattttttgaaggaaaattaacgaagtgttttgaggttaagtagatgggatttttgaggattttatgaatagtaaatagtagtattttttttagaggtttttgggtgggggtattaaatgtgttaatatatgtgtttgttgtaggtatagttagaatatgtgaaagtagttatagggaatagagtgtagtaaatttttaattattttttaaaattttgttttggtgtttttttttttgtaaattttttttgaataaggtagaattagttatattagtattatattatttttttattattatagatattattttgtattataattatttatttatttttttaggttttgtattttttaaggttaggattttgattttttttttgagtgttgtttatttgaattgaatcggtatgaattattacgttcggttattttgttattttttaaaatgtattgtttttcgtggtagatgttttataagttagagttttaagtcgtagtattgagtcgtagtattgagttgaagtttgaagggaagatggttttgatatgttaaaatttattttagtttatttttattttttatttatttatttatatatttatttaataaagatttttgagttttgatatttatgttttttttgtggtttttagtttatttttgataaagttaatatattatgttgaatttaatttgggaaagataagaaggaaatgagtggatagtggtagtaaagtgttgggacggtgagattaagggtgattttttttttttttgttttttaatttttttttaatgtagttgttattttatttttatgatggaaaaatgtatatgtatgggaatattgtattttaggtattataaggaatgaaattataggtcgggtatggtggttaatttttgtaattttagtattttgagaggttgaagtgggtagattatttgagttttagagttcgagattagtatggataatatggtgaaatttagtttttattaaaaatataaaaatattagttgggtgtggtggtgtatgtttgtagttttagttatttaggaggttgaggtgggaggatcgtttgagtttgggaggtagaagttgtaatgagtagagatcgtgttatttcgttttagttttggtgatagaatgagattttattttaaaaataaataaataaataaaataaatgaaatgaaattataagaaattattatttttttatgtaagaagtgattatttttattataagggaaggaatttaattttatttgttattttattaaagtttatttagtgttaaaggatgaggtgttagtaagattaatattttagaggtttttttgtgttaatagttttttttttttttttttttaaaaattttaagtgattagtttagaggtttgtttggaataatggtattatttaatattattggttttttggaatttgggtattttttagtgtgttttatattgttaatatttttttagttttttggatttttgttataagttggaaaagtgagaggatggatagggattaattagagagttttttgttgaggaaaaaattttttagatgttgaaagtgaggttatgtggtttggttaaataaaatttggtttcgtggtgtttttattttagtagttattttgttgatgaattgttattttggatttgggattagaaagaggtgggttgggtgaagaggtattatatagagtgatgtaatagtaagattaggttatttataggttttggtagttatagttataaattagttaattgtatataagttggggatattttttttggaaattaaaaaaaaaaaaaaaaaaaagagatttttatgtaaaaataattttttggatggtatggggtgagtataaatattttttggttgttagtgtgtttataattttgtagcgagtcgaaaattgaggtttcggtcgtagagaatttagttttatttttgttttaaaatttttcggttatttttgatgaggggattgggtagttttagatagtttcgaagtttttaaggtataggtttttttttggtttgattgtttttatttcggggaggtagtgtagttagttgtaaggtgagttgtttttatttttggggaagcggttgttttgagagggttttgtttttttttttttgagaaggtttagaaaattgtgggaattttttgtttatagagagaaggtgttggaaagtttaggtaaaaaaatgtcgatatgaggtttggttatttgaatatggtattttggttagattttttttttgtaaatattagttgtggttgttatatgataaggaaaaattttttgaaaagtttaaaatgggagtttgtatttgttaagaattttttttaatagagattattttattagtttttataatatgtaatttttttataaattttggtaagatggatatattaaatttattttatggatgaataaatgagttttagttaaataatttgatttaggatatataattggtagagttaggattttaggatttgaatttaggtttatggggttataagtttttttttttttttttttttttttttttttttttttttgttttttttttttttttttttttttttttttttttttttttttttttttttttggaaatagttttgattgtttagttttaagtaatttttttgttttagtttttcgagtagttgggattataggtataagatattatgtttgtttggttaattttttaattttttgtagttaaggtttttttatgttgtttaggttgaattcgaatttttggatttaagcgatttttttgtttcggtttttcgaaatgttgggattataggcgtgagttattgtatttggtttaaaatttttatatggattatatttattatattgttttttaaagatagagtttttgtttttttgattttttttttgtttgttttaaaggagatgattttagatttcgagggatgagtgtattttttataaatattttttttttatataataaaagaggagtaagtaataatgttgagttagaataataattgtaaaatttttaaaagaaaggtagttatagtttgagtgttttttttagtaatagatttaaaattatagttgataatgagagttgttgggaagtgttttttagggttaggtaaaggtatttttgttttaacgattttcgggtttttttttattttgtttgtggttagtgatgaagtttggttgggtttggtgggttagtaggtttcgttaaggaggtttatggtgtatatagtttgtttttgttaagtggcgatggggatggggggtttattgtttttttttaagattattaggtggttttatagaattgaagtttgtgttcgaaggttttttattttaatttcgaaatagagatagaggttgtaaagtattgatgaaggggtttatgttggcgtttatatcgattttttagtgagttaattttattgagaagttttgttttgtaaatttttttttaatttttttttatttttgttttttttttttagt

SEQ ID NO: 182 - DNA, 6577 bp, Artificial Sequence
  chemically treated genomic DNA (Homo sapiens)
gttgaagaagggaagtagaggtgagggaaggttgaagaagagtttatagaatagggttttttagtggggttggtttattggggaatcgatatgaacgttagtatgagtttttttattaatgttttgtaatttttgtttttatttcggggttggaatggggagttttcggatatagattttaattttgtaaagttatttaataattttaaggaaaaataatgaattttttatttttatcgttatttaataaggataaattgtatgtattatgagtttttttagcgggatttgttggtttattagatttagttaggttttattattggttataggtagggtgaggaagagttcggaggtcgttgaaataggggtgtttttgtttgattttgaaagatattttttagtagtttttattattaattgtagttttaggtttattattggggaaagtatttaagttgtagttattttttttttaaagattttgtagttgttgttttaatttagtattattatttgttttttttttattatgtggggaggaaatatttgtgaaaaatgtatttatttttcgaaatttgagattattttttttgaaatagataagaggaagattaaagaggtaaaaattttgtttttagaagatagtgtagtgaatatagtttatgtaagaattttaggttaagtgtagtggtttacgtttgtaattttagtatttcgggagatcgaggtaggaggatcgtttgagtttaagagttcgagtttagtttgggtaatatagggagattttgattataaaaaattgaaaaattagttaggtaggtatggtgttttgtgtttgtagttttagttattcgggaggttgaggtagaaggattgtttgaggttgggtagttaaggttgtttttaaaaaaaaaaaagaaagaaagggaagggaagggaggggaagggaggaaaggataggaaggaaaggaaggaaagagggaaagaaagaaaagaatttatagttttatagatttgggtttaaattttggaattttagttttattagttatgtgttttggattaagttatttaattgaaatttatttatttatttataaaatgggtttaatatatttattttattaggatttgtggggaggttatatgttataaggattgataagataatttttgttaaaaaaaatttttagtagatataaatttttattttgaattttttagaaagtttttttttgttatgtaataattatagttaatatttgtagaaaagaaatttgattaagatgttatgtttaaatgattaaattttatgtcggtatttttttatttagattttttaatattttttttttgtaggtagaaaatttttataattttttgagtttttttaaagaggaagaaataaaatttttttaaaatagtcgtttttttagaaatgaaggtaatttattttgtagttggttgtattgttttttcggggtaaggatagttaaattaggaagagatttgtgttttgagaatttcgggattgtttagaattgtttagtttttttattaaaggtggtcgagagattttaaagtaggaatgaggttgagttttttgcggtcggagttttagttttcgattcgttataaagttatgaatatattggtagttaagaagtatttatatttattttatgttatttagagagttgtttttgtataaaggttttttttttttttttttttttttggtttttaaagggagtgtttttagtttgtgtatagttagttaatttatgattgtgattgttagggtttgtgggtgatttgattttgttgttatattattttgtgtggtgtttttttatttaatttatttttttttggttttaagtttaaggtggtagtttattagtagggtggttgttaagatagaggtattacggagttaggttttatttggttaagttatatggttttatttttagtatttgggagattttttttttagtagggagttttttggttaatttttgtttatttttttatttttttagtttgtgataggagtttaggaagttgggggaatattgatagtatggaatatattggaaaatgtttaggttttagaaggttagtgatattagatgatgttattattttagataggtttttgaattagttatttgaggtttttggaagggaaaggaaggaaggttattggtatagagaggtttttgagatgttggttttattaatattttattttttagtattaggtaagttttggtggaatggtaggtaggattaaatttttttttttataatggaaatgattattttttatatgaaaaagtggtaattttttataattttattttatttattttatttatttatttatttttgagatggagttttattttgttattaagattggagcggagtggtacgatttttgtttattgtaatttttgttttttaggtttaagcgatttttttattttagttttttgagtagttgggattataggtatgtattattatatttagttaatatttttgtgtttttggtagagattgggttttattatgttgtttatgttggtttcgaattttgaagtttaagtgatttgtttattttagttttttaaagtgttaggattataagggttagttattatgttcggtttataattttattttttataatgtttgaaatatagtatttttatatatatgtatttttttattataaaagtaaaataataattatattagggagaagttgagaagtaaagggaaaaaaagttatttttgattttatcgttttaatattttgttattattgtttatttattttttttttgttttttttaagttaaatttagtataatatattaattttgttaaagataaattaagagttataaaaaagatatggatattagagtttaaggatttttgttgagtgaatgtgtggatgaatgaatgaaaaataggagtaaattggaatgagttttaatatattaaagttattttttttttaggttttagtttaatgttgcggtttaatgttgcggtttagagttttggtttatggagtatttgttacgaagagtaatgtattttagaaagtgataagatggtcgggcgtggtggtttatgtcggtttagtttaggtaaatagtatttagggaaagagttagaattttggttttagggagtgtaaggtttagaaaaataaatggataattatagtatagagtgatatttgtagtgatggagggatggtatggtgttgatgtagttggttttgttttgtttaaggaaagtttataagggagaggatattagggtagggttttgagggatgattaggagtttgttatattttattttttgtagttgtttttatatattttggttatatttgtagtaaatatatgtattaatatatttaatgtttttatttaagagtttttgagggggatattattatttgttatttatggaatttttaagaattttatttatttggttttaaagtatttcgttgatttttttttagaaaatgtagttatttagttatgtgatttgttaaatatgttattttaggtgtttttttaatatagcgtttgtttggtgtggtatttttgatttgtggtagggtttgagtttaagtattaggtttgaggatatatttggaattagttagttgggaaggaaatataatttttttttaattattttaagttatttgttgggaaagatattgtaataaaagatagattaataatagagaaaaaaaagtaagtttgttaatgtttgtgatgtatattacgtaggagaagttttagtgaaagtaatttaatgttgcggtttagaattttggtttatggagtatttgttatgaagagtaatgtattttagaaagtgataagatggttgggtacggtggtttatgtttggaattttagtaatttgggaggttgaggtgggtagattgtttgaggttaggagttcgagattagtttgggtaatatagtgagatttaatttttatagaaaaattgaaaataaattagttgggtatggtggtatgtttagttattgtagttttagttatttaggaggattaggtgggaggattaattgagtttgggagttagaggttgtagagagttatggtcgcgttattgtattttagtttgttttagaaaaaaaaggaaaaaaaagagggaaaggaggaaaggaaaggaaaggaaaggaaaggaaaggaaaggaaaggaaaggaaaggaaaagaaaggaaaggaaagagagaaagaaagaaagaagagaaaggtgataagacgaatgtagttgtaggtttttaggggtggtaagttgtgagaaggtaaatatgtggaagtgagttaaggagtaggatagtaaggtttgtttgtatttgtagatggttttggtgttatttttgagttgataaaagttatttttttattttgatgttgggaaagtatttttttttaaggaatgtttatggtttgttgtaggtaggatagggtagtttagatagttttttttttagttgtttttttttaaatgtttttagttggagataattaggatgttatatcggtatatttgggcgtggtatgttttggttttttttagtttgaaaggttttaggttcgaggtatagttttattgttgatttattatgtgattttggaaaagttatttttttttgggtttgatttttttcgtgataaaaggtgataaaaataaaagtaaataaacgagatataagaaaatgttttgagttattgagtaaaaagttagttaagtaagaatttattatttttgttgggagttagagagtaataattttttttttgataaagagtaagtggatgttaggatttgttttttgaagtatttttttttagataggttttcgttttattataaatatttgtttttaaattttcggttttttttttttttttgtaatattaaatttatgtatgtatttttaatttttaattggaataaattttatataatataaaattattaattaattattttaaagtgtaaaatgtaatggtttttagaatatttataatgttgtataattatgattattattttaatttttttttaatcggtaaataggaagaggaggagagtaaaaatagtgataatgattgtgatgatatatagaggttaggagatttattaaggttatatagtaaatagtttttaagtcgggataaatagtgagtttttggtattttttttagagcgtttgtttgtagggtttagggttggtttttttttggaggttggtaagttttttacggttttttgggtttgtacggttgttttttttttggttttgtttatttagtaggtcgtatttttggttttttttgatgatggatgtagtaggtgaatttttttggggagaaattaaagagtattttgaagggtaggcgggggataggtgggtttttcggagggtggcgatagaggtttcgaggttgttgtggagaaatgtttttttttttgtttttttaggttgttttaggtattatgttgatagtaattagtacgggaatgttttgggtttattattttggaattgattttttattggattgatttgatttgtttttatgttaggttgtgaagatggtttagatttagttagttttcggaagttagtaattttgaaggtttttttataaaaataattgattagagttaacgtttattgagtaaggtatttaaatatattaagtatttaatttatataatagttttatggggtgggaatgattattagttttattttatagatggggaaattgaggttaagtaaagttaaatgatttgtttaagattatatagttaggtggtggtagggttataattttggagttttagtttgtatttgttttggtgtttgttttataaatatagttaggttttgggttttttatttattattttagttaattttttaataacgttgtgtggtaggtattattataatattatttttaatttattaataaggaaatcgagatatagaaagtttgagcgattagtttaatgttatttagtttgtaagtggtaaagttgaggattgatttaggtttgagattttgattggattttatttgtgcgtttattgtgtgtttatttattttgttataggtgagtatatttaggggtaaggagaggtgataatgagagagtgggaaattgagattaaggtaggagttgaggattatttggggttgaatgtttttttttttatgttagtgtttggtgttagttttgtgtaaggttatggaaggaggagacggagtttttattgtgtgtttcgttttatagaaagtgataaaaattttattttagaaatatatttaaggtttaaagagagttagtttaaggtaaaatgtttaagtaaataatagtataggtgtatgtagatgtgatataaatgataaaggtgggacgtgaaggaaatataggggcgtggtttttattttttatttgtgtgtgtgtatgtttcgtg

SEQ ID NO: 183 - DNA, 6880 bp, Artificial Sequence
  chemically treated genomic DNA (Homo sapiens)
tttttgggtttttttgggtttgtttttgggtttttaattttgttttattggtttatgtgtttgtttttatgtaagtattatgttgttttgattattgtatattgtagttttatagtataatttgaagttaggtaatgtgatttttttagtttgttgttgttgttgttgtttgtttgtttgtttgtttttgagatagagttttattttgttgtttaggttggagtatagtagtgttattttggtttattgtaatttttattttttgggtttaagcgatttttttgttttagttttttaagtagtttggattataagcgtttgtttttatatttcgttaatttttgtatttttagtagagatgggatttggttatgttggttaggttggtttggaatttttgattttaagtgatttatttatttcggttttttaaagtgttgggattataggtataagttatagttttatttatatttagtatggttttattttttattgtgaaagggtagtatcgagtttaatgtaaagttttatagttattgttttttttttttttaaagtgtatagattttttttgttatatagttattgttggggataggggaggggtggtatttgtaatttaatgtagtttttttgattttttttaatgtttttttttaagatatgaagttaaagttaggtgttatgattgtttatttgatttttggtttttgtgatggtgttattttgtgtgtagatagttgttaaaatttggtgttttttttagaggtataaatgatgtaggtttttattttgttatttttttttgttttgtttttttgttttttgagaggtattatattaatggaaatttaatatataatttataattatgtttttgaaagttttttttttttgtttttaatatttaaattttagtagttttaggggtataagtggtttttgattatatggatgaattgtatagaaatgaaatttgggtttttattgtatttgttatttgaatagtatatattgtatttaatagatattttttttttttttttgagagggagttttatttttttatttaggttggattgtagtggtacgattttggtttattgtaatttttatattttgggttcgagcgatttttttgcgttagttttttaagtagttgggattataggtgtgtattattatgtttgtttaatttttgtatttttagtagagatggtgttttattatgttggttaggttggttttaaagttttgattttaagtgatttattcgtttcggttttttaaagtgttgagataataggcgtgagttatttattttatgtcgggttttaatagatattttttattttttattcgtttttttttttttttttttttaagtttttaaagtttattatattattttgtatgtttttgtatatttatatgttagtttttatttataagtgagaatattttgtatttggttttcgatttttgagttattttatttaggataatggtttttaattttaattaagtagttttaaaagatattattttatttttttttaagggtgagtagtattttgtgatgtatatgtattatattttttttatttatttattggttgacgggtatttaggttaattttatatttttataattgtgaattgtgttgtaataaatatttatatgtaagggtttttttggtataatgatttatttttttttgggtagatatttcgtagtgggattgttggattaaatggtaggtttatttttagttttttgagaaatttttatattgttttttatattgaaaaatttaagaaaaatttttttagatattggtttgggtaaaggatttatgattaagattttaaaattaaatgtaataaagttaaaaataaataaatgagatataattaaattaaaaagttttgtatagtagaagaaataattaatagggtaaatagataatttaaagaatgggagaagatatttgttaattatatttttaagtaaaggattaatatttagaatttataaggaatttaaataaattagaaaaaaaatataaataattttattaaaaattgggtaaataatatgaatagatattttttaaaagaaaatatataaatgattattaaatattggaaaaaatgtttaatattattaattattagggaaatgtaaattaaatttataataagatattattttattttagttagaatggtttaaaaattagaaaataatagaggtttgtttaaatggatatggtaaaaagggaatgtttattattgttggtgggaatgtaaattagtataattttttttttttttttttaggtgttttgtgttgttttgttttgtttgtatataaagttgttgaagatatgttatatgatttaatgttttgtttatttttaaaggggttttgttttattttattttttatttttttatgtagagaaatttgttttttttgttaagtttttttttttatattttatttttgtgggttagtgtttattattagtttattattttttagtttatgtaattaaagataagggattttgttgagaaagttaagggtgttttgttgaggattgaaaggggtggtgaggtattgagtaagtaaggataatattttttttagtaagttgtaaaggaggaaaaatataatatttgggagttaataaaattattattgtaatgtatattattaatatattgtgaaaattttttatggaaaaaataagtgtatatttattttttattttttgagatggagttttatttttgttgtttaggttggggtgtagtggtgcgatttcggtttattgtaatttttattttttgagtttaagtaatttttttattttagttttttaagtagttgggattataggtgtttgttattatgtcggttaattttttttgtagttttaatagagatggggttttattatgtttgttaggttggtgttaaatttttgattttaggtgatttgtttgttttagttttttagagtgttgggattataggcgtgggttattacggttagtttatatttattattagtaatgattatataatgtatcgttttatatgtaggtggtatttgtatatgtattttgttttttattggtgaatatttaatttgttaaaaatgttttattaatataaaatttgttgtgaatatttatggatatatatttttgagtattttttaatttatttattttgagtaagttttgtaaagtgagattgttggtttaaaggaatgtatattaatgaaaattttgttttattgttttttagaaagatttattaatttgttttttattaatgatgtgagatattatttgtgttataattatgttaggattagttattattatttttttaagttttgttaatttaataggtaatataattattttatttatttttttattagtgaatttgaattttttggtttttatttttttttgttttatttttattgattgttgatttttaaaattatatatttgttttttattgaggttgaattgtaatttaatatttggttatgtattatatgattttgtggttggaaaatgtttttaagatattgttagttataatcgattatggtgaaatttattaaattgtaatttttttatggtgaaatttattaaattgtaattttttttttgattttttttttaattatttgtttttataatttatatatatataaagtaattttagtagaatgaaataaatttatttaataattttgataaattaaataaaaaagttttgtaatagaattatgtattttttattatttaagggttaggaatttattgtttttaaggaataagataattatgatgggttagttaattttatagatggaaggaagtttaggaggtttagttaatttagtgatagtaatatagtatataggttagttttgtgtagtggtaagtaagaaaagttagtatgaagaaggggaaatgtatttttcgaagtttttgagtaagggtagaattaggatttaaatttagatttgtttataaatttagtgtttttttgataaaaaataaaaataaaaagtaaaagaagattaaaggaaatttaaagagaaagaaaatgattgtttttttcgtaggatagttatggttgattagaggaggtaggatatgtttaaatttttttttttagtataaataaaaggttgatttggttatgagaaaagttatgtttatggttagtaatgtgataggttaaagagtttatgtttttaaaagttttgtgttttaattattatatttattgttttttattttgttttttgataattcgaattttagttgttttagaaggttggtgttttttaaatttttttttttttaataagtgtttgtttgaaatgtttgttttttattgtcgtaaagaaatagtattagaatataaatttaatttatttagtaaggttatttttatattttttgtagaaagggtatattcgttagtagttttgttatgagagtatattaaataaaggagatagggttatttataatttgatagatttattttattgttgtgtttggtttttatcggttggaatgggatttaatattttgtatttgattcgattggttagtaatttagaattttttaaaagaggtaaaggtagaggaaaataaaggaaggaggaagtaatttgtggaatgttgagaaaggtaaaaatatttttaaataaggaagaggaataggttatgttttaatgtttgtttggattattataagtatgttagggtaaatatttaggttaagttgtaggagttaagaatataaagtatattgatttttttattatggttagtagatatttaagaatgttttttggtgtgattttattttgtgtggttgttttttggagtagtattcgtttattttcgttcgtttttttttttatttaagtgcgtgttgtttttcgatggaagatttgatggacgtggatatgagttttttgaggttttagaattatttttttggttgtgaattaaaggttgataaagattgttattttaaggtggataatgatgaaaatgagcgttagttgtttttaagaacggttagtttaggggttggtgtaaaggatgaattgtatattgttgaagtagaggtaatgaattacgaaggtagtttaattaaagtaatattggtaattttgaaaatgtttgtatagttaacggttttttttgggggttttgaaataatattattagtagttttaaggttgaagtgtggtttagggttagtgtatattagtggatagtatttagtagttgtggaggaagatgtagagttagaagatgaagaggaggaggatgtgaaatttttaagtatatttggaaagcgatttgttttcggaggtagtagtaagtttttatagaaaaaagtaaaatttgttgttgatgaagatgatgatgatgatgaagaagatgatgatgatgaagatgatgatgatgattttaatgatgaggaagttgaagaaaaagtgttagtgaagtaatttatataagatattttagttaaaaatgtataaaagttaaattagaatggaaaagatttaaaattattaatattaagattaaaaggataagaattttttaaaaaataggaaaaaaatttttaaaatattaaaaggatttagttttgtaaaagatattaaagtaaaaatgtaagtaagtatagaaaaaggtggttttttttttaaagtggaagttaagtttattaattacgtgaagaattgttttcggatgattgattaagaggttatttaagatttttggtagtggaggaagtttttttaagaaaatagtttaaataatttgttaaaaatttttcgttttattttatttttgtaatagttgatatttggttgttttttttataatgtagagtgagaattttttttatcgtgtttgataaatgttgtttaggttttattgttaagaatgtgttgtttaaaatgtttgtttagtttttaaagatggaattttattttttgtttggttttaagtatgtatggaatgttatgataggatatagtagtagcggtggttagatatggaaatcgtggggagataaaaatatatttgtgaaataaaatttagtattttaataaagtaaaaaaaaaaagaatggtagtataggtttttaaataaatgttgtttgtaagataagttattatttatttttaattaaatggggaggaaagtttttgaagaggaatttttattttttatatgttttatgtaggttaagtttatatggaattgtttgatatttggagtttgttttatttaatttttaattgattattttataattttttttgttttttgaatatttttggatgttatttttatttgttttttatatagattgttagtattttatatgagaagtttaatttttagtggaaagtaaggtatatagtagggtttattgtaaatgtaatgtgaatgatttaatgatgatttaaatagttttatagaaagatttaattaatatttatgaagtaattgttaggtggtagttatttttatatgagttattaaatttttaaaattattttgttatgtagaagatattggtttattttttagatgataggaatgaggttaagaagagttaattaattttttaagattttatttttagtggggttgggatttgaattttggttttttggtattaaaattggtgttttttttatagatttgtgtttttgttggatttgtttagtataatttgattataggtggaagagttttgtatagagatttataatgattgaagaatttattg

SEQ ID NO: 184 - DNA, 6880 bp, Artificial Sequence
  chemically treated genomic DNA (Homo sapiens)
taataagttttttagttattataggtttttgtgtaaagtttttttatttatgattaggttatgttgagtaaatttagtaggagtataggtttgtgaaaagagtattagttttgatgttaagaaattagaatttaaattttagttttattgagagtggaattttgagaaattaattgattttttttgattttatttttgttatttgaaaaatgggttaatattttttatatggtaggatgattttaagagtttaataatttatatgaaggtaattattatttagtagttgttttataaatattggttgaatttttttgtagagttgtttaagttattattagattatttatattgtatttataataaattttattgtgtgttttgttttttattggggattaaattttttatatgagatgttagtaatttgtgtaaggggtaagtagaaataatatttaaggatgtttagaaagtaagagaagttgtaagataattaattggaagttgagtgggataagttttaagtgttaaatagttttatgtgagtttgatttgtatgggatatgtaaaaaataaaggtttttttttaaagatttttttttttatttgattagaaataaatagtaatttattttataagtaatatttatttaaagatttgtgttattattttttttttttttattttattaaaatattgagttttattttataggtatatttttgtttttttacgatttttatgtttgattatcgttattattgtgttttattataatattttatatatatttaaaattaagtaaagggtggagttttatttttaaaaattaaataggtattttggataatatatttttggtaatagaatttggataatatttattaaatacggtagggaaagtttttattttgtattataaaaaggatagttagatattaattgttatagaaatgaaataagacggaaaatttttaataaattgtttaaattatttttttaaagagattttttttattgttagagattttgaatagttttttggttagttattcggaagtaattttttacgtaattgatgaatttggtttttattttgggaagagaattatttttttttatatttgtttgtatttttgttttaatgttttttatagaattaggtttttttggtgttttaggagttttttttttgttttttgaaagatttttgtttttttgattttggtgttgatggttttgagttttttttattttgatttgatttttgtgtatttttggttggagtattttgtatagattgttttattggtattttttttttagtttttttattattaaaattattattattatttttattattattattttttttattattattattatttttattagtagtaagttttatttttttttgtggaagtttgttattattttcgagggtagatcgttttttagatatatttaagagttttatattttttttttttttattttttgattttgtatttttttttatagttattaagtgttgtttattaatatgtattggttttgaattatattttaattttaagattattggtggtgttgttttaaagtttttaagggaaatcgttggttgtatagatatttttaaagttgttagtgttattttaattgggttgttttcgtaatttattgtttttgttttaataatgtgtaatttattttttgtattagtttttaaattgatcgtttttaaagataattggcgtttatttttattattatttattttaaagtgataatttttgttagtttttagtttataattaaaaagatagttttggggttttagggagtttatgtttacgtttattagattttttatcgggaggtagtacgtatttaggtaggagagaaggcggacgaagataaacgaatgttgttttagagaatagttatataggatggaattatattaggggatatttttaaatatttgttagttatgataaagaaattaatgtattttatgtttttagtttttataatttagtttaaatatttgttttggtatgtttataatggtttaagtaagtattaggatataatttgttttttttttttatttaaaggtgtttttattttttttagtattttataagttatttttttttttttttgtttttttttatttttgttttttttaaaaagttttaagttgttagttaatcgggttaaatatagaatgttagattttattttagtcgatggaaattagatatagtagtagggtggatttgttaggttataaatgattttgttttttttgtttggtgtatttttatggtaaaattgttggcgagtgtattttttttgtagaaagtataaaaatggttttgttgagtaaattaaatttatgttttagtgttatttttttacggtagtggggaataagtattttaaatagatatttgttagaggaagagggatttaggaggtattaattttttagaataattgggattcgaattgttaggaaatagaataaagggtaataaatgtaataattaaaatatagaatttttaaaaatatgaattttttggtttattatattattgattataaatataattttttttatgattaaattagttttttatttatgttagaaagaaaggtttgaatatgttttgttttttttaattaattatagttgttttacgaaagaaataattattttttttttttttagattttttttggtttttttttgttttttgtttttgttttttattaaaaagatattggatttgtagatagatttgagtttgagttttgattttgtttttgtttagaagtttcgggaaatgtatttttttttttttatattaattttttttatttgttattgtataaaattggtttatgtattgtgttgttattattaagttggttgggttttttgagtttttttttatttgtaaggttagttaatttattatgattattttattttttaaaagtaataagtttttgatttttagatgataagagatatatggttttattataaaatttttttgtttgatttattaaaattattggatgaatttattttattttgttggaattgttttgtgtgtgtgtgagttataggggtaaatgattgaaaagaaggttaaggaaaggattgtaatttagtaaattttattatgaaaggattgtaatttagtaaattttattatgatcggttatggttaataatattttgaaaatattttttaattataaaattatatggtatatggttaaatgttaaattataatttaattttagtaggaaataaatatataattttaaaaattaataattaataagagtaaaataaaaaaagataaaaattaaaaaatttagatttattaatgaagaaataaatgaaataattatgttgtttattgaattgataaagtttaaaaaagtgatgataattagttttggtataattgtggtataaatgatattttatattattagtaaaagataaattggtaaatttttttgaagggtaataaggtaaaatttttattaatgtgtatttttttggattagtaattttattttataaaatttgtttaaaataaataagttgaaaaatatttaaagatgtatgtttatggatgtttatagtaggttttatattaataaaatatttttaataaattaagtatttattaatagaaaatagagtatatatatagatattatttgtatatggaacgatgtattgtgtagttattattaatggtaagtgtaggttggtcgtggtggtttacgtttgtaattttagtattttgggaggttgaagtaggtagattatttgaagttaggagtttgatattagtttggtaaatatggtgaaattttatttttattaaaattataaaaaaaattagtcggtatggtggtaggtatttataattttagttatttgggaggttgaggtgggagaattgtttgaatttaggagatggaggttgtagtgagtcgagatcgtattattgtattttagtttgggtaataagaatgaaattttattttaaaaaataaaaaataaatgtgtatttgttttttttatggaaaatttttataatatattaatgatgtatattgtagtgatagttttattaatttttaagtgttatatttttttttttttataatttattaaagagaatgttgtttttgtttgtttaatgttttattattttttttagtttttaatagagtatttttgatttttttaataaggttttttatttttggttatatagattagagaatggtaaattaataatggatattaatttataaaggtaaaatatgagggggaagatttagtagagaaagtaagtttttttatataaaaaggtggaaagtgggatgagataaagtttttttgggaatgagtaagatattggattatgtggtatatttttagtagttttgtatataaataaagtaaaataatataaaatatttgaagaaaagaggaagaggttgtgttagtttatatttttattagtagtgataaatattttttttttattatatttatttaaataaatttttattgttttttgatttttgggttattttggttggagtaaggtggtattttattgtggatttaatttgtatttttttaataattagtgatattgagtattttttttaatgtttgatggttatttgtatatttttttttgagaaatgtttgtttatattgtttgtttaatttttaatggaattatttgtattttttttttaatttgtttgagttttttatagattttggatattagttttttgtttggagatatagttggtaaatatttttttttattttttaggttgtttgtttattttgttgattattttttttgttgtgtagagttttttagtttaattatgttttatttatttatttttggttttgttatatttgattttggagttttagttataaattttttgtttaggttaatgtttggaagagttttttttaggttttttaatgtggaaaatagtatgaagattttttaaagaattgaaaataggtttattatttgatttagtaattttattacggagtatttgtttaaaggaaaataggttattatattaaaaagatttttgtatatgagtgtttattgtagtataatttataattgtaaagatatagaattaatttaagtgttcgttaattaataagtggataaagaaaatgtagtatatatatattatagaatattatttatttttggaaaagaatgaaataatgttttttgaaattatttggttggaattggaggttattattttaagtgaagtaatttaggaatcgaaaattaaatataggatgtttttatttataagtggggattaatatatgggtatgtaaagatatatagagtggtataatggattttggagatttagaagaagggaggagggaaggcgggtgagggatgaaaaatatttattggggttcggtatgagataagtggtttacgtttgttattttagtattttgggaggtcgaggcgggtggattatttgaggttaggattttgagattagtttggttaatatggtgaaatattatttttattaaaaatataaaaattagataggtatggtggtgtatatttatagttttagttatttggaaggttgacgtaggagaatcgttcgaatttaggatgtagaggttgtagtgaattaagatcgtgttattgtaatttagtttgggtgaaagagtgagatttttttttaaaaaagaagaaaaagtatttattgggtataatgtatattatttaggtgataggtataataaaaatttagattttatttttatataatttatttatgtaattaaaaattatttatatttttaaagttattgaaatttaaatattaaaaataaaaggaagggatttttaagagtataattgtgggttgtatattagatttttattaatataatattttttaagaaataaaaggatagggtaaagaaagatggtagaatagaagtttatattatttgtatttttggaaggaatattaaattttaataattatttgtatatagaatagtattattataagaattaaaaattaggtgaataattatagtatttggttttaattttatattttggaaagaggtattgaggagggttagagagattgtattgaattgtagatgttattttttttttatttttagtaatggttgtgtagtaggaagagtttgtgtattttggggagggagagaatagtgattataggattttatattgaattcggtgttgtttttttatagtggagagtaaagttatattgggtatgaatgaaattgtggtttatgtttgtaattttagtattttgggaggtcgaggtaggtggattatttgaggttaggagttttagattagtttggttaatatggttaaattttatttttgttaaaaatataaaaattagcggggtgtgggggtaggcgtttgtaatttaagttatttgggaggttgaggtaggagaatcgtttgaatttaggaggtggaggttgtagtgagttaagatagtattattgtattttagtttgggtaatagagtgagattttgttttaaaaataaataaataaataaataataataataataataaattggaggaattatattatttgattttaaattatattatagagttatagtatatagtaattaaaatagtatggtatttgtataaaaatagatatatagattaatggaatagaattgagaatttagaaataaatttaagagaatttagaaa

SEQ ID NO: 185 - DNA, 5263 bp, Artificial Sequence
  chemically treated genomic DNA (Homo sapiens)
ttagagaagagaggggtagtgagtagttttttgggtggtttgtagaaaagaggtgagatttttttttgagggtttaggtggtagtattagtacgagggtggtagttttagggtgttggtttcgttatgttaaagttaaggatatttaaggaatggagttgtttgagaatagagtcgaaggttttggagtggttggtaatgagttttttgttattgaaggtgtttaagtaggatattattagtaggtagttttaattttttggtaggtgtttgtttaagatattgggatttgagtgggagttttgagttggtttttttatggttgaatttttttgtttttttggattattttggtgtttgattgtttttttttgtgggtgggtttttattttttatgtatggttaaaattttttttttggatttagagtttttggatagtattatatatttttagtttttaattaggtttagatttgttttttttttttgtaatttatgtttgggttatttaagaaatagaattttttttttagtttaagtttagatttgttagttttagatagtttttttagaatagtaagttttttaggatttagtattttttttgtagttcgttgtgttttttagttattttttagtattatagttttttgattagttgagatttgtagaagtagattttatttttgtttaaatttgaaagttgtgaagtatagtttttggatttagaatgatattataggagtagggtatggtgggtgaatttatggatttgtttggtgtgtggtttatatttcggtaatgtggttattgatttaggagtatgggttttttggaaaaagggatgtggttgggttagaaaggtagataggtgattaatagattggtagggttttgttttgagtttttatttttttttttttttgttaggtggaggggaatgtgggttgttggaaattttttataaatagttgatattaattttaggtgtttgtacgtttggaatatgttttttaagaaagatacgtgtttaatttttttaggtgttaggggagttgggttattgtgttttagtaagtggtttttattttgatttgtttggtgaaagattgtattcgaattttgggaatatttttgttttttttaaatttttggtattggaaggtgtttgttcgtttgtaaagggtttttaaagttttattttttgtttaaaaaataaaataaaataaaaaattttgtttatttttgttttttattgattagtaaggggtatacgggtgagtttttttttttttaagattttagttggtagtaaaggagatgaggaggttggggggtgatttttggttggttggatgttgagtttggttatgatatttttaggattttatgaagcgataggtattttttttttttaattaggatatttttattaagaggtgagatattgtaaatgttttggatttttattgaggggagggtgtttacgttggagatttttttttgtttttatatttaaatttggtttattgtagaggttaagaattagtaaattttgagtgtgtattattattgattttgtattatgatttttgtgagtagtgtatgagtaggttatttttatttttttaagtttagaatgaaattttaaatgtttttttttgataaggtttttgtttttgagatatttagtttattttattttaattttattgtaattgaataatattatgaggatttatttttattattttttatttttttttttttttttttttttaatagtttttttggtttagatttatgtagaattagagaatttttaagttgggagggatgattatggggttgcgatgtgtttatgaattatttgggagtttgttttgatggatattttggtttgggaggtttgtgatggggttttagatgttgtattttttgtaagtttttaggtgatatggatgttattggatagagggttatattttgggttttgaggatttggttttaacgtggttattttatagatgggaaagcggagttttagaaagtttgttatttttttgtggttagaaatgaaattttgtttttttttattttagtttattatttgttttttttttttaaatttttaagtttaggggtacgtgtgtaggatgtgtagttttgttatataggtagatatgtgttatggggtttgtcgtatagattattttattatttaggtattaagtttggtatttatgagttattttttttgattttttttttttttttattttttattttttggtagatttttatgtgtattgttttttttatgtgtttatgcgttatttgtttttgaaagggttttttttttttttagttgtcgttttttgtttaggtttagagtgtgagtataaacgtagtattttattttaattttattttattgttaggatgaaagattttttgtttattagggttttttgttttataatttgtatttttattaaatttagaggggtttttaaaggttttttgttgttgttgtttttgttgttttaatttatggatgtttttttttttttgtttgatatgttaaaaatttttttttttttttttttttttttttttttttttttttttaaaaaagtgggttgggtattttttggatataattattttagttttaggttggagtattgatgttgggttgaatttatttggcgttttttgtttaggagtggtttgagagaggttgtgtttttttgttgttatttgttattttttaagagaggttaagtgttaggatttgattatattttagttttttgatttttagatattttaaagttaattttagaatggtatttgaagtgatagggaaatttttagtggtttaaggatagttaggattggtttagggttagtagtaagtggtttgagagtttaaggaggtttttatattttgttttcgtttgttggtgggagggtaaaatgttagtttggagataaggttataatggcgacgggggtaaaaatttttttggggttaagggaaggtggaacgtgacgggaagtcgggaaaattgttttgtataggtatgttttttttttttatttttttcgtttaagtttttattttaagcgatagtgttattcgaaggcgatcggtttgtttgtggttgcgtttggggtaggcggtgatatcggtatatttttttttttattttgtttgtaagttgtatgatttgtatcggaatttataggggggcgggggagattttttttagatattggatgtagttgaattgaatttaatgtattttgttttttcgtttgtttttttttaagttcgggaaggagaattttgtttttttttgcgtgtgaatgttgtagtgtgtttgtttgttcggatttttttaatttttttttttttttttttatagcgaatgttcgttttttttttttttagtaaatagtttatatttggtatttttatgttttattaagaaaaaaatttttattagcgtaaaagcggggttttttttatatatatttttttttcggatgagatttgagttttcgtcgaaagttgtatttgttttgcgtttttattaggaaggggtgtttgtgtgggagggaaggaggaggttttgcgttttcgaattcggagaaagtagttcgttcgtttttttattcggtagttagtttagtttattcgagagttgagttcgagaagtcggtttttgacggtgttggcgtggcgtttgttaaaatatgttttttgtattttaatttttttcggttattttttttgtacgtatagttcgttcggggttatttcggttttttagcgtagttttttcgatttttgtttttttttttttcgatttatgtttgtttaaggtcgaatgtaaaatttatttttaagaaagcgtagcgggtacggggggtatttagcgtgttatgtttcgtagtttttttttagttaagattagagttttagattttagattacggaaatgagtgttatttagattaaggattgcgcgtttgcggtttcggttttcggttttgggtgtttttttggggtgtttgtgcgtttcggtatttttcgtcgtcgttcgtgagtttgcgttttttatttatttaggtttgggagcgttttttatttaaggtttgggagtattttttaattattttcgttacgtttattttattttttatcgcggttcggattgtagtaaaatcgggtagcgcgagggttaaaaagtggaaaggagagcgttttttcgtgtcgtgtagttagttcgttaattttttttttttagtttcgattttcgtaattttaaatgtaatttttttttttcggtttcggtttttttcgggttgcggttagcgggcgtcgcgttgcgaggcgtggagcgggcgggttgtcgcgaggttgcgggtggcggtgtcggttatagtcgcgagtcggcgagtgggtgggtgggtgggtggggaggagggagaggataggcggggagagagacgggtgtggggaggggagggagggggagatttcgtttttttgtcgtttttagttcgggcggggggcggggggaggaggtcgcgacgagggaggggaggagggagggaggaagggagggagggagtcgaggaagacgtttcgataattcgtgcgtttcgtaaggttcggagtatttgtatatttttgtagtcgcgcggcgagttattcgcggcggttgttgtagtttttattgtatttttttttttttttttttttcgggtttcgggtgtgtgtatgtgtgagagtgagtgtgtgtgttttgtaggtgcgtggtgtgttcgttttaattttgtttagtaggtgggatttggtgattttagtattattttttttttttttttttttttttttgtttttttatcgtttgttgtaattttgtaaagtttcggagtcggagagcgcgtttcgtttttagagttttcggattcggcgagttagcgatcgtcgagtcggttattatgttcggtagatcgcgttattaggcgtttttcgcggtttttattcggcggcggcggcggcggcggcggcgttcgcgatggttttagacgttgaaggattttgtatttgatcgttcggcgttttaaaggtagaggttttttttttttttttttttttttttcgtcgtttttgtttttttttttttttgttatttttattttttttattttattttttttttttttttttttttttttttttaga

SEQ ID NO: 186 - DNA, 5263 bp, Artificial Sequence
  chemically treated genomic DNA (Homo sapiens)
tttaaaaaagaggaggaggagaggagaggggggtggggtggggggagtggggatagtagggggggaaggaaataaagacggcgagggaggggggaagggggagggggggtttttgtttttgaaacgtcgagcgattagatgtaaaattttttagcgtttgaaattatcgcggacgtcgtcgtcgtcgtcgtcgtcgtcgggtgggagtcgcgaggagcgtttagtggcgcggtttgtcgggtatggtggtcggttcggcgatcgttgattcgtcgggttcgggggttttggaagcgaggcgcgtttttcgatttcgagattttgtagggttgtaatagacggtggggaggtaaaaaaaaaaaaggaaaaggaaaaaatggtgttaaagttattaagttttatttattgggtagaattaaaacggatatattacgtatttgtaaaatatatatatttatttttatatatatatatattcggagttcgaggaaaggaagagaaggaagatgtagtaggagttgtagtagtcgtcgcgaatggttcgtcgcgcggttgtagaaatgtataagtgtttcgagttttacgaaacgtacgggttatcggagcgtttttttcggttttttttttttttttttttttttttttttttttttttcgtcgcggtttttttttttcgtttttcgttcgggttgggagcggtaggagagcggaattttttttttttttttttttttatattcgttttttttttcgtttgtttttttttttttttttatttatttatttatttattcgtcggttcgcggttgtagtcggtatcgttattcgtagtttcgcggtagttcgttcgttttacgtttcgtagcgcggcgttcgttagtcgtagttcgggggaaatcgagatcgaagggaaaaagttgtatttgagattgcgagggtcggggttggggagggagagttggcgagttggttgtacgatacggaaaggcgtttttttttttattttttggttttcgcgttattcggttttgttgtaattcggatcgcggtaggaagtgaaatgaacgtggcggaggtgattggggagtgtttttaagttttgggtggggggcgtttttaagtttgggtgggtggggggcgtaggtttacggacggcgacggggggtgtcggagcgtatagatattttagagaagtatttagagtcggggatcgggatcgtagacgcgtagtttttggtttgaatgatatttattttcgtaatttagagtttggggttttggttttggttgggaggggattgcgggatatggtacgttaggtgtttttcgtgttcgttgcgtttttttggaggtgggttttgtattcggttttgagtaggtatggatcggggaaggaagaaataggggtcgaaagggttgcgttggagagtcgaggtggtttcgggcgagttgtgcgtgtaagagaaatggtcgggggaaattgagatgtaaggggtatattttggtaagcgttacgttagtatcgttagaggtcggtttttcgggtttagttttcgggtgagttgagttggttgtcgggtgagggggcgggcgggttgtttttttcggattcgggggcgtagaatttttttttttttttttatataagtatttttttttggtagggacgtaaagtaggtgtagttttcgacgagagtttagattttattcgggaaagaagtgtgtgtggggggggtttcgtttttgcgttggtagggattttttttttaataaaatataaagatgttaagtgtgagttgtttgttgaaaaaaaaaaaaacgagtattcgttgtgggaaaggagaagaaagggttaggggagttcgagtaggtagatatattatagtatttatacgtagaagaaagtagggttttttttttcgagtttggaggagggtaggcgaggaagtaaaatatattgaatttaatttaattgtatttagtatttgaaaggagtttttttcgtttttttgtggatttcgatgtaggttatgtaatttgtaggtaagatgggggaaggggtatgtcggtgttatcgtttgttttaggcgtaattataaataggtcggtcgttttcgggtggtattgtcgtttggagtaaaaatttggacgaaaaaaatggaagaaaagaatatgtttatataaggtagttttttcgatttttcgttacgttttatttttttttggttttagggagatttttattttcgtcgttattatggttttgtttttagattggtattttgtttttttattagtaggcggggatagagtgtgaagatttttttggatttttaaattatttgttattggttttaggttaattttggttgtttttaggttattgggaatttttttgttattttaagtgttattttgggattggttttagaatatttgagagttaggaaattgaggtgtagttagattttaatatttggttttttttgggaggtggtaggtggtagtagagaaatatagttttttttagattatttttgggtagggaacgttaagtggatttagtttagtattagtgttttagtttggaattgaaatggttgtgtttaaaagatgtttagtttatttttttgagagagagagagagagagaaagaaagagagagagagaggatttttaatatgttaagtagagaagaagagatatttataagttagaataataaaaataataataataaaaaatttttaaaaatttttttggatttggtaaaaatgtagattgtggagtaaggggttttgatgggtaagaagttttttattttgatagtaaaatgggattaagatggggtgttacgtttatgtttatattttgggtttgagtaggaagcgatagttgaaaaagagggaagtttttttaaaagtaggtgacgtatggatatatagaggggataatgtatatgagggtttattagagggtagaaggtgggaggagggagaggattaggaaaaataatttatggatattaggtttaatatttgggtgatgaaataatttgtacgataaattttatgatatatgtttatttgtataataaagttgtatattttatatacgtatttttgaatttaaaggtttaaaaaaaaaaagtaggtgatagattagagtggggaagagtagaattttatttttaattatagggaaatgataagttttttgggatttcgtttttttatttgtaaaatgattacgttaagattagatttttaaaatttaaagtgtggttttttgtttagtagtatttatattatttggaagtttgtaagaagtgtagtatttgaggttttattatagattttttaaattagaatgtttattagaataagtttttaggtgatttataagtatatcgtagttttatagttattttttttagtttgaagattttttgattttatatggatttgggttaaagggattgttgagggagaaaaaaaaaaaaaaggtggggaatgatggggatgggtttttataatgttatttagttatagtgaagttagggtgaaataaattgggtattttagaggtaggggttttgttagaaaaagatatttgaagttttattttaagtttaagaagatgagaatgatttgtttatgtattgtttatagaaattatagtgtagggttaataatagtgtatatttagagtttgttagtttttaatttttgtagtaggttaaatttaaatgtgggagtagaagaaagtttttagcgtagatattttttttttagtaagagtttagagtatttatagtgttttattttttgataagaatgttttggttgaaaaggaaaaatgtttgtcgttttatggagttttggagatattatgattaagtttagtatttagttaattaggggttattttttaatttttttattttttttgttattagttggagttttagaaaggaggaaatttattcgtgtgttttttgttgattaataagaggtaggaataggtaaagttttttgttttgttttgttttttgaatagaaagtaaagttttagaaattttttataggcgagtagatattttttagtattaagggtttggagaagatagaaatgtttttaagattcgaatgtaattttttattagataggttagagtggggattatttgttggagtatagtggtttaatttttttgatatttagagaaattgaatacgtgttttttttaaaaggtatgttttaggcgtgtaagtatttgagattaatattaattgtttatgggagatttttagtagtttatatttttttttatttagtaagggagaaagggagtggaaatttagagtagagttttgttagtttattggttatttgtttgtttttttaatttagttatatttttttttttaaaggatttatatttttgagttagtggttatattatcgggatgtaggttatatattaggtaggtttatggatttatttattatgttttgtttttatggtgttattttgaatttaagagttgtgttttataatttttaagtttgagtagaaataggatttatttttgtaagttttagttggttaagaaattgtgatattgggaggtgattggggagtatagcgggttataaagggaatattaggttttgaaggatttgttgttttaaaagagttatttggagttggtagatttgggtttgggttagaggaggagttttgttttttgggtggtttaagtataagttataagggaaagagataggtttgggtttggttggaggttggggatgtataatgttatttagaagttttgggtttaaggaaagaattttgattatatatggaagatgaaagtttatttataaaaggggatagttaagtattaaagtggtttaggaaagtagaagaatttaattatggaagagttagtttagggtttttatttaagttttaatattttggataaatatttgttaggaggttgggattatttgttggtggtgttttgtttgaatatttttagtggtaggaagtttattattagttattttagagttttcgattttgtttttagatagttttattttttgggtatttttgattttgatatagcgaagttagtattttaaagttgttattttcgtgttagtgttgttatttagatttttagggaaaagttttattttttttttgtaagttatttaggaggttatttattgttttttttttttttga

SEQ ID NO: 187 - DNA, 6590 bp, Artificial Sequence
  chemically treated genomic DNA (Homo sapiens)
ttagtttaggtaataagagtgaaatttcgttttaaaaaaaaataaataaaaataataatttttaaaaagagtattatgaaagtaaaagtatgtatataagaggtattttttggtcgggtgcggtggtttacgtttgtaattttagtattttgggaggttaaggtaggtggattataagagtttgagattagtttggttaatatggtgaaatttcgtttttattaaaaatataaaaaattagttgggtgtggtggtagatatttgtaattttagttattcgggaggttgagggaggagaattgtttgattttaggaggtggaggttgtagtgagttaagattatggtattgtattttagtatgggtaatagagtgagattttgttttaaaaaaaaaaaaaaaaaaaaaaaaaaaaaaaaaagaggtattttttgtttggtttttgtttatatttgttgtgtgattttgaataagttattttttttttttgttttttgattatataggtagatattagagtattatgattttttatgttaattgttatattttataaatgtgtcgttgttttttaattattcgttgaagatcgagatttttttgttgaggataggttttttgattggagttttatattattttttttttaaagcgtaagaatgagtggtgtgtaattttttgtttttgtttttttaaaggaaataataatttaaagttatttgtaaaggtatgaaggtataattttgggtaaaagtggatttgttttaatttatttttttaattttttatgggattattttatttttagttaattttacgtaatgtttgtttttattgtatttttttaaagaattggatgttggttttttaaggatagtttttttttgtatttatttgtttatagatatatatatttaattaaaaatatttaataattgtaattgttatgaggatatttgggagtaaataaaattttatttatttatttagagatagggttttattatgggagtaaataaagttttttttatttatttagagatagtatttagttatgttgtttaggttggttttaaatttcggagtttaagtgagttttttgtttttattttcgaaagtgttgggattataagtttgaattattgtttttggttagaatttttttttttttttttagttaatttagaaagtttattttgttaaggttgaggatgttaattcgtgatatagttttaggaggatttgaggatatgtgtttaaggtagttagagatagtttggttttatatattttaggggatatgagatattaattaacgtatgtaagatggatattggtttggtttggaaaggcgggataattcgaagtggggagggggtttttaagtggtaggtatataagatataaatggttgtattattttgaatttttgattagtttttttgaagggggtaattagaaatgtatttattttagtgagtagaggggtgattttgaatagaacgggaggtaggtttgttttgagtaattttttagtttgatttttttttttagttgagtgattttggggttttaagatattttttttttatatttttttttttttttttttaaaaatattttagataaagtattttagaagaaaatgagtttttagttttaggttttatttgattttttttggttaggatggtttattattataggggtaagttcggagttattaggaaagtttatttttagaaggttgtaaagttttatgttttgtgaagagaaaatagggggaggaagggagaatataataaataaaagaataattttggaaaattaagatataggttagagtatttcgaagtttatatattagtagataggtatgaaagtggtttacgtttgtaaatatgtaattatttttttttgaggtttaagttgtttagttttagtttgtagggttttataaaagtataatttagtttttagtgattttaaattagggaaaatggggggaaaagaaggaaaaaatttaaaatattattttggagatttgtagttaagaaaaattagaatttagtttaaattatagaaaataataaaaattgaaaaatattaggtaagattagaatgtaataataggtgtattatagtttttgaagtataatttttttttagttttttatttttattaaagatgaattatggtaagggaggagattattttttatattgttttatgtttaatttttgtttttaaagaaagaagatgtaaaaattaaaaggtagaaatgaaatttataagtaggtagtttggtgttatattttgggtttggtagttaaagatcgatttttgatttaataggttatttgtataaaaaaggtattgtgaagatttttgttttattttgttttgttttaattattggtgtatgtaatttttagttatgtattttttgtttgtttaatttattacgatttttttatatggatttttttagagttgtgagtttttaaaagggataagaatcgtttattcggggagtttagtttttgagataggggttttgtttatgttttcggtcgaataaattttttttttttttaattcggtgtttgaggggtttttgtttgtagttttttttgttataatggtatgattggtttgttttattatatttggtttaattttttgtatatagtgtagtaagaatttttaattagtaaatgaagtgagtattgtaaagatagtattttatttttatggtgatatttagttttaggttaaagttaatattttatatagtaggagtggagagtgttaatttatgaataatttggttaagaggttaagggtttgtaagaaagatagttggtatttataaaatattttatttaataaaaataggaaatatattttttttaaatttatatagaatatttattaagatatattatgttttgggttagaaaatatattttaataaattttaatagagatatgttatgtaaagtatgttttttattataatggaattaaaaaagaaatttataaaagaaagatagttggaaaattttaaaatatatggagattaaagaatatatttttaaataatatatggggtaaggaagaagttttaagagaaattttaaaatattttgggttaggtttagtggtttacgtttataattttagtattttgggaggttgaggtagatggatcgtttgagtttaggagttcgagattagattgggttatatgtagaaattttatttttataaaaaatataaaaattagttaggtatggtggtatgtatttgtagttttagttatttgggaggttgaggtgggaggattatttgagtttaggaggttaaggttgtagtgagttaagattgtgttattgtattttagtttgggtaatagagtgagattttgttttaataaaataaataaatatattttgaattaaattaaaatgaaaaaatagtttattaaaaagtgtgggatgtagtgaaagtagtgtttagagggaaagttatagtattgaatgtatatattaggagaagaaagatttaatttagagagggatgaataggtgaggtataggggattttaaggtagtgaaatttttgtagggtaggggagttttaaaattgggatatcgttcgggaaggtttttggtttcgtttaggaaggaatttaagggtgagttagaggaggaagaaaaaggtttattgaggtagtagggttatagttttgtgattgtttttgtagagtagggttattttataggtagtgtttggagagtagtagtttagggtatttttatagttatatttatatttatttttaaatacgtgtaaattaagggtaggttatttagaaatttttagaagaagggtggtaattgggttattgttagggaatgagtaaattgtttatggtgttggtgtttatgttagttagtttttaatttggttttgagttaagttttattttttattttaaaattattttgtatggtgttgtaatggtggatatatgatatgttatgtttggtaaaatttatagaattgtaggatataagagtgaattttaatgtaaattttaatgtaaatggatttttgttaattatgatgtattaatattaatttattaattgtaataaatgtattatagtattgttaataatagaggaatttattggtaggagagagagtttatggaattttttgtatatttagtttaatatttttgtaagtttaaaattgttgtgagaaataaaatttaatttgggtaatatagtaagattttgtttttataaaaaataaaaaatgagttgggtgtagtaacgtatgtttgtagttttaggtatttaggaggttggggtaggaggattttttgaatttaggaagttgaggttgtacgagttatgattatgtttttgtattttagtttggataataaagtaagattttgtttttaaaaaataataaaataaaataaaaatttattaattgaaagggaaaaaagtatagtataatattatttttaataaaaagaaaagagatttgtgtttgtgtgtgtgttaatatttgaaaaaaatttggaaagttttatattaaaacgtttatagaggtaattttgtagtgttagaattatagatgatttttttattttttggtttttttgattttttttttttttgtagtgggtatgtattgttggaaaatattatagataattgtgaaaggattttattaataataaaaaaaagataaagaaggaaatataaaatttgttaaataagatttatgttggttggaggttaaaatgtatttttagagtagagtttagagaaaggttgggttgtttgttgttggttaaaggataaagggtaagttttaggaagtagaagagtgagtagatgaaatttagtattgggattaggggagtgtttgatttgtaaaaggaaagtgtaaagatagttttttttttttgaggaaacgaaattaatagtagtttaagtttagttagtagaagagataaaagtaaataggtttgggaggtagttttgttgttatttttttttttgttaatgatggattttagaaatattttagttaaatttttggataagtttattgaagattattttttgttagatacgtgttttcgtatgtaaattaattatgttattgatattatttgtgggtttttgaaggaaaggtgttttcgaggtagtttttattttgtgtgtgtgtttaaggtggtaaaggtgagtttaggtttgtttggttaggggaggggtggttgaatgtgtaagagttgagattgagaatgagagagagagagagagagaagtaaaaatttagaatttagggtgtaaatgtgagtatagagagttgagattttttgggatggtggttttttatttatttatatagtatgttaaaatagattttggggtgaaattttatatttttattattaataagtgatttttttttttatttttcgttgaagtttatgaattattgttttgggcgatgtttattttagaaatagggaattgaattttagttttggtaaatagtttgttaattcgtggttaggttaggggtttattatttttgtagtgaagaattatatgttttgaaagtaaatagtatttgttggttgtaagattttgagtaagttatttaattattttgtgttttaatttttttagttataatttttaatattgttgtagttttgttagtgtattttaatgtagtagttttttattgaattagtatttaaggttttttgttttgtatttaagaaaattaaggaatatggatataaacgtgagtttggagtaaaagtttagtaagtaaaagaagaaagttgtttttattgtggagagggaagtttgagtggattgttagattgtagttgaatgtaaaaaatttttataagaaattatttttttttttgtaattgtttgagaaattttttattagtaaagttgtgtaattttttttattttatgtagttgtgggtatatttttaggtaagtataaagcgttgttttttttgtatgtataattgtggatttgttttaggtaagttttattttttgcgttagttttaggtaggtcgtttttttagggtttagttttgattatttatttaattgattttttttttatttttttttaatattttatagggtcgtgtagattaagtaaaatagtaagtgtgaattatttagtataagttagttttgggtatcgtaaaggataatgggaaaagaatatagattttggaagaaggtttttaggtttgaattgtatttgttatttattagttgggtgatggggttgatatattattttattgagtatttatttttttatttgtaaaatgggaattaatgataatggtatttaaattatagtattattgtgagtattataggagtttaagatatgtaatgtttttagaatagtggttagtgttttataatgttagtgattgtttttgttattttatttagggaggtttgttttattaagtattaattattatttttgtcgttttttttagg

SEQ ID NO: 188 - DNA, 6590 bp, Artificial Sequence
  chemically treated genomic DNA (Homo sapiens)
tttgaaaaagacgataaaaataataattgatgtttagtgaggtaaatttttttaaataaaatgataggagtaattattaatattatggagtattagttattgttttgaaggtattgtatgttttaaatttttataatgtttataatgatgttatgatttggatgttattattattagtttttattttatagatgggaaaatggatgtttagtgagataatatattagttttattatttagttagtaggtggtaaatataatttaaatttgggggtttttttttaggatttgtgttttttttttattgttttttacgatgtttaggattagtttatgttgggtggtttatatttattattttatttaatttatacggttttatgaggtattgagggaaagtagaggaaaaattagttaggtaaatggttaaggttgggttttggaggagcggtttgtttgaaattggcgtagggagtgggatttatttaaaataaatttatagttatatatataagagaagtagcgttttatgtttgtttagagatatatttatagttgtataaggtaagggaagttgtatagttttattgataaaaagttttttaaatagttatagggaggagagtggttttttataaaagttttttgtatttagttgtaatttggtaatttatttagatttttttttttatagtggagatagttttttttttttgtttattgaatttttgttttaagtttacgtttgtgtttatgttttttaatttttttggatgtaggataaagaattttgggtattaatttagtgagaagttgttatattaaggtgtattggtaagattgtaatagtattggggattatggttgaggaaattggaatatagagtagttaagtgatttgtttaaggttttgtagttagtaggtgttatttgtttttaaaatatatgattttttattgtagaaatggtgagtttttagtttggttacgaattagtaaattgtttattagagttgggatttagttttttatttttgaaatgggtatcgtttaggatagtggtttataaattttagcgggaagtaggggggagggttatttgttaataatagggatgtaggattttattttagaatttattttaatatgttgtgtggataaataagaaattattattttagaagattttagttttttgtatttatatttgtattttgggttttaggtttttgttttttttttttttttttttttatttttaattttaatttttgtatatttagttattttttttttggttaggtaggtttggatttatttttattattttggatatatatatagggtaggagttatttcggaagtattttttttttaggaatttatagatgatgttaatggtatggttgatttgtatgcggaaatacgtgtttggtaagagatagtttttaatgaatttgtttagagatttggttggggtatttttgagatttattattgataggagagagagtggtaatagaattgttttttagatttgtttgtttttattttttttgttgattgagtttggattgttgttggtttcgtttttttagaagggaggagttgtttttgtattttttttttgtaaattagatatttttttgattttagtgttgaattttatttgtttatttttttgttttttgaaatttattttttgttttttagttagtaataagtagtttagtttttttttgaattttgttttggaaatgtattttaatttttagttaatataaattttatttaatagattttgtgtttttttttttattttttttttgttgttgatgaaatttttttatagttgtttgtggtattttttagtaatatatgtttattgtaaaaagaaaaaaagttagaaaaattaggaagtggaaagattatttatgattttaatattataaaattgtttttataaacgttttgatatagagttttttagattttttttaaatgttaatatatatataaatataggttttttttttttttgttaagaatggtattatattatgttttttttttttttaattagtagatttttattttattttattattttttggagataggattttgttttgttatttaggttggagtgtaggggtatgattatgattcgtgtaattttaattttttgggtttaagggatttttttgttttagttttttgaatatttgggattataggtatgcgttattgtatttagtttattttttattttttgtagagataaggttttgttatgttgtttaggttggattttattttttatagtagttttaggtttatagaaatattgagttgaatgtgtagagagttttataagtttttttttttgttaataagtttttttattattaatagtattgtgatatatttgttataattgatgaattgatattaatatattataattaataaaagtttatttatattaaggtttatattaaggtttatttttgtgttttatagttttatggattttgttaaatataatatgttatgtatttattattatagtattatgtagaatagttttgagataggaggtggggtttgatttagggttagattgaagattggttggtatgagtattagtattatgaatagtttatttattttttggtaatgatttagttattattttttttttagaaatttttgaataatttgtttttaatttgtacgtatttaaaagtgggtatgaatgtgattatagaagtgttttgagttgttgttttttaggtattgtttatggggtggttttgttttgtagggatagttatagaattgtaattttgttgttttaataaattttttttttttttttttagtttatttttgaatttttttttggacgaagttaagagttttttcggacggtgttttagttttggggtttttttgttttgtaagagttttattattttaaaattttttatgttttatttgtttatttttttttgagttagatttttttttttttaatatatgtatttaatgttataattttttttttaaatattatttttattatattttatattttttgataggttgtttttttattttaatttaatttaaaatatatttatttattttgttgagatagggttttattttgttgtttaggttggggtgtagtggtataattttagtttattgtagttttgattttttgggtttaggtgatttttttattttagttttttaagtagttgggattataggtatatgttattatgtttggttaatttttgtattttttgtagagatggggtttttgtatgtggtttagtttggtttcgaatttttgggtttaagcgatttatttgttttagttttttaaagtgttaggattataggcgtaagttattgagtttggtttaaaatattttaaaattttttttgagattttttttttgttttatgtgttatttagaggtgtgttttttaatttttatatattttggaattttttagttattttttttttgtgggttttttttttaattttattgtagtaaagggtatgttttgtataatatatttttgttgaaatttgttaaagtgtgttttttagtttagaatataatatgttttggtgaatgttttgtgtgagtttgagaagaatgtgttttttgtttttgttggatgaaatattttgtaaatgttaattattttttttataaatttttaattttttaattagattatttatgagttgatattttttatttttattgtataagatgttgattttggtttaagattaaatgttattatgagggtggggtgttgtttttgtaatatttattttatttattagttgaagatttttgttgtattgtatgtaaaaaattaggttaagtatgataaagtaaattagttatattattgtagtaggaagagttgtagataaaaattttttagatatcgagttaaagaaggaaggggtttattcggtcgggagtatgggtaagatttttgttttaagagttgagtttttcgagtgagcgatttttgttttttttaagggtttataattttaagggggtttatgtgagagggtcgtgatggattgagtaagtagggggtatatgattgggggttgtatatattagtaattagaatagaatagaataggatagggatttttatagtgttttttttatgtaaataatttattaggttaggagtcgatttttaattattaggtttagggtgtggtattaggttatttgtttgtggattttatttttgttttttagtttttatattttttttttttggaggtagaaattaggtataagataatatgaggggtggtttttttttttattatgatttatttttagtaaaaatgggaaattggagaaagattatgttttaaaaattatagtatatttgttgttgtattttagttttgtttaatgttttttaatttttattattttttatagtttggattgaattttaattttttttggttataagtttttaaaataatattttaaatttttttttttttttttttttattttttttaatttggaattattgaaaattaagttgtgtttttataaagttttgtaaattggagttagataatttaaattttagaaaaaaataattatatatttatagacgtaagttatttttatatttatttgttgatgtgtgaatttcggaatattttggtttgtattttgattttttaggattgtttttttgtttgttgtgttttttttttttttttttattttttttttataggatatgagattttataattttttaaaaatgagtttttttaataatttcggatttatttttatagtaataaattattttagttaagagaaattagatgaaatttgagattagagatttatttttttttaaaatgttttgtttaaaatatttttaaaaagaaaagggaggaaatgtgaaaggaaaatattttggggttttaaaattatttagttaaagggaaaagttaagttggggaattgtttagggtaaatttgtttttcgttttatttaaaattatttttttgtttattgagataaatgtatttttgattgttttttttagagaggttaattagaaatttaaaataatgtaattatttgtgttttatatatttattatttggaagttttttttttatttcgagttgtttcgtttttttagattaaattaatgtttattttatatacgttgattgatgttttatgttttttaaaatgtataaaattaaattgtttttgattgttttgggtatatgtttttaggtttttttgaggttgtgttacgggttggtatttttaattttggtaaaataaattttttaaattaattgaaaaaaaaaaaaaagattttggttaggagtagtgatttaggtttgtaattttagtattttcggaggtggaggtaggaggtttatttgagtttcggagtttgagattagtttggataatatagttagatgttgtttttaaataaataaagaagattttgtttgtttttatagtgagattttgtttttaaataaataaataaaattttgtttgtttttaaatgtttttatggtaattgtagttgttaaatatttttgattaaatatatatatttgtaaatagatgagtgtaaaagagagttgtttttaggaaattaatatttaattttttggaaagatgtaataaaggtaagtattgcgtagaattagttaagagtgagatgattttatagaagattgagaaaataagttgaaataaatttatttttgtttaggattatgtttttatgtttttgtaggtggttttaaattattgttttttttaaagaaatagaaataggaaattatatattatttatttttgcgttttgagagaaagatagtgtgggattttagttagggggtttgtttttagtaaaaaggtttcggtttttaacgaatgattaggaaataacggtatatttatggggtgtaataattaatatagagaattatgatgttttgatgtttatttgtgtagttagagaataaaaaggggaagtgatttatttaagattatatagtagatatggataagagttaagtaaaagatattttttttttttttttttttttttttttttttttttttgagatagagttttattttgttgtttatgttggagtgtagtgttataattttggtttattgtaatttttattttttgggattaagtaattttttttttttagtttttcgagtagttgggattataggtgtttgttattatatttagttaattttttgtatttttagtagagacggggttttattatgttggttaggttggttttaaatttttgtgatttatttgttttggttttttaaagtgttgggattataggcgtgagttatcgtattcggttaaaagatattttttatgtatatatttttgtttttatggtattttttttaaaaattattatttttatttatttttttttgagacggagttttatttttgttgtttaagttgg

SEQ ID NO: 189 - DNA, 6948 bp, Artificial Sequence
  chemically treated genomic DNA (Homo sapiens)
tttttaggttggatgattgatgagaatattcgtttaatttttaaagaattagttaatgagtttattaggatggttcgagatttattacggtatttggttataaaggtgagtagggagtaggaggtgttaaggaaatttagaaaaaggaggagttggttggaattaggattttttttaataattatttatcgatatagagagagagtgggtttggaatagtttttgggttagagttttatggtttgataaataagaagttagaggaagtagagttggagttagaattagatttagatttagatttggaagtagaggaggataatttggtaattattatattgggtttcgtttttagtttattagttggaatatttaatcggttacgtggggtaagataatttttaattatttaatattttgtattttgagtttttataaattttatagatatttagattaattatttaaaggtttttatggtgaatgtagatttttttttttattttaattttttttttatttttttattttagagttagagttttttaagtttattatttggatatatgtttatgaattagggtaattttggggagttttgttaggtaagttttgttgttgagaggttgggttttaggattagattgatacgagtagtatggaagatattagaaatttttgaggtttaattagtgttttgtaaaaaagaaggtagtgagggtcgggcgagttggtttatatttgtaattttagtattttgggaggttagagagagtggattatttgaggttaggagtttgagattagtttggttaatatggtgaaatttcgtttttatttaaaatataaaaattagttgggtgtggtggtgtatatttgtaattatagttatttaggaggttgagataggagaatcgtttgaattcgggaggtagaggttgtagtgagttgagattgtattattgtattttagtttgggtgatagagtaagattttgttttttaaaaaaaaaaaaaaaaggttaggtgcggtggtttacgtttgtaattttagtattttgggaggtcgaggtgggcggattatgaggttaggagttcgagattagtttgattaatatggtaaaattttgtttgtattaaaaatataaaaattagttgtatatgatggtaggtgtttgtaattttagttattcgggaggttgaggtaggagaattatttgaatagggaagtagaggttgtagtgagttaagataatgttattgtattttagtttgggcgataagaataagattttattttaaaaaaaaaaaaaaaaaaaaaaaaaggtagtgaataatttaatatttttttaaataaattttttttttttttttattatgtaaatttttttgtattattttttgtttatttttttttttaggagtttgtagtttttgggagtagtgaacggtgttttcgtttagtttttttatatttaatgttacggggatgtttggtattagagttattagaggggtatgtaataggttttgaggttgagttttaggagaaagtgttaatgtgtaggagtcggagtaggagtcggagtttacggttacgcggagatagcgtttattatttttagcgttatagtttgttgatttttgttattttattttttttattcgggttagaggaagaggatgttaacggttatgttatgttagatatatattttaaaggtgtttgattttttttagggttttttttaattttttttcgaatttttttttcgggtttttttttttttttttttgattatatgtttttttgttttattaatttttttaaatttttttttatttttatgaagttttttatatatttagtttttttttttaatttttaggtatttttttttttcgggaaggtattttttttttagtgggttttagttttgttttgggtattgaagaagaagatgaagatgaggagtatgaatatatgaatcggaggagaaggtatagtttattttatttttttaggttaagtttttttgaggagttgggttatgagtatatggatgtggggttagattttagtgtttttttgggtagtatatagagttgtttattttattttgtatttattatgtttattgtaggtataattttagatgaagattatgaatatatgaatcggtaacgagatggaggtggttttgggggtgattatgtagttatgggggtttgtttagtatttgagtaagggtatgaagagatgagagttttttaggggtttggatattaggttttttatgtttattatgttcgtttaaaaattttacgtagtttagaggttatagattttgtttttgataattttgattattggtatagtaggtttttttttaaggttaatgtttagagaacgtaatttttgttttttgtggtatttagggagtatttaatggtagttagtgtttttagagggtatcgttttttttttatttttttttttttttaggttttagttttttttttttagttttagataattttatttaatttttggaggtttttaaatattttgatataaaatttttatggtatgtagttagttgtgtattttttttttttttttaattttaggaaaggttttttttattttgtgtgtttttttagttttattttttagtttttttataggtatttttggagatatgaaggattattttttatattttttttttttaggtttttgattatttggaattaggtttttatgtgtgtttttgttttttattagattgttaagaagaggaaagggaggaaatttagtagaggaaagtgtaattttggtttatgatttttaattttttagaaagatagaagtttaaaatttgtgaagaaagaggttaggagtagatattgattattattataatttagtatttaattatgagttaggtattatattaaattttatttatattattttatttagttttttattatttttaaaataattttgtgatatatatattattttattttatataaagggaagtcgggtatggtggtttatgtttgtaattttagtattttgggaggttgaggtagaaggattatttgaggtaaggagtttgagattagtttagttaatatagtaagatttttatttttttaaaaaaaaaaaaaaaaaaaaaaaaaaaattttagaattgggtgtagtggtttatgtttgtaattttagttagtattttgggaggttgagatgggaagattatttgagtttagaattagagataagtttatggaaatatagtaagatattgtttttataggggaaaaaaaaaaaagaaattgagttttaaagagatgaaataaattaagtagtagatttaggatgtaaaatttttttaatttttgtgtatgtgtttttattgtaaggtgttaagaaaaattgatttaagttatagtttttgtttaaggggtattgttttttgtttttgtattgaattaagtttaattttaatagttatatttttttatatttagatattttattttaggaagtggtggtgggggtagttagaaggaaaaataattggatatttttgtgtaaattataatttatatgtgtcgtaaatgatttttattttttattcgagggtaaatttataaggatttttaagatttatttttagaagttatttttatttagtagtgagaagtttttaggtaggatagaaaaaagatttagttttagttgtatatttttgtttttttggatggggaattaagggaaaacgtttgttgtattattgaagttttttgttttgtttttatacgtgtttgaataaaaatgttaaagtttttttttagttttttgtttgttaaatgaagatatttcgtatgttagataagagatttgttttttagtagtggatatttatttttttgtgttttgatagtgttattttgttttatgtagttttttttagttttattattatttttatttttttagaataattatagcgtatagttttttttattaagggttttagtaggaatttataaggtaattaattgggaataataaaaagaatttacgtgttttaggatttataaaaagttttataagtttttttttagaggttaaatattgaaatttttagatgtttttgaatttattattttagaaaagttattaaatttttttatttttttacggtaagaatttttaataaatatgtttttttgaatattttttttaggtgttttatttaggtgtttgttattggaataataaagttatgttattttattaggagttcggtttttagattgcgaggtttttaaatggatgattttttcggtgtttggttgtttagttagttttcgttattagtatttttggtttttttttatttgtttgtttttttttgtttttttagtttcggaggacgattggatcggttgggcgggtttcgttagtcgatttagggattcgaagaagggcgtatttagttttttcgatttaggtgtagatattgtttattcgttgcggttttattttattttatttttgttcgttcgattttaaatttattttttcgtcgtagtttcgtttttttttttttagttcgtttttttttgttattggttttcgtttagcgttttcggtggaagtggttttttcgggagagattacgtttttttttaagttttttaacggtttcgttttttcgtcggagtttgattttttttagagtgttcggcgatttcggcgtgcgaggtttttggagggtaaggttttagggtttggtttaggagcgcgagaggtaggttgggaattgtagttcgaaggttttcgagagcggttagagtttggcggtcgagaggattagttgttttagcgtgttttgcgttttagttcgcgcgttcgtagtttttcgttttcgtttgtttgttcgtttttttgtttgttcgcgttttcgttcgtttttttttcgaggatcgaggggattttgattatagtttgtggttgggaagggagatagaggcggcggcggtttaggggaaacgaggttgtagtggtggtagtaggaagatgtcgggcgaggacgagtaataggagtaaattatcgttgaggatttggtcgtgattaagtataagatggggggcgatatcgttaatagtgagtgcggtttcgggggtcggggaattaaggttgatagggaaaggtaataggttggttcggaaggggttggagcggaggggttatgcggattgagttattgaggggttcgtatcggttcgttgggtacggcgtggtgggaagattcggtgtcgcgtttgggatttgagcgggtaggtttaggttgaagtttatggaggtgcgggtcggcgattaggatgagcgtagagaggggattttggtaggtttcgattcgaggtcgtttgttaggaggtaagacgtgtttttttttgtttttattttttattttcgattattgttttttttgattttggtagcggcgaggttatttcgaaaaggaagcgtttagttattggcgatagaagtgtttttttgtttttgtagcgttttcggggcgttaggagttaagtcggtacgtgttgttgggttttattgcggatggttggttttttttttatttcgttagtgtttttgatattagtttttttattattagtttttttattacgtgttttgttggagtttttttttttttattttagtttttattttggtgggggtttttttttattttgggttagttaaggagatcgttggagagtatttttggagtttttaatgtaagttttggagatatatatggttttttttgaagttatttattattattatttttttaatttgtgtagatagttttagttagtatttatatttgttgtttttagtgatttgataatttaaatgttttggggttttcgttttattttaattaggtaagtttgtgaatattattggaaaagggaggattgattttaggatttttataagttatttttattttaggtgtgttttgacgattttagtagttgtttgttattttaggtagatgttatttttttttttttttttttttagttagtttttttattttattttagttagggagatataaattgtttgttattgtgtttttaaatggttttaatagtaaagatggtggggaataggtatttaggatgtttttcgttttgtgggtgaaaatttgagttttattagtttttaaagaattattaaaattgagatattaaaagttaaatttgtgttttatattatagtggatatttagtatcgtattttggtttttggtgttttttagtatttgagatattagtggtttgaattagaaaattttttatagtttataattttggttttatattttttttagataagttatgatttttcgaaatgaaatttagggattttagattaagtttttttggtttatgtatttgtttatgaggaaataagtttatatagattgagatttttaatatttaattagagtgtttgagaaaggaatgcggtaatatttaatagtgtatcggtttcgagttagtaattttgtttatttttttgtttttgatgtttataaattttatttagtttttgcgtgtatgtggggatattatggtaagaattttttgaagtttataattttgttttgttatattaaaggtagtatttttggaaagtttgaggttttgtttagggagatggattgtatatatttagttgttatataatgtaaggaagagaagggaatgttgattttttagttttagggtaatggtattagggagtattatggaaatttttaaatttaatttttaggtattttttgggtggtaattagataatgaatatatataaggttgatatgatgggattttgtttttagg

SEQ ID NO: 190 - DNA, 6948 bp, Artificial Sequence
  chemically treated genomic DNA (Homo sapiens)
tttgaggatagaattttattatgttagttttgtatgtatttattgtttagttattatttaaggaatatttggaagttgaatttaagagtttttataatattttttggtgttattgttttgaggttgaaaggttaatattttttttttttttttatattatgtgataattgggtatatataatttatttttttaggtaaggttttagattttttaaagatgttatttttggtgtgataggatagagttatgaattttagagggtttttgttatggtatttttatatatacgtaaagattagatgaaatttataggtattagggataagaaggtagatagaattgttgattcgaagtcgatgtattgttaaatgttatcgtattttttttttagatattttaattaggtgttaggaattttaatttatatagatttatttttttataaataagtgtataagttaaggaaatttaatttaaggtttttgggttttatttcgggggattatggtttatttaaaagaaatatgaggttaaagttataaattgtaagagattttttgatttaaattattagtattttaaatattaaaaggtattaaaaattagggtacgatattaaatgtttattgtgatataaagtataggtttgatttttggtattttagttttggtgattttttgaaagttggtaaaatttagatttttatttataggacgggaggtattttaaatatttgttttttattatttttgttgttaaaattatttaaaagtataatgataagtagtttgtatttttttaattggaataaaatggaaaggttaattggaaagagagaaaagagaaagtggtatttgtttagagtgataggtaattgttgagatcgttagagtatatttggagtaaggatgatttgtgaaaattttaaaattagtttttttttttttagtaatgtttataagtttgtttagttgggataagacggagattttaaaatatttgagttgttaagttattgagaataataaatgtgaatgttaattaagattatttgtatagattggaaaggtggtagtaatgagtaattttaagaaaagttatatatatttttaagatttgtattagaagttttaggagtgttttttaacggtttttttagttggtttaaggtagaagggggtttttattagggtaagagttgaagtaaagaaggaaaggttttagtaaagtacgtggtggggaagttggtggtggggaagttggtgttagggatattagcggagtaagaagggggttagttattcgtaatgggatttagtaatacgtgtcggtttggtttttgacgtttcggagacgttataaaaatagaggggtatttttgtcgttaatagttgggcgtttttttttcgaggtggtttcgtcgttgttagaattagaggaagtaataatcgggaatgaaggataggaataagagaaaatacgttttgttttttaataaacggtttcgggtcggagtttgttagggttttttttttgcgtttattttggtcgtcgattcgtatttttatagattttagtttgggtttgttcgtttaggttttaggcgcgatatcgggtttttttattacgtcgtgtttagcggatcggtgcgggttttttagtagtttagttcgtatgattttttcgttttagtttttttcgggttagtttgttatttttttttattagttttgatttttcgattttcgaggtcgtatttattgttggcgatgtcgttttttattttatatttggttacgattaggtttttagcgatagtttgtttttgttgttcgttttcgttcgatatttttttattattattattgtagtttcgttttttttgagtcgtcgtcgtttttgtttttttttttagttataggttgtggttagagttttttcgattttcgaggagagggcgagcgaaagcgcgagtaagtaagggagcgggtaggtaggcgagagcgagaagttgcgagcgcgcgggttgaggcgtagggtacgttgggataattagttttttcggtcgttagattttagtcgttttcgagggttttcgaattataatttttagtttgtttttcgcgtttttaagttaggttttggggttttgttttttaagggtttcgtacgtcggaatcgtcgggtattttgggaagggttaggtttcggcgggaaggcggagtcgttggggagtttgaggggaagcgtggtttttttcggaaaaattatttttatcgagaacgttgagcgagagttagtaatagagaggggcgggttgaggggagaggggcggagttacggcggggaaataggtttaaagtcgagcgggtaggggtggagtagagtggagtcgtagcgggtgggtagtgtttatatttaggtcggggaggttgggtgcgttttttttcggatttttgggtcggttggcgaaattcgtttagtcggtttagtcgtttttcgaagttgggagaatagggaggggtagataggtggaagaagattaagggtgttggtaacgggggttaattgggtagttagatatcggagggattatttatttaaaggtttcgtaatttagaggtcggatttttaatgaagtaatatgattttattgttttaataataggtatttggatggagtatttaagggaagtgtttagaaagatatgtttgttgagagtttttatcgtgaaaaaataaaaagatttgatgatttttttaagataatgaatttagaagtatttggaggttttagtgtttggtttttgaaggagggtttatagggttttttataagttttaaagtacgtaggttttttttgttatttttaattggttgttttgtagatttttattaaaatttttaatgaaaaggattatgcgttatggttgttttaaagaaatagaagtaatagtaggattagagaaagttgtatgggatagagtagtattgttagaatatagaaaggtgagtatttattgttgaggagtagattttttatttaatatacgaaatgtttttatttgatagataggaagttgaaaaaaaattttggtatttttatttagatacgtataaaaataaaataaaaaattttagtgatataatagacgtttttttttagttttttatttaaggggatagaggtgtgtagttgaagttggattttttttttgttttatttggaagttttttattgttggatgagaatggtttttaaaagtggattttggggatttttgtgaatttgttttcggataaggagtgaagattatttacggtatatgtggattatggtttatataaagatgtttagttatttttttttttgattatttttattattattttttgagatgagatgtttaggtataggaggatgtggttgttggggttagatttgatttagtgtaaaaataagaaatagtgttttttaaataagggttgtaatttaaattagttttttttggtattttataataagagtatatgtataggaattgggaggattttgtattttggatttattgtttaatttattttatttttttaaggtttagtttttttttttttttttttttgtagagatagtgttttgttatgtttttataggtttatttttaattttgggtttaagtgatttttttattttagttttttaaagtgttggttgggattataggtatgagttattgtatttagttttaaagttttttttttttttttttttttttttttaaagagatgggggttttattatgttggttaagttggttttaaattttttgttttaggtaatttttttgttttagttttttaaagtgttgagattataggtatgagttattatgttcgatttttttttgtgtaaaatgagataatatgtatgttatagaattgttttaaggatgataaaggattaagtgagataatgtaggtgaagtttagtatgatgtttggtttatagttaagtgttgaattatgatagtaattaatatttatttttaatttttttttttatagattttaagtttttgtttttttagggggttaagagttataaattaaaattatatttttttttgttaggtttttttttttttttttttttgatagtttgatgggaaataaaggtatatataagagtttagttttaagtagttaagagtttgagaggaagggatatggagagtaattttttatatttttaggagtgtttgtgaagaagttgaggaatgggattgggaaagtatataaaataaggaaaattttttttggggttgggaaagagaagaaagtgtatagttggttatatattataagaattttgtgttaaaatgtttaaaagtttttaaagattgaatggaattgtttgggattggggaaaaggggttgggatttgggagagagagggaatagggagaagacggtattttttaaaggtattagttgttattaaatgttttttgagtgttatagggagtaggagttacgttttttgggtattagttttggggaaaagtttgttatgttagtaattagggttattaaaggtagagtttgtagtttttaagttacgtagagtttttaggcgggtataatggatatggggggtttgatgtttaggtttttgaaaagtttttatttttttatatttttgtttagatgttgggtaggtttttatggttgtataattatttttaggattatttttatttcgttgtcgatttatatatttatagtttttatttggagttgtgtttgtagtgggtatgatgggtatagggtggagtgggtaattttgtgtgttgtttagagaggtattgaggtttgattttatatttatgtatttataatttagttttttaagggaatttggtttagggggatgaggtggattgtgttttttttttcggtttatgtatttatattttttatttttatttttttttttagtatttaggatagaattgagatttattgaagaaagggtgttttttcgggaggagggagtatttgggggttgagaagaaaggttaggtatgtgaagaattttatgagggtaggggaaagtttgaaaaaattaataggatagagaggtatatgattagagaagaaaaaagaggagttcggggaaagaattcgaggaaaaattgaggaaagttttaggaagagttaggtatttttgaggtgtgtatttggtatgatataatcgttgatattttttttttttaattcgggtggggagagtggggtaataggagttagtagattgtggcgttgggaatggtaggcgttattttcgcgtggtcgtgggtttcggtttttgtttcggtttttatatattgatatttttttttggagtttagttttagagtttgttatatgtttttttgatgattttgatgttaggtattttcgtggtattgggtgtagagagattggacgggggtatcgtttattgtttttagaaattgtagatttttaaggaagaaaataaatagaaaataatgtaaggaaatttatatgatgaggaaagaagagagatttgtttagaaggatattgggttgtttattgtttttttttttttttttttttttttttgaggtggagttttgtttttgtcgtttaggttggagtgtagtggtattattttggtttattgtagtttttgtttttttgtttaagtgatttttttgttttagtttttcgagtagttgggattataggtatttgttattatgtgtagttagtttttgtatttttagtatagatagggttttgttatgttggttaggttggtttcgaatttttgattttatgattcgtttatttcggttttttaaagtgttaggattataggcgtgagttatcgtatttggttttttttttttttttttaagagatagggttttgttttgttatttaggttggagtgtagtggtataattttagtttattgtaatttttgtttttcgggtttaagcgatttttttgttttagttttttgagtagttgtgattataggtgtgtattattatatttagttaatttttgtattttgggtagagacggggttttattatgttggttaggttggttttaaatttttaattttaggtgatttattttttttggttttttaaagtgttgggattataggtgtgagttaattcgttcggtttttattgtttttttttttgtaggatattgattaaattttagaggtttttaatgttttttatattattcgtattaatttgattttaaaatttagttttttagtaatagaatttatttggtaagattttttaagattattttggtttatgggtatgtatttagatgatggatttaaaaggttttggttttaggatgaaaaaataaggaaaaggttaagatgaagggagaaatttatatttattatgggggtttttgagtagttaatttgggtatttgtagggtttgtgagggtttagggtgtaaagtgttgggtaattagaagttgttttattttacgtggtcgattaagtgttttaattggtaggttgagggcggagtttagtgtggtggttgttaggttgtttttttttgtttttaagtttaggtttaggtttagttttggttttagttttattttttttagttttttgtttgttagattatggggttttggtttaggggttattttaggtttattttttttttatatcgataggtgattgttagggggaattttggttttagttaattttttttttttttaaatttttttagtattttttattttttatttatttttatgattagatatcgtggtgggtttcgggttattttggtgaatttattggttagttttttaaaggttgggcgaatgtttttattaattatttaatttggaga

SEQ ID NO: 191 - DNA, 6351 bp, Artificial Sequence
  chemically treated genomic DNA (Homo sapiens)
tttttagattttaggagttagtgtatttagtgagggtgagggttttgtttttttggggatttatgagttatttgcgtgtattagatggatatatttaagttgtttacggttttggggttgagagggaggttagtaagggggtaaggagaggttgaatgggtagtgttttgaagtttttattttttgggattttggtagatttcggtggttatagtttggtttagtaagatagttttaagaatttagggagggaatgtggtttaaggtttttgttggttttttgtttatttagaaagttattatattgagtgtttaggaggtagggggatagtttttattttgtgtttttttggttttttagttataggtataaggatttacgtgttttgtttagggtatgtatgggtggaaggatattgagttggggattaggagttttgtattttagttttttttagttttatcgtgaattttagataagttttttttattttttgggttttagtgtttatgttagtagaagggatatattttagggttttgacgtttaagatgattgtgtgagcgtttggggtatgtgtgttgtttttttattattttttatttttattttataattttgtttggggagtttgggagtgggggtagagttaggagcgtgggagagttagatgtggtggtcgttgttttgtttgagtgagggttgagcggttttttgggaatttttttatttaggtttttttttcggttttttttttttgttttattgagagtagtaattttcggttttgataagcgtgggtgggggaggggggttttagtacgggggtttgtttagtttggtttttttttttggggaagagtatgggtttatgagtttagatagaaagtttcggttttagttttagtttgtggttgatatattataaggttttgtataagtttttttttattattggttttagttatatcggttgtgtaatgagtatgttggtgagtttttttttagttttgatggtggatttttatgatagtagtttttggtaatatttgaggattagttatttttttttttttttttgagatggagttttatttttgttgtttagattggagtgtaatggcgttattttagtttattataacgtttgtttttcgggtttaagtaattttttggttttagtttttcgagtagttgggattataggtatgtattattatatttagttaattttgtatttttagtggagattgggtttttttatgttggttaggttggttttaaatttttgattttaggtgatttatttattttggttttttaaagtgttgggattatagacgtgagttatcgcgtttagttggattagttattttttgtggtatttttttgttttgttcgaggtttgataaaatgtttgtgggtatggtttatttaggtttttttataattttgtgaggtaggtatatgtgtttttattttatagttgaaggtattgaggtttagagagtttaggttatattattttttagcgttatatggttgggaagtggtggagttgggttggagttgttaatattagagtttagatatttaatttttgagtgtgttatcgtgttgtgggggaaggtagtgtggaattttaaggtttagagttttttttttttattgtattttattttagtttattttaggtagggttttttatattttatgttttgtttatttatttttagtttaggtttttttaagatagtattgtttaaggttggattgggtttttagtatttgtgtaggtgtgaggatgtttatagtttgttttgtttatagtggggttgggggttatgttgattattttagggtgatggtgttgtattgtttatgtgtttcgtttattgtcgttgaaggtagagtgtataaggggaatttaagatttagaaaagggaggtttcgtttaggaagatatagtgatggaatgttgttcgaatgaggaaatttattattttagtaatagtgtatatttagtatatttcgaggtaatgtattaagttttttgtataaatcgaagagttttatgaattagtttttgatttgtttttattttttagaggaggaaattaaggttaggagtttaagtgatttgtttaagtttatgtagtttgaaattggagtagttgggattcgaatttagttttatttttagttttttaattttttttgttaattatgataattttgttttttggtgagtgttttgggttgttttttgtagttttgtattttttatttatattttagttgagaggaggagtgatagttttggtgtttattaagggttaatggtagtaggggttaagtaattttagatgggttttaggacggttgggttggtcggaaattggaggtcgttagttttttaggggagttatcgttaattgttttttttttttgtgttgtatttttggttttagttgtatttttgttttagggtttattagtttttttttttttgttagagtttagttttaagggaaattgtagacggattattttaagggttttgtagtatagtgagtttataattgttatgtataaatagggaaatcgaggtttaggtagggtaagggatttatttaagtttttttgataagtttgtggttgggttttttgatttttagattagtttttttggggattagggggttggtgtgtttcgtggttttttttaggttggtttggttgtagagggttagttaaggatttagaggtgaatggtttaggtagatgttaggaggggagtcgtaaatttttgacggaatttttgggtataagaaatttttgtgtaagtttgattttgtggtttgtgggatttttttatatttttttatttttttgttgttataaagatttggttaggttttttttttcggggtatttttatggtttttaattcgtggttgggaattagtttgagaatatttttttttttatgtggtttagtttagatgttttgttgggtaatttcgattgggattagattaagaaatgtaagatagttgattgtggtgggtatggaattttagtttacgtaaattttttgttttgtgaataggggtttgggggaagttgaggaggaaagatttagcggcgtagagggaaggagggtagagttagtttttatttgtgttatttgggatagttttttttattttttggaatttagttgttttgtgggtgtagtagtgggagtaggggtggtaagtttattttatatgtttttttaaaataatgttttttgttatttgagggttaggagtttgtaattggagatgttttttgatttgagaagttgagggtggaagaagagatttagttgggggaattggaggagttttggtagattttggtaggaaaggagagttagagaatggaaatggaataaaacggatatttgaaagtattttgttgaggttgggtgcggtggtttaagtttgtaattttagtattttgggaggttgaggtgggtggattatgaagttaggggtttgagattagtttggttaatatagtgaaattcggtttttataaaaaatataaaaatagttaggtgtggtggtgtgcgtttgtaattttagttatttgggagtttgaggtaggagagttatttgaatttgggaggcggaggttgtagtgagtttagattgcgttattgtattttagtttgggagatagagtaagattttattttaaaaaaaaaaaaaaaaaaaaaaagaaagtattttgttgagtgattgaatgaaagagttatagggggaatttaggaagaaagtagggtagggggtttatttatattggaataggggtttcgggtgggggttagatgatttgtgttttttttattatgtgttttatgagatttagttttgttttagttttgttattgttgcgtaagtttgggaagtttattttgtttttttgggttttagtgtttttatttataaaatggggtaaataattttttttttgtattttaggggttttgagacgtgaaaaggaatgtatttgttaatatttagagatatttaatttgtgttggatgattttgattaaattatattttttttttgtgttaatttatttttgggttttggtttgtttttttgaaaaacggttgattattttggaggatttttttattttttttatgttatttttttttagtagtgttttttgatttttttaggttttcgttaggggtttttttaaatgtatttttagttttttgtttgtcgatcgggtatttgtttgtttaatgaatattttgtttattagtttggtgtttttgaggttaggattacgttttgttattgttttttgtatttagtatagtgttagaatgtagtaaatgtttagtatgtttgtttaatgaatgaaggttgattgaattaattatagagatgattagagttttttttatagatggggaaattgaggtattgagaaatgatttttttgggtgttatggtaaggggaggtcgttattcgatatgggtatcgggaaagtggggtcgaggttattttttgataaaagtgatttagtagttggcggttggcgtgggttgtggaatttttaagtatttttttatattttgagcgaacgggcgatgggagggagtaagtagagtgaaaagaagaaaaataagaaatttgggggaaaagaaagagagagggggaaaaaaattgaaattgaaaatagacgtacgcgtttattttttttgtttcgtcgttttttttttttttagttgggttaattagaagttattttgtagttttttttttaaagtggcgggggaagtgggggggtatggaagtttatagtggtgtgagtttttgaggttgttagtagttagtagtgattgttcgttttatttgggatttaggatcgttttgtgagtaatttggagttagagaggagattaataaggaggaggagagagtcggttttttagttttgttgtttagtagtagtttgtgttcgttttgtttaacgtagatagttagatttagggcggtttttttggcggttttgtttttttcgaaggatgtttggggagtgaggcgaagttgggtcgttttttttttttatagtagttttttttttttatttttttgtttttttgagtttttaggagtttgtattagttttgtttgtttttttatttagttgttatttattttgggattagtagtttttttgataattgggagagggtagtaaggaggattttttggagggggtgattgtttagagtttggaattgtgtttatattagaagttattagtagtaaggtaagtgttggaaaaagtgggaattttagttttatgttttgtttttttgttttaatttgtattttttcgagtaggtaaaaaaaaaaaaaaaaaaaaaaagggaagatatttttaataaaataagatgagaggaggttgggagattgtgggtgatgttagggatggaggagttagttttttttttttttttgttttggggtgagtggtttttattttattatttttgttgtttttgtttttattaaataatttttaggggtttttgggtgttgattgggggtttttaaagtatagtatagttaatggggagtggggagagttgggaagagcgggagaggggaattgggagaaggtaggtagggtatatagaaagtaggggattggggattttaggattatagtcgttgttttttggtttaagttttgtttttaagaattagtttggttttaggttagttagtcgttaggtaatttttggggatttaaatggatttgtaaattttttagatttttaagatatttttttaaatttttagtagttagaaaagtttgagggttaggaaagttcgagggtgatgggcggttatggtaattttttagcggttatgttgttgggtttgggggttgggatttggttgttagatttgggggtttttttgtgaagaaggggttagttattgggttattttttttggttttaggtagttgtttaggttttttcgttgtttttttttttttggattttattttttttttatgttattttaaagtataaatttaattatattatttttttgtttaggattcgtttatggttttttagtgtttggagaaagttttagtttttaatagaggttgttattgtttgatatttattgtacgtcgtaattgtgttgagtgttttatgagattgattttatgtaatgtttattagtaattttagaggtagtgattgtttttattttcgttttatatatgaggaatttgaggtttacgtagt

SEQ ID NO: 192 - DNA, 6351 bp, Artificial Sequence
  chemically treated genomic DNA (Homo sapiens)
gttgcgtgagttttaagttttttatgtataaaacggaggtaaaaatagttattgtttttggggttgttggtgagtattatatgagattagttttataaagtatttagtatagttgcggcgtgtagtaagtgttaagtagtggtagtttttgttaggagttgggattttttttaggtattggggagttataggcggattttgggtagggaggtggtgtgattggatttatgttttagaatggtatggagaaggggtagagtttagaaggagggagataacgaggaggtttgagtagttgtttgggattaaaggaaatggtttagtggttgattttttttttatagaggagtttttagatttgatagttaggttttagtttttagatttagtagtatgatcgttagggggttgttatggtcgtttattattttcgaatttttttagtttttaaatttttttagttgttgggggtttagaaggatattttaagaatttagaaaatttgtaaatttatttaaatttttagaggttgtttggcggttgattggtttaaagttagattgatttttagaaataaggtttgggttaaggaatagcggttatggttttgaggtttttagttttttgttttttgtgtattttgtttatttttttttaatttttttttttcgttttttttagttttttttattttttattgattgtgttgtgttttggaggtttttagttagtatttagaaatttttgaggattgtttgatgaaggtaggagtagtagggatgatgaggtggaggttatttattttagagtaggggaaaggagaaaattggtttttttatttttgatattatttatagttttttagtttttttttattttgttttgttaaaaatattttttttttttttttttttttttttttttatttattcgaagagatgtaggttagggtaaagggatagggtatggggttggggtttttattttttttagtatttattttgttgttgatggtttttggtgtgggtatagttttaggttttggatagttattttttttaggaagttttttttattgtttttttttagttattagaaagattgttggttttagagtgggtaatagttgagtagaaggataggtaggattggtgtaggtttttgaaggtttaggagaatagagggatggaggaagggggttgttgtaggggagaggagcggtttagtttcgttttattttttaagtatttttcgggaggagtagagtcgttagaggggtcgttttgggtttggttgtttgcgttgggtagggcgagtataggttgttgttgggtagtagggttgaggggtcggttttttttttttttttgttgattttttttttggttttaagttgtttatagagcgattttgggttttagatagggcgggtagttattgttggttgttggtagttttaggagtttatattattatgggtttttatgtttttttatttttttcgttattttgggggaaaggttgtagggtggtttttgattggtttagttgggagaagggggggcggcggggtagggagggtggacgcgtgcgtttgtttttaattttagtttttttttttttttttttttttttttttttaagttttttgttttttttttttttattttgtttatttttttttatcgttcgttcgtttaggatgtgaggggatgtttagaaattttatagtttacgttagtcgttagttgttgagttatttttgttaaagagtggtttcggttttattttttcgatgtttatgtcgggtggcggtttttttttgttatggtatttagggagattattttttagtgttttagtttttttatttgtaaaggagattttgattatttttgtggttgatttagttaatttttatttattgaataagtatattgagtatttattatattttaatattgtattgggtgtaggggatagtagtaagacgtggttttgattttagaagtattaggttagtgagtaagatatttattgggtaagtaggtgttcggtcggtagataggaggttgagagtgtatttagaaggatttttaacggaagtttgagagaattagagagtattgttgagaagaggtgatatggaggagatggaaagattttttaagatgattagtcgttttttagaaggataaattaaggtttaggggtgaattggtatagagagggaatgtgatttggttaaggttatttagtatagattggatatttttggatattgatagatatatttttttttacgttttaaagtttttggggtgtaaggagaggattatttgttttattttatagatggggatattgaggtttagaggagtaaaataagttttttaagtttacgtagtaatggtagagttggggtagaattaggttttatgagatatatgatggaagagatataagttatttgatttttattcgagatttttattttagtgtagatgaattttttgttttgttttttttttaggttttttttgtggtttttttatttagttatttaataagatattttttttttttttttttttttttttttgagatggagttttgttttgttttttaggttggagtgtaatggcgtagtttaggtttattgtaattttcgttttttaggtttaagtgatttttttgttttagatttttaagtagttgggattataggcgtatattattatatttggttatttttgtattttttgtagagatcgggttttattatgttggttaggttggttttaaatttttgattttatgatttatttattttagttttttaaagtgttgggattataggtttgagttatcgtatttagttttaataagatatttttaagtattcgttttgttttatttttattttttggttttttttttttattagggtttgttaagatttttttagtttttttagttgggtttttttttttatttttagttttttagattagaagatatttttagttatagatttttagtttttagatggtaaagggtattattttagaagggtatatagagtgggtttattatttttgtttttattattgtatttatagggtaattgaattttagagggtgaagaaagttgttttaggtgatataggtagaggttggttttgttttttttttttttgcgtcgttaagttttttttttttagttttttttagatttttgtttatagagtagaggatttgcgtgagttgggattttatgtttattatagttaattattttgtattttttggtttagttttaatcgggattgtttagtagagtatttgggttggattatatagaaggagaagtgtttttagattggtttttagttacgggttggggattataagagtatttcgagagagggggtttggttaggtttttgtggtaatagggaaataggggaatgtgaaaagattttataggttataaggttaggtttgtatagggattttttgtgtttaaagatttcgttagaaatttacgattttttttttagtatttgtttgggttatttatttttgaatttttggttgattttttgtagttaggttagtttgggggaggttacgagatatattaattttttagtttttaaagaagttagtttgggagttagaagatttagttatagatttattaggagaatttgaataagttttttgttttgtttgagtttcggtttttttatttgtatataatagttgtggatttattgtgttataaggtttttgggatggttcgtttgtaattttttttagagttggattttagtaagggagaggaggttggtgggttttagggtaggggtatagttggggttagagatgtagtataaaggggaggggtagttggcggtggtttttttgggaagttggcggtttttagttttcggttagtttagtcgttttgaggtttatttggaattatttagtttttattgttattaatttttggtgggtattaggattgttatttttttttttaattgagatatgggtgggaggtgtagagttatagggagtaatttagggtatttattaaggggtaaaattgttatgattgatagaggaggttggagagttagagatagagttgggttcgaattttagttgttttagttttaagttatatgagtttaggtaagttatttaaatttttggttttggtttttttttttggaaaatggagataagttaaagattgatttataagatttttcggtttgtataaaggatttagtatattgtttcgaagtgtattaagtgtatattattattgaaatagtgagtttttttattcgagtagtattttattattgtgtttttttgggcggagttttttttttttgggttttggattttttttgtgtattttgtttttagcggtaatggacggggtatatgggtagtgtagtattattattttggggtggttagtatggtttttagttttattgtggataggataagttatgaatatttttatatttatatagatattgggaatttagtttagttttggataatgttgttttggggaagtttgggttgagagtaggtgggtagagtatggaatgtggggagttttgtttgaagtggattgggatggggtatagtgggagaggggggttttgggttttagggttttatattgtttttttttatagtacggtggtatatttaagagttaaatgtttggattttgatgttggtagttttaatttagttttattattttttagttatgtgacgttgggagatgatatgatttgagttttttgagttttagtatttttaattgtgaaatggggatatatgtgtttattttatagggttgtggagagatttgaataagttatgtttataggtattttgttaagtttcgagtaaaataagaaagtgttataaaaggtgattgatttagttgggcgcggtggtttacgtttataattttagtattttgggaggttaaggtgggtggattatttgaggttaggagtttgagattagtttggttaatatggagaaatttagtttttattaaaaatataaaattagttgggtgtggtggtgtatgtttgtaattttagttattcgggaggttgaggttagagaattgtttgaattcgggaggtagacgttgtggtgagttgagatggcgttattgtattttagtttgggtaataagagtgaaattttattttaaaaaaaaaaaaaaaggtgattgatttttaggtgttattaagagttgttgttatagaagtttattattagggttggagggaagtttattaatatgtttattatatagtcggtatgattgaggttagtgatggaaaggaatttgtgtaaggttttgtgatgtgttagttatagattgggattggaatcgaggttttttgtttagatttataagtttatgtttttttttagaggagggaattaggttgaatagattttcgtgttaagattttttttttttatttacgtttgttagagtcggaagttgttgtttttagtggggtagggggagggaatcggaaagggagtttgagtgggagaatttttaggaggtcgtttagtttttatttaggtagggtagcggttattatatttggtttttttacgtttttggttttgtttttatttttaggttttttaggtagagttgtggggtgggggtggggggtgatgaggaagtagtatatatattttaggcgtttatatagttattttagacgttaggattttaagatatgttttttttgttggtatggatattgaggtttagagagtggaggggatttgtttgaggtttacggtggggttgagggaagttagaatataggatttttgatttttagtttagtgtttttttatttatgtatgttttgagtagagtacgtagatttttgtgtttgtggttggggagttagagaggtatagagtgggaattgtttttttattttttggatatttagtgtagtggttttttgagtgggtaaaagattagtaggggttttgggttatattttttttttagatttttaggattgttttattgagttagattgtagttatcgaggtttgttagggttttaggagataaaggttttaagatattgtttatttagtttttttttgtttttttgttggttttttttttagttttaggatcgtgggtaatttgagtgtgtttatttggtatacgtagatggtttatagatttttagaagagtagggtttttatttttattgaatatattggtttttaaggtttggaga

SEQ ID NO: 193 - DNA, 7037 bp, Artificial Sequence
  chemically treated genomic DNA (Homo sapiens)
ttatggtattgtagtaggggaattttttttttttttttgtgttttttttgtatataggttttttacggcgattaataaatagtttttagtttgtatgtagttgtatttgtttttatttattttttagtttttattaattttaggttaatggatgatgatattatttagttaatatttaggtaggatgaagttaggtttggggatttgcgggtttgagggtaaagattgatggaggtggttaggtgtagtggtttatatttgtaattttagtattttgggaggttaaggtatgtagattatttgaggttaggagtttaagattagtttggttaatatggtgaaattttgtgtttattaaaaatataaaagttagttgggcgtagtggcgtatgtttataattttagttatttgggaggttgaagtaggagaattatttgaatttaggaggtagaggttgtagtgagtcgagatcgtgttattgtattttagtttgaacgatagagtaagattttgttttaaagaaaaataaaaagattgatggaggtgatattggtttttgtttttaggaatttttttatttaagggttagttatagagatttagaatagaagatgaggggtaagttttgggagatttggatgaaatttagaacgtttttttggaggatagcgtgttgattttggggagggacgagtaggtagaggtggtagtgtgtagggtcgggaagaggtaaaagttatttagttgtaggaataggtagttttggtaggttgtggagggaggttgggtgtaagggtggagagaggagagtttttagtcgggttgaatttaggtaagagtttgtttttttgttttggtttttttataattattattagacgttaataagagattagaaggtaaattattgatttaaggttgtagagattgaattgttataaggtttagtttttaggagttgagagttttggttttttagaagttttttgggagtgtttgagcgtttggtttatatggtaatagtacgtggattaagttttcgttttgttttttgttatgttttgggtttttaaagtagtttttttttttgttttcggtttgttttttttatataggtttggggaatggagtaaggttgttttttttgtgatttggaatgtggtttaggtttttttgttaattttttttaaggttgtgaattttggtaagattttattggaggttggaaattgttatttagagaagcgtagaggtagaagttaggttagatatgtttagagtttatagatttaggttgttttgggagatttatttgatgtttgggtgttttttagtttttttgtggtggtagttgtttgttttatttttttttattagcgtttagtttataatagggttttgggtttaatgttcgtttttttttttttttttattttttgtgtcgggatttgtttttttttagggtgattgataatggaatgtttatttttttaaggaaaattttagtttttattcggagttgttaagtttttagaatttagtgaatggagattatattttattttttagaatttgggatttagttttttgggtataatatgtgtgggttgttaaagttcggtttagttttgtttttatagttattttttgtttaagataggggtgttgatatatttttttggttagttttatagattttttagttttttgtgagttattgtttgaggaagattttttttatatatatatatatttttgaggataggttatttttagaattagcgtgagttatatattatgaaagaaatataattggtagagatatagtaatgtttattgtaaaagaattttttgtaatgttaagttttttgagttttttggagagtttttttttattaatttatattgtatatatagtgggagatttgggaatcggtgggggtgtagtttatttcggtattatttaattaaatttgattatgatgtattatattatattattgttgttagtattttgtagtaggttttgtagaaagagtttttatttaagtatagagtttatattatggaagtttagtttaaggtgagggttatgggaaattttttttttttttttatatttagttttagaggttacggttttttttttgttattttaattttgataataatagtaatagttattatttattgttaggtatagaaataagtttttttttttttttttttttttttttttgagatcgggttttagttagttatttagattggagtgtcgtggtataattatggttttggtttattgtagttttgatttttggggtttaaggaatttttttattttagttttttaagtagttgggattataggtatatgttattatatttagttaattttatattttttgtagggataagattttgttatgttgtttaggttggtttcgaatttttgggtttaagtaatttttttattttagttttttaaagtgagggttaggtttttttgtatataatattttatatattattttgtgtatttgaaaattgtatttattagtattattaattacgttttaattgttagtttagtggatgtttggtggttttttggaatatttttgtggtgtgtttttttgtttgttttgtttttttttttattttgttttttttattaggtgttgagtattgtttgatgttagagatagggtagtgaataagatagatataatttttgttttgtttttacggagtttaaagtttagcgggaaaatagattagttggtaaataatttttatttaattgataagagttattattagttttttttaattttttttttttggatttgtttaggtagtttttagttaattttttttttcgacgaggtatttgttttatatgttttgatttttttttgtttttttttaaggggttttgtggatttttagtttggatgatagtgatttagattgcgaatatttgttaagattaggagatttaaggagtttttgaagggagtttataatttagtttggtaggattaaggaaggtttttaggaggaagggatgattaagtagttgagatttgaagaatgggtaggtgaaggtgggaagaaagaatgatttagatagaagagatgtatttgtagtggtttagagattagaggttggtttaaggtagtagataggtatggttgggagttgtatgggggaatgtagagagaggagtttggagaattaagtaaaagttaatcgatttgtgataattggaaaggttttagtaagaagaagagagttattgatggtttagtatagtgttttatatttgtaatttttgtattttgggaggttgaggcgggtagattatttgaggttaggaatttaagattagtttggttaatatggtgaaattttgtttttattaaaattataaaaattagttaggtatggtagtatatgtttgttattttagttatttggaaagttgagataggagaatcgtttgaatttgggaggagaagtttgtagtgagttaaggttgtgttattgtattttagtttggacgatagagggagatttaattttaaaaaaaaaaaaaaaaaaaaaaaaaatagtttattgaaaggttgtgagtaaggaagtaataaggttagatttgtagttgagaatgatttttgagtttcggtttttttatttatgaaatgaggttaagaataataaaatagagaattaaatgagataatgtttgtaaatagtgtttggtatatagtttattatttatttagttaagaggtttttttatatgtgaagttttgttttgtgaggtttgtattataattatatttagttatagttaattatttatttatgtagttatttttgaaatttagaaatgaaattatcgaggaaaaaggttattttttgattttgtttgtgttttttgtttttagtataaagtttaatacgtattaggttaatgttatcgagtaaagaaagtattaaagtggcgggtcgggttttaaatttacgatgggagatattatattcggttataagagggcgcgttatattttttttaagagaagttgggtcgttgatgaaggacgggtttcgggttttttagagatattttattttttgggattttgttttaaggaagttcggtgcgaaggaggtggtttttttaggtggtcgcgttagatgtttaaggttttatgttcggttagatgagttgtataataaaatgaaagtgttaattggtatggacgatagttgttgtttttatcgttattagtagtgatggtttttattttggatgttttttagttggaaaagtaaatttcgtttttttttgagtcgtttggatttttgtggaagcgggtgggttgtatatatataggacggattcgtataggtttgtattttggtttcgaattttgtaaatattcgtagtttgggttattgttattcggattgggaatttttaagattcgttaagggaggataggtaacgattatgataggtgaaataggtatttttgagttggagaaaagggattggttgaaagttatttagataattttggaaaggaagggttaaaaggagtttgtaggtgaaggagatgcgagggggtagtaagggaaaggtaggcgtggaagaggaagcgaaagggttggcggggttttgggaaggaaggggttaattcgggtttcgtttcgcggaggaaagggaggagtgaatataggggaggtgggaattcggcgcggtttttttaaaataataggtcgtttcggtaaagcgtgggttaagggggcgggttcgggggaagttacgtgtcggggcggaaggttattggttcgttcggagttgtttgtgagtggttattggcgacgtcgaggcgttatgacgagtcgattggttgggcgttggaatgttcgttagggtaagggtagggaggaggcggtcgaatcgcgtcgttgggtcgaaaggtgcgcgagcgttgttcgcgcggggattataattaaagtcgcggtcgtcgtagttatgcgttgggtgtgggcgttgttgaagaatgcgtttttggtaggggcgtttaagtatatagagtattttagtaagtttttttcgttttcgttgtttatgaagtagtttttggatttcggtacggagtgggcgggaggcggttggtagcggaggtcggcggggcgttgggaggggtagtcgggggttagggggacggaggagaagaaaggtttcgagtgatagagaagggttgtttggaaaggtataggtaggaaagagttaatggggaagtaggaatcggtcggggtttttcgacggggttgttgatgggaatggggggtatttataaggacggtttcgaggttttttcgtgggttttatgaagggttttgaagagtaaggggtagtgaagttgtgatgttattgtaggaagggagtagggtggtatttagacgcgaaagggttaatgggagttgtttttatgattggaggagtaggggtttttttttttattagaggaaatcgggggtttgttggtgggagtgaggaggtagggtttagaggtgtagttatttgtagagagatttggattgggtatgaagggttagatatttttgggtagagggtgagattaagttaggggtagttggggaagggggtttttttagaagatgttattgggagatagtgttttgattggtagatatttatttatagaaggagttggattttagttgttttagtgggtaaggatatttgaagattaaatttgtttcggtttggtagtttttttttagttgggtaggggttttaggtatcgtgatgtggagttaagtcgtttatattttttttggttgttttagggttgttaggttaggatcgtttattattagtaatttgggggtggttttggggtaggagggaggttgtgttaacgtggtagttgaaatgggtattgtgtgggttttgtttgtttatgtggtatttttatggtgttagttggggattgggggtggggggtagttttttaagagttgagttgatagtgtttagtttgggttgtagttgcgttaatgatgggacgggaatagagaggtggtagtcgagatataaggtatttgttttttaggatttgtttgtttgtatttttgttttgtttgagttttgagttttttttatgtaggaaagttttttgggtttatttttagtttttagtagttgtttttataaattgtattttaattatagaaatattatagttgtgaggggtttatagtagagtttggttaatttgtagtattatgggggaaattgagatttttaaaaggatgatggtatggtttgggtgatagagttggaagtagagtttgatggattggaatttagggtttttgattttgggttaaggttatattcggttttttattttttttattttgatattagataaggatcgaggtatttggatttttgtttttaggttcgtttgttttatggatgggtattaagatatagtagttttatatgggtatttaggttaggttgggtgaggtgggttggttagagataatattgggagtttgtagtggtggtttagttatagttttttttagttagagtttagttttaggtagggatgggttttttaggtttttttgttttttggaattagttttttaaagtgagtgtgttgggagggaaggaaagagaagtgaggtgattgaggttagaggtagttttaaatgggtttaggagtggttttgtttattgtggttaaaggtaagtagggtttagttggggatgaggagaggatgatattttttgaagtgttaggtatggggtgtaggtgtttgagttttgtaggggatggggagttttgttgtgtgtttcgggtaggttatttgttttttgagttttttgttaatgaagggtttagttgatttggtcgagatattttttggtttttatagtttgtggttttgtggtttattttttttttttttgttagg

SEQ ID NO: 194 - DNA, 7037 bp, Artificial Sequence
  chemically treated genomic DNA (Homo sapiens)
tttggtaggagaaagaggggtgagttatagagttatagattatgaaagttaaaggatgtttcggttaggttagttaaattttttattaatagggggtttagagagtaagtgatttgttcggggtatatagtaaggttttttattttttgtagggtttaaatatttatattttatgtttaatattttaggaggtgttattttttttttatttttagttgaattttgtttgtttttaattatagtggatagggttatttttgggtttatttggagttgtttttggttttagttattttattttttttttttttttttttagtatatttattttgaggggttgattttaggggataaaggagtttgggaaatttatttttatttaggattgggttttggttgaggggggttatggttagattattattgtaggtttttagtgttgtttttggttagtttattttatttagtttggtttgaatgtttatgtggggttgttgtgttttaatgtttatttatggggtaaacgggtttgagaataggagtttaaatgtttcggtttttgtttggtgttaagatggaaagggtgggggatcgaatatggttttggtttagggttaggggttttgggttttagtttattaggttttgtttttaattttgttatttaggttatgttattatttttttgaaggttttagttttttttatagtattataagttgattaaattttattgtgagttttttatagttgtgatgtttttgtaattagggtgtagtttgtggggatagttgttgggggttaggggtgggtttaggaggtttttttatatgggggaggtttaagatttaggtagggtaggggtgtaggtagataagttttgaggaataggtgttttatgtttcggttgttatttttttgttttcgttttattattgacgtagttgtaatttaagttaggtattattaatttaatttttgagagattgttttttatttttagtttttagttggtattatggaaatattatatagatagatagggtttatataatgtttattttagttgttacgttggtatagttttttttttgttttagggttatttttaggttgttggtagtgggcgattttgatttagtagttttggggtagttaagggaggtataggcggtttgattttatattacggtgtttggggtttttgtttagttggggagaggttgttaggtcggaatagatttgatttttaagtgtttttgtttattggggtagttagggtttagttttttttgtgggtggatgtttattagttagggtattgttttttaatggtattttttgaaagagtttttttttttaattgtttttggtttaattttattttttgtttaggggtgtttgattttttatgtttagtttaggtttttttatagatggttgtatttttaaattttgtttttttatttttattagtagattttcggttttttttggtgggaggaggggtttttatttttttagttatgaggataatttttattaattttttcgcgtttggatattattttattttttttttgtagtaatattatagttttattgttttttattttttaagattttttatgaggtttacgaagaaatttcgggatcgtttttgtaaatgttttttatttttattagtagtttcgtcgagaggtttcggtcggtttttgtttttttattaatttttttttgtttgtatttttttaaataatttttttttgttattcggggttttttttttttttcgtttttttagttttcggttgttttttttagcgtttcgtcggttttcgttgttagtcgtttttcgtttatttcgtatcgaagtttagaaattgttttatggatagcggggacggggagaatttgttgaagtgttttatgtatttgggcgtttttgttagggacgtattttttagtagcgtttatatttagcgtatggttgcggcggtcgcgattttggttgtggttttcgcgcgggtagcgttcgcgtatttttcggtttagcgacgcggttcggtcgttttttttttatttttgttttggcgggtattttaacgtttagttaatcggttcgttatggcgtttcgacgtcgttaatggttatttataaataatttcgggcgaattaatagtttttcgtttcggtacgtggtttttttcgggttcgtttttttaatttacgttttgtcggggcggtttgttgttttggggaggtcgcgtcgagtttttattttttttgtgtttatttttttttttttttcgcggggcgaagttcgggttaatttttttttttttagagtttcgttagttttttcgtttttttttttacgtttgttttttttttgttattttttcgtattttttttatttgtaggttttttttaattttttttttttagagttgtttaggtagtttttaattaattttttttttttaatttaaaggtatttgttttatttgttatgatcgttatttatttttttttaacgggttttggggatttttagttcggatgatagtgatttagattgcgaatatttgtaaaattcggaattagggtgtaagtttatacgaattcgttttgtatatatgtagtttattcgtttttataaagatttaagcggtttaggaaaaggcggagtttgtttttttaattgaaaaatatttagagtaaaaattattattattagtggcggtggaggtagtagttatcgtttatgttagttaatatttttattttattatatagtttatttgatcgaatataaagttttggatatttagcgcgattatttgagaaagttatttttttcgtatcgggtttttttagagtaagattttaggaggtgaagtgtttttgggaggttcggagttcgttttttattagcggtttagttttttttggagaaaatgtgacgcgtttttttgtggtcgaatgtggtattttttatcgtgggtttagggttcgattcgttattttgatgttttttttgttcggtgatattagtttaatacgtgttaggttttatgttgggaatagggaatatagataggattaagaaatggttttttttttcgatgattttatttttaagttttagagatagttatataagtaaataattagttataattgaatgtgattgtaatatagattttatagagtaaagttttatatatggaagggttttttagttggatgaataataagttatatgttaggtattgtttataggtattattttatttaattttttattttattatttttagttttattttatagataagaaaatcgagatttagggattatttttaattgtaaatttgattttattatttttttgtttatagttttttaatgggttattttttttttttttttttttttttttgagattgagtttttttttgtcgtttaagttggagtgtagtggtataattttggtttattgtaaatttttttttttaggtttaagcgatttttttgttttagttttttaagtagttgggataataggtatgtattattatgtttggttaatttttgtaattttagtagagatagggttttattatgttggttaggttggttttgaatttttgattttaagtgatttgttcgttttaattttttaaagtgtagggattataggtatgaggtattgtgttaggttattaatggtttttttttttttattggagtttttttagttgttataagtcgattgatttttgtttaattttttagatttttttttttatatttttttatgtagtttttagttatatttgtttgttgttttgaattagtttttaatttttaagttattgtaaatgtattttttttgtttggattattttttttttttatttttatttgtttattttttaggttttagttgtttagttattttttttttttggaagttttttttgattttgttaagttgggttataggttttttttaagggttttttagattttttggttttagtaaatattcgtagtttgggttattgttatttagattgggaatttataagattttttaagagaggataaggaaagattaggatatgtgaaataggtatttcgtcgaggaaagggattggttgaaagttatttggataaatttaggaaggaggggttaaaaggagttgatggtagtttttattaattgagtgaaaattgtttgttaattgatttgttttttcgttagattttaagtttcgtgagggtagggtaggggttgtatttgttttatttattgttttatttttagtattaggtagtatttagtatttagtagggaggatagggtgaaaaagaagatagggtaagtagaggagtatattatagagatattttagagaattattaaatatttattgggttagtaattaggacgtgattgatgatgttggtgagtgtagtttttaagtgtatagaataatatatagaatattatgtataaaaaaatttggtttttattttgggaggttgaggtaggaggattgtttgagtttaggagttcgagattagtttgggtagtatagtaagattttgtttttataaaaaatataaaattagttgagtgtggtggtatgtatttatagttttagttatttgggaggttgaagtaggaagattttttgagttttagaggttaaggttgtagtgagttagagttatgattgtgttacggtattttaatttgggtaattgattgagattcggttttaaaaaaaaaaaaaaaaaaaaaaaaaaaggtttatttttgtgtttagtaataaatggtagttattgttgttattgttaaaattaaagtaataaggaaaaggtcgtggtttttaaggttaggtgtaggagagggaaagagattttttatgatttttattttaggttggatttttataatgtgggttttgtgtttggataagaattttttttgtagagtttgttgtagggtgttaatagtagtggtgtgatgtggtatattatagttaagtttggttaggtgatgtcgaggtaaattgtatttttatcgatttttaaattttttattatatgtatagtgtgggttggtggggggggattttttaaggagtttaagaaatttggtattgtagagggtttttttatagtgggtattgttatatttttgttagttatgttttttttataatatgtagtttacgttagttttgaaaatgatttatttttaagagtgtgtgtgtgtgtggggggggttttttttaagtagtggtttataggagattagggggtttgtgaaattggttagagggatgtgttaatatttttgttttaagtaggaagtggttgtaaggataagattgggtcgagttttgataatttatatatgttatgtttaaagaattggattttagattttagaaaataaagtgtggtttttatttattgggttttgagagtttggtagtttcgggtaggggttagggttttttttgggaaagtggatattttattgttagttattttgggaaggggtaaatttcggtatagaaagtgaggagagggaaaggggcggatattgggtttagaattttgttgtgagttgagcgttggtggagggaggtggggtaggtagttgttattataaggaggttgggaggtatttaggtattaggtgggttttttagaatagtttgggtttgtgagttttgagtatatttgatttggtttttatttttgcgtttttttgggtagtaatttttagtttttagtgaagttttgttaaagtttatagttttaaggaaaattaatagaaggatttaggttatattttaggttatagggggaatagttttattttattttttaggtttgtgtggaggggataaatcgagggtaaaggaggaagttgttttgggaatttaggatatggtaggaagtaaagcgaaggtttgatttacgtgttgttgttatgtaagttaggcgtttaaatatttttaaggagtttttgaaagattagagtttttagtttttggaggttggattttgtgatagtttagtttttgtagttttggattagtggtttattttttgattttttattggcgtttggtggtggttgtggggaaattaaggtaggaaagtaggtttttatttgaatttagttcgattaagggtttttttttttttatttttgtatttagtttttttttatagtttgttaggattgtttgtttttatagttgagtagtttttattttttttcgattttgtatattgttatttttgtttgttcgtttttttttagggttagtacgttgttttttaagaaggcgttttgggttttatttaggttttttaaggtttattttttattttttgttttggatttttatgattgatttttagatgagaggatttttgagagtaggggttagtgttatttttattaatttttttatttttttttgagatagagttttgttttgtcgtttaggttggagtgtaatggtacgatttcggtttattgtaatttttgttttttgggtttaagtgatttttttattttagttttttaagtagttgggattataggtatgcgttattgcgtttagttaatttttgtatttttagtagatatagggttttattatgttggttaggttggttttgaatttttgattttaggtgatttgtatgttttggttttttaaagtgttgggattataggtgtgagttattgtatttggttatttttattaatttttatttttaaattcgtaagtttttagatttggttttattttatttaggtgttggttggatgatattattatttattgatttggggttggtaaaggttggggagtgggtggaagtagatgtagttgtatataaattgggagttgtttattggtcgtcgtgagaagtttatatataaagaaggtataaggagggggagggaatttttttgttatagtattatgg

SEQ ID NO: 195 - DNA, 6352 bp, Artificial Sequence
  chemically treated genomic DNA (Homo sapiens)
gataaattcgttatttgtattattggtttttttttagttaatttattttttttttttgacgtttttgatttttttgtttttattaataaaattatttttttttagtagtataggtttagaatattagagaattttaaaaaattatttattaatagatttgataaagtttagagatattattaatagatggtttttttcgttttttttttttattgttttaatgttttttttttttgtttgtttatgaatgtttgttttatttttataagttagatgatttatgattttttttaaggaagttttttttggttgttgtttgtttttttagtatatatattatatatgttatattttattttttagattatttttatgtttgtttttcgtttttgaagataaattatgttttttttatttttatgtttttagtattaattatagtgtttagtatatagtaggtgtttaataaagtttagtagaattatttaattgttaataaatttaaatagaaaatatattgttttttgatttaaaggttttaatagttttttgttgtttattttagaaattttatagattttatattagtattttaggtttttatgagataattgaatttttttttttttttgtttttagggtattttagatagtagttaggtgaaattagttattatttttttaatgtatttttagtttttatatttgtgtttttatttagttttggatatttttttttattgtttattaattatttgttaaaattttgtttatttttttatagttattttaaatgttaattttagtagtattttttgatttttaatatagttttttttttaaatattttagattatttttaatatatttattgtttggtattattattattattattaatattattataattagtattgtttatggcgtgaattttttttatgggttgttttttaaatgtatttaattatagtattttgttttgaggattaaatgaaaatttaataaattaaaaataattagttattgttttttattattagttaataatttgaggtgtatgagagtagacgtttttgtatttattagggtatttagtttagtttttggtatttagtattttttaggttaatagtaattataagaaatattagagattaaattgtgggttagattttgttttttttagtagttttattaatatgtttttattagtatttttttttatttttaatagaagtttattttattttttttaattgtcgtttatttaagaagattttttttgattattaaatttaaggtagttttagtttattatattttttataattattttttttttagtttttgttttattttaatgtataggtttattggttatatgtttttgtaatgttaattttttttataagtttattatttttatgagggaatagattatgatcgaatggttttttattgaaatagttattttttaaattattatttgtttattacgtattttgtagatatgttttttaagtttgttgtttatattttaattttaatattttatggttaagtttgttaatttttttattatgtttttagagtttttgttacgggtattttaaattgtttttttggaatacgattttgaggtggaaaaattgtatagatttttttttaagggatttgatggattttattaaattggttattttttattttttggaaaaagtgtgatttgtatttttaaagttttattcgtggttttttgttattagattttttttaggtaagttggatagaatttatttaatgttaggtaaggtgttattgaaaattttaggaattaggtattttaagtagggatgtttagtattgtatgtaagggaatagttttgattattttttttattttttagtattagttatttaatagtttttttatggtttatttttatttaaatgaatgtatggatttgttatatttattgtttttaaataatatttttgttttatttttgttttaattggattatttttaagatttgtgtttaatttgagaagagaagtgttattttttttttaggttattttttaattatggtaatatatagtattttagttaattgggtaaataatttgatttgatttttttaggttagttattatgaatgttgttaattataataatagtttttattatatagaaatgatatagaagaatgtaatgtattgtgagagtaattttataaatattattagaagggatgatatagagataaaattttggtaattttagtttatatttagttttaggttatttttgtgaatattatatgattttatttgatttttaattagtttatagtatatagaatagtagtgttgggtaagttaggttgggtaattaatgtatttagggatatgggatttttttaaattagatttgtttgtaatgtataatttttattgttttttttttgaaaattagagtataattttttgtaatatatatttttgtttattttaggttttatatatagtgagaaaagtaaatgtatgttttatttttatttatgtttttaagatttaatttaagaaaaagaagggatttttattttaaatttatttgttttattaaagagagttttatttagttttttggttatttgaatatatttcgttgttgtattaagttatgtaaatatttaataaaggattttaagtataaaaatataaataatagtggtattaaaatttgtttataagtggagatgtaatttggaatttgtttatatttttatagttgttttagtttaagataagtgtttgagttgttgtgtttttggtttttttgtttttttgttttatttaagtgtaattgttagagtttatatttggattatttttgaatattttttaagaatttaggttttattttttttattggaagattataaatattgtatgtttttatatagttgttttttaaaggtttgaaaaaaatatttggttataataggaagttttaaattttcgattatttataggtaatgtatagataatgggagaaatagtaggagagttaatatggtgtttttaaataggttatataattgatatagggtttgttaggattgttttagattttttataatggtgttgattttagagaagtaaaattgatatttattagatatttaaatggagaaattaaataggtaattgaataggagaatttggtttttggaagaaagtttgtgttagagatagaattggaaatttgttttgtgatttaatgtagttttttagacgaagagggtaaaggatgatagtagagtttaggattatttatgatttttagagttgttcgttttgtttataaatgtagggtaggttgggcgtaatggtttatttttgtaattttagtattatgggagatcgaggtgggtggattatttgaggttaggagtttgagattagtttggttaatatggagaaattttatttttattaaaaatagaaaaaattagttgagtgtggtggcgtgtgtttgtgattttagttatttagaagattgaggtagtagaatcgtttgaatttgggaggtcgaggttgtagtgagtcgagatggtattattgtattttagtttgggagatagtgtgattttgttttaataaataaagtaattaattaattaattaaaataaaataaacgtagggggaggaggttaaaaaggttttttataataaattattatttttaatattttataaatttttattttattatatttgtaattaatttttttatttttaatttttttaaatacggtggttttattttttagtttttttagagtgtcgggagaggaaaaggaggttagtatgatagggtaatgtgttttaattattgttattaatttaataaatattgagtagtgaaaaagtaggaattataaagttgtattagatagggtttttattttgattttttttaggaaaggggggagttagagagggataatataaaaatataaatagttatagaatagtattatgaaagattaaggttttatttggaagaagtgaggagaagtaattaaggaagattttttgtagtagatagtttgtgttagatatttgagggtagaatggaatgttttaggtaaagatttggagtaaggatatttcgtatagggtagagtgaataaattttttgattatcgtaaaaggtaaggtaaattgataaattgatttttttttaattttgtttttaattaatagaattaaatttaacggaaagaatgtgttgtcggagaagaacgaattgatggttttttattattataggaaaaagtaaatgtatttgggtagttttttaagttttagtaaaaggaacgtatagtttttgttatgtgtcggttttttttgaagaaaagggggcggtgggggtgggggcgtaggtttttaggttgtttatttttttttttttgtttagtggtagagaagtttatatttttgaacgtagtttgttggttattgtaaaagttttgttttgagtaaggattaatgagtacgcggagtttaaatttttggaaatagtttgtggttaggagtatttgatattgagatagttttcgagttgtaaataagggcgagtttgggcgggattttagtttacgcgattcggagtttcgttttaagaggttaattttaagtttacgttgttttagatatttgtttttgtttttttttttttgttttttttatttttttttcgttatagtcgcgggtatcggtgttagggtatttcgtggttatcgtgttaggttattttgtgatgatcgcggttggaggggcggagtttatagttttttttttgatttgattggcgcgatttggagtttaggacgcgtttttaagttttagtgattttttttgtttgggattcggggggagagtgcggggagataaataaaatttcgggcggcggcggttggtgggaagatttgaatttgaatttcgaattattgtattttcgattttgtttagattttttatttcgcggtatttttaaattttagtttaggtcggggcgtataagttagttagcgtatttgtagttttcgttcggacgcgtcgcgttttttcggaattaggttttgtttcgagtagttttcgttttttaagttagttatagttttcgttaggtcgggtgggcgttaagatgaaggcggttcgtttcgtgttgcgtagcgttggttcgtttaacggcgtcggtttggtgtttcgagaggtggagtatttttcgcgttatagttcgttttcgttgtttatgaagtagttattggattttggtgagaggggatatagggtttaagttgggttttagggttggggaattgttttaatttttagttttggtagagggagggttaggtttaagttaaaataattggggtttattttgttgttgagttttggagtttcgacgttagtatattttttttttttttagatttggttattttttgataggggtgtttttaggttaaggttatttgtaagtttgtcgacgttggatggtttgattttatttgtatatttttttttttgattcgtttttttagttaaaatattttttgttttcggttatcgtttaataatggattggaaattttatttttttttttatagtatagtattgtttggagaagtttttgaatagtattaaatagttttaaattaatagattttattttttagttatttggtatttttttatagggtatatttttttgtatttttgatagatttttttgtttttttattattatagttttttatatatttgtattgttgttgaaaatatttatatatttgttgtagtaattttataaggaagattttaagggtttaaatgtgatattattattttggaaatattatagttttttttttagttttttattttttaattttaattttatgtttttatttattaaaggatgttgtgttgttgatattgtggtgtgatcgaattttgtagttttttataaattttaagaattgtgggatatttttattttttggaagtgaattttttttaaaaagagaagataataatttttttatatttgttattttttaaaagaaagaaggaaagacgaaaggacgaagggaattagttaattaaggagataatcgtttttgaattatcgattaatagtaatttaattgagagtgaaatataattttataatatatgtgtgtttaatatttgatagttaatgttatttagatatattatttagatatatttttttttaaaattaaattgattttatttattatagg

SEQ ID NO: 196 - DNA, 6352 bp, Artificial Sequence
  chemically treated genomic DNA (Homo sapiens)
tttataataaatgaaattaatttagttttgagaaaaagtgtgtttaaatgatatatttaaatagtattaattattaaatattgaatatatatatattataaaattatattttatttttagttgggttattgttaatcgataatttaggggcgattgtttttttaattgattaatttttttcgttttttcgttttttttttttttttttaaaaagtgatagatataggagaattattgttttttttttttgaagaggatttatttttaagaagtaagaatattttatagtttttagaatttataaaagattgtaggattcggttatattataatgttaataatataatattttttaatgagtggggatatggaattggagttgggggataagaggttggagggggagttgtgatatttttagagtagtgatattatatttaaatttttgaaattttttttataagattattgtaataaatgtgtaaatatttttagtaataatgtaaatatatggaaaattataatgataaagagataaagaaatttgttaggaatgtagagagatgtattttgtggaaggatgttaggtggttaaggaataaaatttgttaatttgaggttatttaatattatttagaaatttttttaagtagtattatgttgtgaaggagaggataaagtttttagtttattgttaaacggtgatcgaaagtaaaaagtattttgattggaagagcgggttagaaagaagagtgtgtagatgaagttaaattatttagcgtcggtaggtttgtaggtggttttgatttggaggtatttttgttagaaagtaattaaatttaggaaaaggaaaggtgtgttggcgtcgaggttttagggtttagtagtaaagtgaattttagttgttttagtttgagtttagttttttttttattaaggttgaaagttaaggtagttttttaattttaggatttagtttgggttttgtgtttttttttattaaagtttagtagttgttttatggatagcggggacgggttgtagcgcgagaaatgttttatttttcggggtattaggtcggcgtcgttgagcgagttagcgttgcgtagtacgaagcgggtcgtttttattttgacgtttattcggtttggcggggattgtggttggtttgaggggcgaaggttgttcggagtagagtttggtttcgagggggcgcggcgcgttcgggcgaggattgtaggtgcgttggttggtttgtgcgtttcggtttgggttggggtttgagggtgtcgcggagtgaagagtttgggtagagtcggagatgtagtggttcgagatttaagtttaagtttttttattagtcgtcgtcgttcgaggttttatttgttttttcgtatttttttttcgagttttaaataggaggagttattggaatttggaaacgcgttttgaattttaggtcgcgttaattagattagagaaagaattatgggtttcgtttttttagtcgcggttattatagaatggtttggtacggtgattacggagtgttttggtatcggtgttcgcggttgtgacggaaaaagggtgggaagaatagggaagaggaagtagaaataggtatttggggtaacgtgggtttaagattagttttttgggacggggtttcgagtcgcgtgggttggggtttcgtttaggttcgtttttgtttataattcggaggttgttttaatgttaagtatttttggttataaattgtttttaagagtttggatttcgcgtgtttattggtttttgtttagagtagggtttttatagtagttaataagttgcgtttaaaagtatgggtttttttgttattggatagagagaaaggaataaataatttaaagatttgcgtttttatttttatcgtttttttttttttagaagagatcggtatatggtaggaattgtacgttttttttgttgagatttgaggggttgtttagatatatttatttttttttgtggtaataaaaggttattaattcgttttttttcggtaatatatttttttcgttaggtttagttttgttaattaaaaataaaattaaaaagggattaatttgttagtttgttttattttttgcggtgattagagaatttgtttattttgttttgtacgaaatgtttttattttaaatttttatttaagatattttattttatttttaaatgtttggtataagttgtttgttgtaaaaggttttttttgattatttttttttattttttttaaataaggttttggttttttatggtattattttatagttatttatgtttttatattatttttttttgattttttttttttttgaaagagattagggtagggattttgtttgatgtagttttgtgatttttatttttttattatttaatatttattaaattaatgatagtggttgagatatattattttgttatattaattttttttttttttttcgatattttaaaaggattagggaatgaagttatcgtgtttgggaaagttgggagtaagagagttggttataaatgtaatagaatgggaatttatgaggtgttaaaaatgatagtttgttataaaaaatttttttggttttttttttttgcgtttattttattttaattaattaattaattattttatttattgagatagagttatattgttttttaggttggagtgtagtggtgttatttcggtttattgtaatttcggttttttaggtttaagcgattttgttgttttagttttttgagtagttgggattataggtatacgttattatatttagttaattttttttatttttggtgaagatggggtttttttatgttggttaggttggttttaaatttttgattttaagtgatttatttatttcggttttttatagtgttgggattataggagtgagttattgcgtttagtttgttttgtatttataagtagaacgggtaattttgaaagttatgagtgattttaggttttgttgttattttttgtttttttcgtttaggagattgtattaaattataggatagatttttaattttatttttagtataaatttttttttaagagttagatttttttatttaattgtttatttggtttttttatttggatgtttaataggtattaattttgtttttttaaaattaatattattatgagggatttgaaatagttttggtaaattttgtgttagttatgtggtttgtttggaggtattatattagtttttttattattttttttattgtttatatattatttatagatggtcgagaatttgagattttttgttatgattaaatattttttttagatttttgagaaatagttatgtgaagatatgtaatatttatgattttttaatgaagaggatggggtttgggtttttagagaatatttaaggatgatttaagtatagattttagtagttgtatttgagtgggatagaaaaataaaaaaattaaaaatataatagtttaagtatttattttaagttgaaatagttgtgggaatatgggtaagttttaaattgtatttttatttgtagataggttttgatgttattattatttatatttttgtatttggaattttttattaaatatttgtatagtttgatgtagtaacgaaatgtgtttaagtagttaaaaaattgaataagattttttttgatgaagtaagtaaatttaaggtaaaaatttttttttttttttagattgggttttaagaatataagtaaaagtaaagtatgtatttgttttttttattgtatatggaatttggaataagtaaaaatatatattataaagaattatattttgatttttagaggaaaggtaatggaaattatgtattataggtaagtttaatttaggaaagttttatgtttttaagtatattgattgtttagtttagtttatttagtattattattttatgtgttgtgggttgattaaagattaggtgaaattatatgatgtttatagagatgatttagggttaaatgtgaattgaggttgttaaaattttgtttttatgttattttttttaataatatttatgaagttatttttatagtgtattgtatttttttgtgttatttttgtatgatgggaattgttattataattggtagtatttatgatagttggtttagaaaggttaggttaagttgtttatttagttggttaagatgttatgtattattatgattagagagtgatttgggaaaagagtggtatttttttttttaggttgaatataaattttggaggtgatttagttgggatagaggtgaagtaaaaatattatttgggggtaatggatatgataaatttatgtatttatttgagtaaaagtaaattatgagaagattattaaatgattaatgttaaggaatagaagaagtaattaaagttgtttttttgtatataatgttgaatatttttgtttgagatatttggtttttaaaatttttagtggtattttatttagtattaaataagttttgtttagtttgtttggaaaaaatttaataataaaaggttacgggtagaattttgagaatgtaagttatattttttttagagggtgggggatggttaatttgataaaatttattagattttttaaagggaagtttatataatttttttattttaggatcgtattttaaggaagtaatttaaaatgttcgtaataggaattttgaagatatgatggaaagattaatagatttgattatagaatattaaagttaaaatatgaatagtagatttggagaatatatttatagaatacgtaatagataaatgatgatttaagagatggttgttttagtagggaattattcggttatgatttatttttttatggagatgatagatttgtgggggaaattggtattataaaagtatatggttaataagtttatatattaagataggataagggttaagaagaaaatgattgtgaagagtgtaataggttggaattattttagatttggtggttaaggaaggtttttttgagtaaacgataattaaaagaaatggaatgagtttttattggggatgagagggaatattggtgaaagtatattggtgaagttattgggaaaagtaggatttaatttataatttggtttttgatgttttttatagttattgttaatttagaggatattaggtgttaggagttggattgggtgttttgatgggtgtaaaagcgtttgtttttatgtattttagattattagttgatgatggaaaataataattaattatttttaatttattagatttttatttaatttttagggtaaaatgttataattaaatgtatttaaaaagtagtttataagaaaggtttacgttatgggtaatgttggttgtggtggtattggtggtagtagtgatggtgttagatagtggatatgttaagggtgatttggggtgtttggaggaagagttatgttggggattaggaaatgttattagaattggtatttgggatggttgtagaaagatgagtaagattttggtaaataattggtagatagtggggaaaaatgtttaagattgagtaaaagtatagatgtaggagttagagatatattggagaaataatgattagttttatttggttgttgtttagagtattttaagggtagaaggaaaggaagatttagttattttatgaaagtttgaaatgttagtatgaggtttatgagatttttagagtaagtagtagggaattgttgaagtttttaaattagggagtaatgtgttttttgtttaaatttgttagtagttaaataattttattaaattttattgaatatttattatgtattaggtattgtgattaatgttgaggatataaagatgaagaaggtatagtttgtttttaaagacgggagatagatatgaaaataatttaaaaaatagaatgtggtatatatggtatgtgtattggggggataagtagtagttaggggaggtttttttggaggaagttataggttatttgatttataaaggtggagtagatatttataggtagataaagaagaaaggtattggagtagtgaggagagggaacgaaaagagttatttgttggtagtatttttaggttttgttaaatttgttaatgaataattttttaaagttttttaatattttaaatttgtgttgttgggaggaggtgattttattgatagaagtagggaagttaaaagcgttaggagaaaaggataggttgattaaggaaagattagtagtgtaagtgacgggtttgtt

SEQ ID NO: 197 - DNA, 15587 bp, Artificial Sequence
  chemically treated genomic DNA (Homo sapiens)
ttgtgtgtttgtatttttagttatttaggaggttgaggatggaggattgtttgagtttggaagtttggggttgtagtgaattacgattgtgttattgtattttagtttaggcgatagagcgagatattattttttaagaagataaatataatagtaatattttttggaaattagtaggtattttgtgattatgaaattagagtaagggttgttttgttttatgagattagtttttgaggtttttttttttattatttttttaagattatttttttaatatattgtttttggtttgtaggtaatgtataagatttaatttagattttatttaagtatttgtttttttagtgttaaataggtaggattattgaaaagtgagaataggatttgggatttttgtattgttggttagtatgtgggatttttaaatacgggaagttggttttattttggtaagaggtttttgagtaattttttttttaaggtttttagtttttataaagatgtcgagtattaaatttaaaggaagatgtgagattttttagattgggagaggggtgagattttagaaattaattttttaaaatagattatataattaaaatatatataaaaggatgtataatgtttagtattttttaggttttatttttttattttttttattgtgtttgtgttgtggtttttaagtagaatttttttatttattttttttattttagatagacgtacggtaggatagagagtgtttttgagaagtatttttttttgggtttaagattgattttatgttttgagattttattgtaaggaaatagaggtggtgttaatattaggaggtaaggagtgttagggtagaggttagtatttaaagaagtatttttttaaaatattggagtagtttttttttgttttgttttgtttttttttaaaatatattgtagttattaattttataaaggaagtttgttgattttagtgagtagtattatgatcgtttttattgaaaatggtgaagtaagttaggtaagtatttgtagttttagttatttgggaggcggaggtaggaggatcgtttgagttaggaaattggagtttattttgggtaatatagaaagattttttgtttttaaaataaataaataaaaaacgatgaaatagttttatttgggatattgggtatgtttaaggaggttagttaggagttagtcggtttgttaaaggttatttagataaagattaatttatagtataattaatttatagagtggatttgtttggtgttattttgtttttataatagtattttaaggattagtttgtttttgtttttgttttttgttgttttagttggagttcgaaggaaaggaaaaaggaaagattgggtagatataagaatataatttttaatttgaagaatttttattagtgtatattttttttttttttttttttttttttttttgagatagagtttcgttttattatttaggttggagtgtaatggtgtaattttggtttattgtattttttattttttgggtttaagtaatttttttgttttagtttttcgagtagttgagattataggtatttgttattatgtttagttaatttttgtattttttgtaaaaatagggttttattatattggttaggttggttttgaatttttgattttaagtgatttattagttttagttttttaaagtgttgggattataggtgtgagttattgcgtttggttagtatatattgttttttttttatgttagtttttaggtatagtattaagaagttagagtaggtaaaaatggaatatatgtttttttagaatatatttttttaaatatatttaataaatatattttttattgtgaagaaattttatgttttttggtgttttttttttttattttttagttttaaacgagttataggaagttggagtagagataaatttaatattttttaaaatgtaacgaaaaaatgatttttagttaattaaattattatagaaataattaaatttggtgaattggttatttttagtaaatttatttagaattgattttttgggttaaagatggagtgattttttttagagttaaagatttgaattttataagagaaatatttattggtttttattttggatgttaatatggggttttttggaaattatttgggttgaagtttttgtggtaggatgatggtagattttttggttggggttagaaaaattatatatggtgttattttagggtttagttttgggtttttatttttatggagattatgaattagttttagaaataataatattttttattattatattatatttgatttttgataaatatttgagaaatgatttggagataagtttttattggtgataattagagaatggttttatggatatggggattaagatatggaggttttgtattttagggatatgaggatattaaaatgtgagattgatttattatatagtatagttttttggtttaaaatgaattattaaaatttgttttaaaaatttaaaagttaaaacggagtagtttttttttttggttttattttagaattttgagtttattgaagaatatagtttatatattgttatgtaatcgtatagattaaagtcgaagaatgtagattgtttatatattaaaaggggtgtaaatgtgtatagtagaattagcgaagaatgaagttaggaaattgaaaatgtttttatattaggtggaaatgttagataaggagtaaagattattagttattttttatatggttgtaaaattaatttttaaggaaggatttaatggaaataaaagttataatgaaaagaagtaatgattttagtttttagatggagatgaatatatgaaaattttagtaagagtatatatttagattttaaaatatttagtggtgataataatgtttagttttatttatttttagattatagtaaattttttatggaggtatattatatggattattgtataatttaaaagttaatattaagaaaataaagtattatatgaagtaatatgtgagttgatgtggggtttggtgttttagttgagtgatagagtaaagttatagatttatgttttggaatatttaatataaatttggttaaggattaaatataagggaacgtagttaagtaggattgattttatttatttatgcgagtaatattaattgagttttaattatatgtttaatattgtattaggtatagtaggagatattaaaagattgttttaatgaataacgtatattttaattaggaaaatatgttttatttatatatgaaaatataaataataataggaggtaatatattgtggttaagtgataacgaaattagttatgatttattaagtatttttttattagttaggtttgtgttaaatgttttatatttatttttttgattttaagttattttgtgaggtaggtgttatgattatttttattttatagatgagaatatttaagtttaaatatgtaaaacgggatgttaaaggttatacgatttgtaaatgatagaattgatatttgaatttaaaatgaattgattttaagttttaagtttttattaaattaatggttatagaaatttagaaaatggggaaggttaatagaggagttgagttggtcgttaagggaaagataggttttagttagttaaggaggaggaagaagggtcgaaggggttaagtatagagtaaatgtatggagattggaaaagagtttgcggaaattgattgtattagtttagttgtttagtaaatttttatgtgggttagattttggtggataatgaatattaggtcgaagattgtgaattgtaggttattagtagttacgaaatattataatgaatgttaagttttaagttgtagattcgtgggagatgaattgcgaatttgttcgaggaagcggcgtttaagtggttaggggcggggttataggcgttagaggtgtcgttggggtattttttcgggttttttttttttttttttcgggttgggtttcgttattttagtttcgttaggcggcggagacggggttagaggtgggattataattttggtttttagaggggtgtttaggcggtcgcggtaggcggtttttttttttcggtttcgagtgggattggtattcgtttcggggggttttatattattacgtaggaaagttaattcgttcgtcgttcgaagtcgggtttttttagatttttacgggtcgttttttttttcgtttttttcgaggtcgcgattttgagggtttcgttttgcggcggaggtggggttaggggcggggatgtgggcggggtcgtgaggtcgttttagggcgcggggcggggtcgtttttttatttgtgttttttagggttttaaacgttttatttcgcggtaggggcgggggcgagttcggagggcgggtttaaggcgtttaggtggtcgcggtagaagggtttgtttttttggttttggttgtggttggtagtcggtcggggagagaagggatttagggaggtaatttggttttcgttcgttgttgatttcgtagcggttttttcgggtcgttttttttttttttttttttaggtcgcgatttggagggtttcgtttcgcggcgggggtagagttaggggcggggttgagcgcggtttgggcgattttttcggcggttggggtgggttggcgtttttttcgcgttcgggggattttttcgcgatcgtcgggacgtaaaaggggtttggtaggggcgttttcgttttattttcggaatttggtttttcgttgttttcgcgagcgtcgggagtttagtaggtttggtcgaggcgggattttcgtcgttttagttttcgttttcgttttcgcgttttttcgtcgcgcggagttttggttggtttgttttttaatcggattttggggttagcgtttagaaaagtttcgatttttttcggttcggttttattttaagaatcgattaaggttgtgagtgttcgggaattagattcgtttggaggttatagtttcgacgtttcgcgtttacgcggtagatcgggcgttgcggtttgggagtttcggggagatgcggagtaggagtaatttcggggttcgtttggacgggtacgcgcggttggtgtagtaaattattttgtgttattaggtaaggagggatcgtttttagggaacgcgtggaattatttttttatgtaatttatttttttttttaggtttggtttttttgtgatttgagattttgtaattaagagtttgttatttgaatttagtttttgttagttagtgattattattttattgttatttcgtgttttttaagatttaggggatttaattgttgttacggttattttttatagaattttttggttattgtttaggatgagaatgagtcgttttcgtgttcgggtttaaattgtttttttttgtattgattttgttttttttggacgagaagaggtgtggggggtttggatagattatattgaatgagaatagtagataggagtgaagaagtttttgaagtttacgtaggattttgtagtgtggggcgatagttatcgttttttttatgagttgttttggtagagatttatttgggaagtttttaggggttattttggttgttattttatagataagaaaattgtgaggttagaaaggttattgtatgtagtaggttagatttaaaggtttttaagtttatagggttttatgatattgtttatgtggttcgaggtatgaatttgtttgttatgttttgtatttttgggttaaaattatgtgtgggtttattagtgtaagattattgaattatttttatttttagtgaagatagtagttatgttttttgtttttaattaatagtaattatttatagggtttttaaagttaacgaaggaagtggtatttaggggttagaggtttgatttgtaagttgggagttatggttatttttaaggtattgattattttttttttttaattaattttttagttttgtttttttatttaggaaatatttgtggtgtatttgttatatgtaaagtattttataaagtgttggggttataagaataaatgatcgtagtgtagtaatatttatgtataaggtataggtttaaagttttttaatttgttttttttgttgttgtttgtttgtttttgagatagggttttattttgttttttaggttggagtgtagtggcgcgatttcggtttattgaaatttttgtttttcgggtttaagcgattattttgttttagtttttcgagtagttgggattataggcgtgcgttattatatttagttaatttttgtatttttagtagtgacggggttttattgcgttggttaggttggtttcgattttttgattttaagttatttttttattacggttttttaaaagtgttgggattataggtatgagttattgtatttggttttagagtttattatttgaaattttttggattagttgtggtttgtttattagaaatgtttggtttttagaaaggtaatatgcgtataacgtattatatatattataataattgtagttagatttgggtagtatttttttattaaataggttattatttttatattagaatatgaatatttatataattttagtaaaggttgaaaagagttttatattagttcggtttattttttgttattaaaagagtttgttgtaaatttacgaaaatattttaaatttttagagtttattggtttttgagattgtatatgaaggatgatggtttttattttgagagttttgaggaaggatttttcgtttagtttgtgggagtagtagaggagttttggaagagatgatgtttaagttgagagtagaagaagtaggtaggtaaattaaggttattttttttttttttttttggaatatattttaattatatttataaagtgttttaaaatttaagttgaaaaatttttttttttatgattgtgatggagagggttttaaggagagttgatgaagtttggtttttttgttagatttgggtttgaattttttgttttgttttgaatgatatgtgtgattttttttgattttttttgagtttatgtttttatttgtaaagtgaggataataatatttgtttttattgagtgtttttaaggaaaaaattagtgtttattattttgtttggtatttattgggtaatagtaaataatgggtgtttttggtggtgttatgattttgatagaggttatacgtttgtgtttaggtttcgtggtttttgtaggagtattttggtttatggtgcgtttttttttgaaggttttgttatagtttcgtattttttgagtataaatatgtttttttattgatgttaagagattttaagtatagatattttattagttttttttttttgtattaagtagtggttaaaggtatgaaaggtatttttaagtttttgttggtagaagattttttagtaggatttgagttattttaataatttagttatttaggattgcgttttttttagaagcgtgagtttaatgtataaatttttgttgaatgttgtttagtttgttttaatttattgtttaagtttttggtattttgttgttttagtattggtttagtatttattttgtagtttttatttgtttttttatgtttatgtacgtatttataaaggagtagtgtatgttattattttaatatttttgtttttttttgttgttaaaatttaatttattttttgtttgtttggagaattattatttttgtattgttattagttaagaagattgtttaagtgttgttttttaagttgatgtgatgaagattttagttttttgttttttattttataatataaaattataatgttgaatttgtgtttttaaattatatatatattattttagggagttatgtattttgtattttttggttagtttttattattgtattttgatttttattgaaatttattattttaatttttgtttttttaaattttattttcgttttgtgatattattgttttttatttgatttattttagttttgagttgagtaatgagttattttttgtatttgaagtagtttttcggttttgtttatttttttatttttaaagtaaaaatgaggttttagtttttgtttgagttatttttaaggtttatgttgtgtatatttgatttattttttttgagttttttaaagaaaggttgaatagaaggatatgtataataataaaatgagttttttttttttttttttttttgagatggagttttgcgttgttattcgggttggagtgtagtgtggtatcgttttagtttattgtaattttcgtttttcgggtttaagtgattattttgttttagttttttgagtagttgggattataggtacgtattattatgtttggttaatttttgtatttttagtagagatagggttttattatgttggttaggttgttcgtaaatttttgattttatgatttattcgtttcggttttttaaagtgttgggattataggcgtgagttattgtatttagttaaaatgagtatttttaagtggtaaatttatttgtattagttatgtataatataaatatatatagatagagaatgtttatatttttaaatatttttgaaaagatattttagattgtaaattagtaaaaatatagtgatttattatatatttatttatttatttattaggtatttaattaggttaggattttgcgttagagtggtaaataaaaaagataggttttgtttttaggaattttgtagtatgaaaattatgttttagattgtgttagaaagatattttatgtttatggattagaagatttaatatggttgagatggtagtattttttaaattggtttatagttgtggaattgagattgaggtttttttttttgtatgtgtatgtttatttgttttaatattgttaaaaagattgtttttttttggattgtttttagatttttgttaaaaattagtttgttttatttatgtggatttatttttagattttgttttgttttgtttatttatgtgtttatttttttattttttgttaggtttatatacgtttaagattgttttatttttatgatgaattgatttttatggttcgttgtgtttttttttttttgtgtatagaatgggtagtgatatagtttggatgtttgtttttgataaaattttatgttgaaatgtaatttttagttttggaggtggagtttggtgggaggtgattggattatgtagatggattttttatgaatggtttagtatttgtgagaaatggtttagtattttttggtgttatttttgtaatagtgagttttttcgagatttggtagtttaaaagtatgtggtattttttttattttttttttgtttttgtttttattatgtgaagtgtttgttttcgttttgttttttattatgaataaaagttttttgagatttttttagaagtagatgttttatgttttttgtatagtttatagaattatgagttaattaaatttttttttttataaattatttagttttagatatttttttatagtaaatatgagaatggtattataatagttagtgttttagatataagttgtttgagtagtttggtttttagagggaagataatatagagtagaattatagtcggttaggggtggatataaggtatggataagaagtaaacgtttgttgtaataagttattgagatgttaatgttgtttgttattagattataggggttaagttttgggtttaatttattttaggtcgtaggggtttgttttttattttttattaataggagttaataagggtattttttttatattagaaatttagaagaggtggagaaggtaagagaggtgaataagtggttggagataaaggataagttgtttagtttttggttttttgtttttgatgaaatttagtttttattaggtttttttgtttttgtggtttttttttatagagtttaaggatattattggtaggtttttttgaggtagggatgttaattgttagtgtaggtttaggttatttttattaagatcggtttgtaatatttattgtttatgatttttagttattttttgagttgttatatttagagatttgttttattttttgttttttatgattttatattaggttatttgatataggtgggagagtgggagagtggatattattatagaatttgtttttgatattaatttagttatgattttttttaggtaaagtatatagagagtttagtaaagtaaatagagaaaatttatatgaatgagtaaaatttaaggttaaatttgaaggggaaaggtaagatttgggtgtggagaggatagagtggttaggttttttgttttaaaaatgttaatgtgataaaatatttttattagtaatgtttatagtaatgataaaagagggtattttaaattttggtgtttttttttagtaaaaatgatggttatatcgaatttatttgtagattttttttttagttatattatttgattttttgaaattattgtaattatatgaagaagaaataatgttaatgaaagtcgtttaaataggtgaataatattaaatatcgtaattattgagtagttatgtgtgttagatagagtttaaaaagtttgatacgaattaatttatttaatttttataaataattttatgaggtgtatatattgttataatttttatttgataggtggatatcgaagttatttgtttaaggttatagttggatgataggagagttttgaatacggtagtttgattttagtttgtttttaaatataatatatggaaggttgtttttttttgtaggtagaaatggtgaaatagtatttggttaaaaagaaattaggttaggtgtggtggtttatgtttataattttagtattttgggaggttaagtcgggtggattatttgaggttaggagtttaagattagtttgattaatatgggaaaattttgtttttattaaaagtataaaaattagttgggtgtggtggtatgtgtttgtaattttagttattcgagtgattgaggtaggagaatcgtttgaattttcgagatagaggttttagtgagtcgagattgtattattgtattttagtttgggtgatagagtgagattttattatatatacgtatatatatatatataaaagaaattgaaatttaattagtttatagaagagtaaatttagtggttcgtttttttttttagataagaatgattggatggttaaatttattggtagttagggaaataaaaattttaaaaataaaaatggtgatgagatattattttatatttattagattgataaaaaattaaaattattgataatttatggtagagatagcgaatagttatgaaaatttaaagtgtatatatatataatatgttaatttagtagttttatttttgggattttattttatggaaataaaagtattgttgaatatataaggatatttattatagtttttgtattgttaaatttaaaaaaaaattttagaaaataaatgaatatttattattataggtattttttatggaatatgatgtagtttttaaaatttatgaatttgaattatgttagatgatatggagggattttataggttttgttgaaagagaaatgtagggtgtagtagtgtgtattatatgattttattatttcgttcgttaaaaatagtgattttggtcgggtacggtggtttacgtttgtaattttagtagtttgggaggtcgaggtgggtagattatttgaggttaggagttcgagattagtttgattaatatgatgaaattttgtttttattaaaaatgtaaaaattagttatgtatggtgttatgtatttgtaattcgagttattttggaggttgaggtaggagaattgtttgaattcgggaggtagaggttgtagtgagtcgagattatattattgtattttaatttgggtgataagagcgaaattttattttaaaagaaaataaaataatagtgatttttatttttaaaaagaaaatttgtgtatgaataggaatttatatataattatatatatgtatatatattttatttgtttaaggggtataattatatatatatatatatatataatttggttttagtaatatataggaaaaaatgtatatatgaggttgttatatggagtgtgtggaattgttgatatgaggggaggagggaattaagtaaaaaagagaaggaagaaagataattgaaaaagatatatttatttgtttatggttacgtatttttataatgttttgtgtgggtgtagatatagttaaatagtgttttttaaagattggaaagtaatatatggttaaaatgattatatttgaaattataggtttggtttggattaatttttttattatttttttgtggtttgtatttgtttgtgtttatgtttagtttgtagaatggtattagatagggtagttttttttttttttttttattgttatatttaaagtaaagattttagagttttaaagagatggatttgtttaggtggtttataagtattagtaagtgagagtatagatatggtagtatagtttatttttaggtaagggaatgatttaaagataaaattattgggttatttttattagaagggaaagtagtggttgggtgcggtggtttttgtttgtaattttagtattttgggaggttaaggtcggaaaattatttgaggttaggagtataagattagtttgattaatatggtgaaatttcgtttttattaaaaatatagaaaattagttgggtgtggtggtaggtatttgtaattttagttatttgggaggttgtggtaggagaattgtttgaatttaggaggtagaggttgtagtgagttgagattacgttattgtattttagtttgggtgagaagagtgagatttcgttttaaaaaaaagaaagaaaaaaaggatagtagagtagaagtggtagagtatttgttaatttgtggttattttagtttttatgaattatattaaaatggaattatttttatttttttttaatataatgtattggtttttatagatttaataagagaagtaagttaaaaagtaaatatttttattgttgagtgtagtaatattttaattttatacggtatgtatgtgtatggttttgaatatgagaattttttgaaatatttagattgtttttttgtagttgaatgagggggatagatagtatagttttgggtgaggatgaattaatttattttaatagttaagcgtgtttaaagagtaagatagatgatttttagttaataggatagggatattttataatttaaattatatttgttattatgtgtaagcgattattgttgtgttattagaaggttgtttgttttagtagatttatggttggtgggtatataaggaatgggttgagtttttattttgggttttttgatgtttttttgttttcggtttatttaatagattttagaatagataaagatgtttatgtcgttgttgttgtttttgagataaatttttattttgttatttaggttggagtgtagtggtataattttggtttattgtaatttttgttttttgggtttaagtgatttttttgttttagttttttaagtagttgggattataggcgcgtattattatatttagttaatttttgtatttttagtagagatggggttttattatgttggttaggttagtttcgaatttttgtttttaagtgatttatacgttttagttttttaaagtgtttagattataggcgtgagttatcgtatttagttaaaatgtttatgttatacgttatttaaaaagaatattagtagtttattattggaataagatttgtatttttagttatttttaggttttaattttggttgattttaatattagtgatttatagttgttggtcgtagaattatgttaatatatagaatgttattgtttttgtgggtaatattagttgagttttaaatgttttgatagagggtatagatttgttagaggagaaagttaaatatttaattttttaggtgggaatatgtgaaattatgttagtgttttttatttaatattggtagtattattatgaaagtatttagtgtagtttttttatgagtttttttgtaaataatatggtgttttttatagtaatgtaatttttttaagtttataaggttttgattgttatgatatattttattagatatgtataaatttttaggaaatgttaatagaggttttattattatgtgattttttaatttgatttttaggtagagtttattaggattggtttttaaaaaattaatagttttatttatttattatataatttatttatttaagttgtataattggatggtttttagtatatttatagatttgtgtatttattattataattaattttcgagtatttttattattaaaaaaaaaaaaaaaaaattattagtagttattgatttttagattttatttttatttttagtttagttaattattaatttattttatgtttttatagcgttgttttttttagattttttatataaatggaattatatattatgtagtttttggtatttggttttttttatttagggtgatgtttttaaggtttatttttgttgtagtatgtatttatattttttttttttgttaaataatgttttattgtttgtatagatcgtatttcgtttatttatttattagttgatgagtatttggtttatttttattttttggtttttgtgaataatgttgttatgaatatttgtgtataattttttgtggtaaggtttggttttttagtgatttagttgtttttttaaatattcgtgatattatagttaaataggatttttagatgtttttttgtttggtattttttgtttaggtatatgaagtatttggattgtttagagagggaaagtggtttttttgggtatatatagttagagagcggagtggggttttgtttttaggttttttgtttataggtttaatgttttatttattagtgcggatatatgaagattgaagaagatttaaggtttgtaatatgtagttttgtgaaagttttgtagtttttttttgtttgttgttttttttgttttattatttataatagtgtggtttcgtttgaaagtaaaagaatataagagttggaatgtttttgagagattttttagttatatatttttattatataagtgaggaaattaaggtgttgagaaggtatgtgatgttttatttaagattatattgttaggggtagagtaaggattggaattttggtttttttgttttaggtttcggtttttatttattttgttaggataagtatttgttatttagggattgtatgaaggatggtattgagttattttgtgttttttttttaataga

SEQ ID NO: 198 - DNA, 15587 bp, Artificial Sequence
  chemically treated genomic DNA (Homo sapiens)
tttattagagaagagatataaaatggtttagtgttattttttatgtagtttttgggtaatagatgtttgttttaatagggtagatgaggatcgggatttggagtagggagattaaagttttagtttttgttttgtttttaatagtgtgattttgggtgagatattatatgtttttttagtattttagtttttttatttgtataatgaggatatgtgattagaaaattttttagaaatattttagtttttatgtttttttgtttttagacgagattatattgttgtaagtggtaaaatagaagaaatagtaaataggaaaagattgtaaggtttttataaagttgtatattgtagattttaggttttttttagtttttatgtgttcgtattaataggtaaagtattgaatttgtgagtaagaaatttggaggtagggttttatttcgttttttagttgtgtgtgtttagggaagttattttttttttttgggtaatttagatattttatgtgtttaaatagaaggtgttaagtaagaggatatttgggagttttatttagttatgatattacgggtatttaaaagggtaattgagttattaaaaagttagattttgttataaaaaattatatataaatgtttatagtagtattatttataaaagttaaaaagtggaaataagttaaatatttattaattgataaatggataaacgaaatgcggtttatataaataatgaaatattatttggtagaaaaaggaagtatggatgtatgttataatagggatggattttgaagatattattttaagtgaaagaagttagatgttaaaggttatatagtgtgtgattttatttgtatgaaaagtttagaaaaagtaacgttatagagatataaagtagattagtggttgattgggttgggagtagaggtagaatttggaagttagtggttgttagtagttttttttttttttttttggtgatgaaaatgttcgaaaattgattgtggtgatgaatgtataaatttgtgaatatattaaaaattatttagttgtgtagtttaaataggtgaattgtatggtaagtaaataaagttattaattttttaaaagttagttttaataaattttgtttagaaattagattaaagagttatataatgataaagtttttgttgatattttttgaaaatttgtatatatttaataaaatgtattataataattagaattttgtaagtttaaaaaaattatattattgtaaagggtattatattatttataagagagtttatgaaaaaattgtattgggtatttttatagtgatattgttaatattaagtaaaaaatattggtatggttttatatgtttttatttaaggaattaaatatttgatttttttttttaataaatttatgttttttattaaaatatttaaaatttaattgatattatttataggggtaatggtattttatatattgatatggttttacggttaataattatgaattattgatgttaaagttaattagaattgaaatttaggaatgattgaaagtataaattttattttaatagtggattattggtattttttttaaataacgtataatataagtattttggttgggtacggtggtttacgtttgtaatttaagtattttgggaggttgaggcgtgtggattatttgaggataggagttcgagattagtttggttaatatggtgaaattttatttttattaaaaatataaaaattagttgggtgtggtggtgcgcgtttatagttttagttatttgggaggttgagataggagaattatttgaatttaggaggtagagattgtagtgagttaagattgtgttattgtattttagtttgggtgatagagtgagagtttgttttaaaaataataataacgatataagtatttttatttgttttgaggtttgttgggtaagtcggggatagggaaatattaggagatttagagtaagaatttaatttattttttgtgtgtttattaattatgagtttattaaaataaataattttttggtgatatagtagtgatcgtttatatatagtgataagtgtggtttggattatgaaatatttttgttttgttaattgaaagttatttattttattttttagatacgtttaattgttggagtagattagtttatttttatttaaagttatattgtttgttttttttatttaattatagagaagtagtttgaatgttttaggggatttttatatttagaattatatatatatatgtcgtgtaaaattagggtgttattgtatttagtaataggaatatttattttttgatttgttttttttgttaagtttataaaaattagtgtattgtgttggaagaagatgggggtggttttattttgatgtgatttataaaaattgaaatgattatagattggtagatattttgttatttttgttttgttgtttttttttttttttttttttttgagacggagttttattttttttatttaggttggagtgtaatggcgtgattttagtttattgtaatttttgttttttgggtttaagtaatttttttgttatagttttttaagtagttgggattatagatgtttgttattatatttagttaattttttgtatttttagtagagacggagttttattatgttagttaggttggttttgtgtttttgattttaggtgatttttcggttttggttttttaaagtgttgggattataggtaagagttatcgtatttagttattgtttttttttttaatagggatgatttagtggttttgtttttgagttatttttttgtttggagatggattatgttgttatatttgtatttttatttattgatgtttatgaattatttgaataggtttatttttttggagttttggagtttttattttaagtatggtaatggaggagggagaaaaaggttgttttgtttgatgttattttgtaagttaaatataaatataggtaaatgtagattataggaggatggtggggagattggtttaagttaagtttatggttttagatgtgattattttaattatatgttgttttttaatttttgaaaaatattatttagttatatttgtatttatatagagtattgtagaaatacgtaattataagtagatagatgtattttttttagttgtttttttttttttttttttttgtttggtttttttttttttttatgttagtaattttatatattttatataatagttttatatatatatttttttttatgtgttattaaaattagattatatatatatatatatatataattgtattttttaaataggtgaagtatatatatatatatataattatatataaatttttgtttatgtataggttttttttttgaaggtgggggttattgttgttttgtttttttttgagatggagtttcgtttttgttatttaggttggagtgtaatggtgtgatttcgatttattgtaatttttgtttttcgggtttaagtaatttttttgttttagtttttagagtagttcggattataggtgtatgatattatgtatggttaatttttgtatttttagtagagatagggttttattatgttggttaggttggtttcgaatttttgattttaggtgatttgtttatttcggttttttaaattgttaggattataggcgtgagttatcgtgttcggttagggttattgtttttaacgagcgggatggtgggattatatgatatatattgttgtattttgtattttttttttaataggatttatgaggtttttttatgttatttggtataatttaaatttatgagttttagaggttgtattatattttatagaagatatttgtaataatgggtatttatttgttttttgggatttttttttaaatttggtaatataaggattataataaatatttttatatatttaatagtgtttttatttttatggaatagaattttaaaaatgggattgttgggttggtatattatatgtgtatatattttaaatttttataattattcgttatttttgttataagttattaatagttttaattttttgttagtttgatggatgtaaagtgatattttattattatttttatttttaaaatttttatttttttgattattagtgaatttaattatttagttatttttgtttgggagggagggcgggttattggatttgtttttttgtgagttgattaagttttagttttttttgtgtgtgtgtgtgtgcgtgtgtgtgatggagttttattttgttatttaggttggagtgtagtggtgtaatttcggtttattgaaatttttgtttcggggatttaagcgatttttttgttttagttattcgagtagttgggattataggtatatgttattatatttagttaatttttgtatttttagtagagatagggtttttttatgttggttaggttggttttgaatttttgattttaagtgatttattcgatttggttttttaaagtgttgggattataggtatgagttattatatttggtttagtttttttttaattaggtattattttattatttttatttataaagaaagataattttttatgtattgtgtttaagagtaggttagaattaaattgtcgtgtttaaagtttttttattatttagttgtgattttgagtaaatgatttcggtgtttatttgttagatggggattataataatgtgtatattttatagggttatttgtgaagattaaatgaattaattcgtattaagttttttggattttgtttggtatatataattgtttaataattgcgatgtttaatattatttatttgtttgaacggtttttattagtattattttttttttatataattataataattttaggaagttagatgatgtagttaggggaggaatttgtaagtgagttcgatgtaattattatttttattagaaaaaaatattaaagtttggggtgtttttttttattattattataaatattattggtgaagatattttattatattgatatttttgaaataaaaaatttggttattttgttttttttatatttaggttttgttttttttttttaagtttagttttgaattttgtttatttatataaattttttttgtttattttgttaaattttttgtatattttgtttgaaaaaaattatgattaaattaatattaggggtaaattttgtaataatatttatttttttatttttttatttatattaggtgatttgatgtagagttatgaaggataggaaatggggtagatttttagatatggtaatttagaggatagttaagaattataagtagtaggtattataagtcggttttagtggagatagtttgaatttgtattgatagttagtatttttgttttagaagaatttgttaatgatatttttaaattttatgagaaggggttatagagatagaggagtttaatagaaattgagttttattaaaagtaaggggttaagagttgaatagtttgttttttatttttagttatttgtttattttttttattttttttattttttttgggtttttaatgtaggaaaagtgtttttgttggtttttgttgatgaaaaataaagggtaggtttttacgatttagaatggattgggtttagagtttggtttttatggtttggtaataaataatattaatattttagtggtttattataataaacgtttgttttttgtttatgttttgtgtttatttttggtcggttgtggttttgttttgtgttattttttttttagaaattaggttatttaagtaatttgtatttaaagtattgattgttatgatgttatttttatatttgttataaggaaatatttgagattgggtaatttataagaaaagaggtttagttggtttatggttttgtgggttgtataggaagtatggggtatttgtttttggggaggttttagggagtttttatttatggtggaaggtaaaacggaagtaggtattttatatggtgagagtagaagtaagagggagatgggggaggtgttatatatttttaaattattaaatttcgggagaatttattattgtaaggatggtattaaggggtgttaaattattttttataaatattaaattatttataagaaatttatttgtatgatttaattattttttattaggttttatttttaaaattggggattatattttaatatgagattttgttagggataaatatttaaattatattattgtttattttgtgtataggagaagaaagatatagcgaattatgagggttagtttattatgaagataaaataattttagacgtgtatgaatttaataagaggtaaaggaataaatatatagatggatagaatagaatagagtttagaaatagatttatatgaatagggtaaattgatttttgataaagatttaaagataatttaagaaaggatagtttttttaatagtgttgggataagtggatatatatatgtaagaaaaagaattttaattttaattttatagttgtagattagtttgaagaatattattattttaattatattgagttttttgatttatggatatgggatgtttttttggtataatttgaaatatggtttttatattataagatttttaaaggtaaagtttattttttttgtttattattttagcgtaaggttttggtttagttaggtatttaataaataaataaatgaatatataataaattattatatttttattgatttatagtttgaaatatttttttaaaggtatttaaaagtatagatattttttgtttatatatatttgtattatatatagttaatataagtaaatttattatttaagaatgtttattttggttgggtgtagtggtttacgtttataattttagtattttgggaggtcgaggcgggtggattatgaggttaggagtttgcgaatagtttgattaatatggtgaaattttgtttttattaaaaatgtaaaaattagttaggtatggtggtgcgtgtttgtaattttagttatttaggaggttgaggtaggataattatttgaattcgggaggcggaggttgtagtgagttgagacggtgttatattgtattttagttcgggtaatagcgtaagattttattttaaaaaaaaaaaaaaaaaaaaagtttattttattattatgtatgtttttttgtttagtttttttttaggaaatttaaaagaaataaattagatatatataatatgaattttgagaatgatttaagtagaagttaaagttttatttttgttttaaaagtagaaaagtggataaaatcggggagttgttttaagtataggaaatggtttattgtttaatttagagttgagatgggttaaatagagaatagtaatgttataggacggaggtgaagtttaaggaggtagaagttagggtagtgaattttagtgggagttagggtgtagtggtggaagttgattagagaatataggatatatgattttttagggtggtgtgtgtgtaatttaaaaatatagatttaatattataattttgtattgtaaaatgaaaaataaaaaattaaagtttttattatattagtttgagaaataatatttaaataatttttttgattggtggtaatataaagatgatgattttttaagtaagtaggggatgggttagattttaataatagaagaaggtagagatgttgaaatagtaatatatattgtttttttgtgggtgcgtgtatgggtatggaggggtaggtaaggattgtaaaatggatgttgagttaatattggaatagtagaatgttaaggatttggataatagattgaaataaattaaatagtatttaataaggatttgtatattgggtttacgtttttgaaggaaacgtaattttggatagttgggttattaggatgatttaggttttgttgagaagttttttattaataaagatttaagggtattttttatgtttttggttattgtttgatgtaaaggaaggaaattgatgaggtatttgtatttaggattttttggtattaatggggagatatatttatgtttaaggaatgcggagttgtagtaggatttttaggaaagggcgtattatgagttagagtatttttgtaaggattacgaggtttgggtataaacgtgtggtttttattaaaattataatattattaagagtatttattatttattgttgtttagtaggtgttagataagatagtaggtattaattttttttttagaaatatttagtggaagtaagtgttattatttttattttatagatgagggtatggatttagaagggattaagaaaggttatatatgttatttaaggtagagtaggggatttaaatttaggtttgataaaagaattaagttttattagttttttttaaagttttttttattatagttatgaagggaaaggttttttaatttggattttaaaatattttatagatgtaattagaatatattttaaggaagaaggggaaaaataattttgatttgtttgtttattttttttgtttttaatttgaatattattttttttaggatttttttattgtttttataaattgggcgaggggtttttttttaaagtttttaaaataaagattattattttttatgtgtaattttaaaagttagtaagttttgaaaatttaaagtgttttcgtaagtttgtagtaagtttttttggtggtaaaagatgagtcgaattaatatgaaattttttttagtttttattgaaattatgtgaatatttatattttgatgtggaagtaataatttgtttgatgaaggggtgttgtttagatttggttgtagttattatggtatatatagtacgttgtacgtatattatttttttaaaagttaaatatttttgatgggtaaattataattggtttaaagggttttagataatggattttgaggttaggtgtagtggtttatgtttgtaattttagtatttttgggaggtcgtggtgagaggatgatttgaagttaggaggtcgagattagtttggttaacgtagtgaaatttcgttattattaaaaatgtaaaaattagttgggtgtggtggcgtacgtttgtagttttagttattcgggaggttgaggtaggataatcgtttgaattcgagaggtagaggttttagtgagtcgagatcgcgttattgtattttagtttaggagatagagtgagattttgttttaaaaataaataaataataataaagaaaatagattaagggattttggatttatattttatgtataaatgttattgtattacgattatttatttttgtaattttagtattttgtagagtgttttgtatataatagatatattataaatattttttaagtgaggaaataaggttaagaaattagttaagaagggaaaatggttagtgttttggaaatgattatggtttttaatttgtaggttaggtttttaatttttgaatgttatttttttcgttgattttgaaggttttataaatagttgttgttgattgagggtaagaaatatagttgttgtttttattaggaataaaaatagtttagtggttttatattgatggatttatatataattttagtttaggaatataaagtatagtaggtaaatttatatttcggattatatgggtagtgttataggattttgtgagtttgggagtttttgggtttgatttgttatatgtagtgatttttttagttttataatttttttatttgtaaaatagtaattaaagtagtttttaagggttttttaggtgggtttttattaagatagtttatgggagggacggtagttgtcgttttatattgtagagttttgcgtaaattttaggagtttttttatttttgtttattgtttttatttagtgtagtttgtttaaattttttatattttttttcgtttaaaaaaagtagagttaatgtaaaaagaggtagtttggattcgggtacggaggcggtttatttttattttgaataatggttaaagaattttgtgaaaagtagtcgtagtaatagttaggttttttgaattttaaggagtacggggtggtaatggggtggtaattattggttagtaaggattagatttaaatagtaaatttttaattgtaaggttttaggttataagagggttagatttgggaaggagaatgagttatatgagagggtagttttacgcgttttttgggggcggtttttttttatttggtaatataggatggtttgttgtattagtcgcgcgtattcgtttaagcggatttcggaattgtttttgtttcgtattttttcgaggtttttaggtcgtagcgttcgatttgtcgcgtgggcgcgggacgtcggggttgtggtttttaagcgggtttggttttcggatatttatagttttagtcggtttttgggatgggatcgggtcggaggaggtcgagatttttttaaacgttagttttaaagttcggttggaaagtaagttaattagagtttcgcgcggcggggaggcgcgggggcggggacgggggttggagcgacgaaggtttcgtttcggttaggtttgttgggttttcgacgttcgcgggagtagcgggaaattaggtttcgggagtggggcgaggacgtttttgttaagttttttttacgtttcggcggtcgcgaggaggtttttcgggcgcgaagaagacgttagtttattttagtcgtcggggagatcgtttaggtcgcgtttagtttcgtttttggttttgttttcgtcgcggagcggaattttttaagtcgcggtttgaggaggaaggaaaagggggcggttcgggagagtcgttgcgaaattagtaacgggcgggaattaggttgtttttttgagtttttttttttttcggtcggttgttaattatagttaaggttagagaaataggtttttttgtcgcggttatttgggcgttttggattcgtttttcggattcgttttcgtttttgtcgcggagtggaacgtttggaattttgaggggtataggtaagggggcggtttcgtttcgcgttttggaacgattttacggtttcgtttatattttcgtttttggttttattttcgtcgtagagcggaatttttagagtcgcggtttcgggggggacgaaaaaggaggcggttcgtgggagtttaggggaattcggtttcgggcggcggacgagttggtttttttgcgtggtagtgtggagtttttcgagacgggtgttagttttattcgaggtcggagaaagagggtcgtttatcgcggtcgtttgggtatttttttgagggttaagattgtagttttatttttggtttcgttttcgtcgtttagcggaattggagtagcgggatttagttcggaagaaaaagggggaaggttcggagaggtgttttagcgatatttttggcgtttgtgatttcgtttttagttatttgggcgtcgttttttcgggtaggttcgtagtttattttttacgggtttatagtttgaaatttggtatttattataatgtttcgtggttgttgataatttatagtttataattttcggtttggtatttattgtttattaaaatttggtttatataggaatttattggatagttagattaatgtaattaattttcgtaagtttttttttagtttttatgtatttattttatgtttgattttttcggttttttttttttttttttgattaattgaagtttattttttttttaacggttagtttagtttttttattagttttttttattttttgaatttttgtagttattggtttagtaagagtttaggatttagagttagtttattttgagtttaaatgttagttttgttatttataagtcgtatgatttttggtatttcgttttatatgtttgaatttaagtgtttttatttgtaaaatggagataattatagtatttattttataggatgatttaagattaagaggatgaatataaagtatttagtataagtttggttagtagaaaaatatttaataaattatagttaatttcgttgttatttggttataatgtattgttttttgttgttatttatgtttttatgtgtggatgaggtatatttttttaattggaatgtacgttatttattgaaatagttttttggtattttttattatgtttggtatagtgttgagtatatagttggagtttaattaatgttgttcgtatgagtaaatgaaattagttttgtttagttgcgtttttttatgtttggtttttaattaagtttatattagatattttagaatataaatttatggttttattttgttatttaattaaagtattaaattttatattagtttatatattattttatataatattttgtttttttaatattggtttttgaattatgtagtgatttatgtgatgtgtttttatgaagaatttgttgtggtttaggggtgaataaaattagatattgttattattattaaatgttttggaatttgaatatgtatttttgttagaatttttatgtatttatttttatttaaaagttgggattattgtttttttttattgtggtttttgtttttattgggtttttttttaggagttgattttgtagttatatgggaaataattgatgatttttgttttttatttggtatttttatttagtatagaaatatttttagttttttgattttatttttcgttaattttgttgtgtatatttgtattttttttggtgtataggtaatttatatttttcggttttggtttatgcgattgtatagtaatatataagttatgttttttaataagtttaaaattttgggataaaattaagaaggaaggttatttcgttttagtttttaaatttttaaagtaaattttagtgatttattttggattagaaagttgtattatataataaattagttttatattttagtatttttatatttttgaggtgtaaaatttttatattttggtttttatatttatgaagttattttttggttattattaatagaaatttgtttttaagttattttttaaatatttgttaagaattagatatagtataatgatagggaatgttattgtttttgaagttgatttatgatttttataaaaatgaagatttagaattggattttggggtagtattatgtatgatttttttgattttagttagaggatttgttattattttgttatagagattttagtttaggtagtttttagagagttttatgttaatatttaaggtggaaattaataaatgttttttttgtagggtttaggtttttggttttaaagaaaattattttatttttgatttagaaggttaattttgaatgaatttgttgaaaatgattaatttattaaatttagttatttttatgataatttagttgattggaaattattttttcgttatattttaaagaatgttgaatttgtttttgttttagttttttgtagttcgtttgaggttaagagataaagagaggaaatattagggaatataagatttttttatagtgaggaatatatttattaaatatatttaaaagaatatattttaaaagaatatatattttatttttgtttgttttgattttttgatgttgtatttggagattaatatgaaaagaaagtagtatatattggttaggcgtagtggtttatatttgtaattttagtattttggaaggttgaggttggtggattatttgaggttaggagtttaagattagtttggttaatatggtgaaattttatttttataaaaaatataaaaattagttgggtatggtggtaggtgtttgtaattttagttattcgagaggttgaggtaggagaattgtttgaatttaggaagtggagagtgtagtgagttaagattgtattattgtattttagtttgggtgatagagcgagattttgttttaaaaaaaaaaaaaaaaaaagaaaaaaaaagtatatattgataagaattttttaaattgaagattatgtttttatgtttatttagtttttttttttttttttttttcggattttaattagaatagtaaggagtagagataaagataaattagtttttaaaatgttgttatggagataaaatgatattaaataagtttattttgtgaattggttatgttgtaaattaatttttgtttaaatggtttttgataaatcgattgatttttagttgatttttttagatatatttagtattttaagtgaagttgttttatcgttttttgtttgtttgttttaaagataggaggtttttttgtgttgtttaggatggattttaattttttggtttaagcgatttttttgttttcgttttttaagtagttgggattataggtgtttgtttggtttgttttattatttttagtaagaacgattatgatgttgtttattgaagttagtagattttttttgtggggttaatgattgtagtgtgttttgaggaaaaataaaataaaataaaaaaaaattattttaatattttgaggaaatatttttttaaatattggtttttgttttgatattttttgttttttaatattggtattatttttgtttttttataatagagttttagaatatgggattaattttagatttaaaggaggatgttttttagaaatattttttgttttgtcgtacgtttgtttaaagtaagaaaaatagatgagagaattttgtttaaggattatagtatagatatagtaggaaaaataagggggtgggatttaaaggatattggatattgtgtatttttttatgtatattttggttatataatttgttttgggggattgatttttgaggttttattttttttttaatttagaggattttatatttttttttgaatttagtattcggtatttttgtgggagttgaggattttgaagaagagattgtttagagattttttattagggtgaggttagtttttcgtatttggggattttatatgttaattagtaatgtagaaattttaaattttgtttttattttttagtagttttatttgtttgatattgaggaagtagatatttggatgagatttgaattgggttttgtatattgtttataggttaaaggtaatgtgttgaagagataattttgaaagagtaatgggaaaggagattttagaaattgattttatgaggtagaataatttttgttttaattttatagttatagggtatttgttgatttttaaaagatgttattgttatgtttgtttttttaagagatggtgtttcgttttgtcgtttaagttggagtgtaatggtataatcgtggtttattgtagttttaaatttttaggtttaagtagttttttatttttagttttttgagtagttaggagtataggtatataa

SEQ ID NO: 199 - DNA, 5388 bp, Artificial Sequence
  chemically treated genomic DNA (Homo sapiens)
tgaggtttattgggttatgagaatgaggtggtgtttgggtatgagtgaagttattttagttttattgttttttgttaatagttataaattttgaattaattttggatagttggaaagaatggggaataatagaattggaaagtatttttttataggcgattttgtgagttatggttattttgagaagtaggtagggtttagagatgggtattttattttgtagatgagaggttagaattagaaattggaaagggaggtagagggtttggatgtgagattttgattcgtgatagggaagggggagcggagtggggaaatgggtattttggggtagaagtagggggagaatttaattaagaatttgtttttataggcggaagagcggtataaagtaggtcggttcgaggaggtagtgcgttggggggttcgggttcggaaatttattttggttagttttgttgtttggtttgttgtttttattttgggttttttgttgttgtggttgtttttttacgttatcgtttaggttgagtgattttggatggtttttgttgagagttagtcgagattttttggattttgtaatgcggtattgttaaggttttgtgatagtagtggttggaaggattttggttggaaggatggggatttttttaaggggttttggaagagtttttttagttttttataaaaggagggtagtagttgagattgatgagaggagggtagtttgttttgtttttttagggttttttatttttattttttttattttagtttattttagggtttttatttagcgggaggggttgaagattaggtttggttttattagaatttattttgtaataaaagttttttttagtggtgaaatatttttgtttaattgttttttttttgtttttttttgggtttttggtgagagttagattggatatttgattgatagtagaagttagtatttattttatttaggagttttaagagaaggaaataatttttattttttttttttggaagtttttttttttggaaagattttagttttttttttgtacgtttatagagattttgaggttaagagtagtagtagttgttattatttattatttattatattttaggttgtgttttaagtattttatattttttaattttttttagtttttagttatttagtagatgtttgtattattatatttattatatgaatatattatatatgataggtattaattatttgagtgaaaattggaagaaatgttttaaaatgatagtgttttcgttttatatttgaagaaataaatagatttgtataaggtttttagttattaaatggtagagttgagattgaatttagatagtttggttttagagttgagagaggagtgaaagagttgggtaatagtaataattattttgtatatggagatttgagtgattaaaatggatttttatattttttattttggattttataatattttaaattttttttaaaattatgaagtatattatatatataggaaaatatttaaaataagtatatagtttattaatataaagtaaacgtgaataattatatttagtaaagaaattggaatattgttaatattttaaagttttttttatattttttttaattattgttattttttttttttttataggtaattattattttgatttttagtagtgttatttaattttgtttgtatttgaattttatataaatggaattatgtattttttttatgttaatattgtgagattcgttaatatttggaataggtgtagtttttattgttgtgtagtatttagttatatgaatgtattataatttgtttatttattgttggtggattttgggatgtttgtagtttggggttattatgagttatgttttttggagtacgtttgttttggtaagtattttattataatttagagtttagaagagtatttaaaggaattggagatgttgtatattgaagagattagaggggaaggagaggtatatgatggttgtttttagtgtttttaaatgttttaggaagaaggaagagaatagattggtggttttagaagttagaattgaaatagtgggtagaagataaatatatagggtagtgtttttaatatagttttatagtggaattatttggaagttttaaaaagtagttaggtttgggttttatttagattatattttgatttaatcggtgtgaggtatagttttggtattaggattttttagttttttaattaattgtagtatatatagtttgagaattattgttttatagataagattttattgtattttttttgtaatttttaaattaggaaaaaagggtaatatattttagaaagtgtttttgtttttttgtttgtttgttttgagaaggagtttcgttttgttgtttaggttggagtgtagtggtataatttttgtttattgtaagttttgttttttgggtttatattatttttttgttttagttttttaagtagttgggattataggcgttcgttattatgttcggttaattttttgtatttttagtagacgggattttatcgtgttagttaggatggttttgattttttgatttcgtgattcgtttatttcggttttttaaagtgttgggattataggtatgagttattgtatttggtttgttttttgtttttttttttttttttaatttttaagttttgggatataagtagaatatgtaggttcgttacgtaggtatatatgtgttatggtggtttgttttatttattaatttgttatttaggttttaagttattatgttttgttaattttcgtatttttagtatagacggggttttattatgttggttaggatggtttcgattttttgatttcgtggtttattcgtttcggttttttaaagtgttgggattataggtgtgatttatcgcgttcggtttaacgtatagattttaagtgtgtagtttgattattattatttttttttgagatggagtttcgttttgttatttaggttgaagtgtagtggtgtgattttattgtaatttttgttttttgggtttaagtgatttttttgttttagttttttgagtagttaggattataggcgtgtgttattacgttcggttaatttttgtatttttagtagaaatgggattttattatttggttaggttggtttcgatttgattttgtgatttatttattttagttttttaaagtgttggtattatacgcgtgagttaatcgtgtttagtcgacgaatgttttaacgtaaataaatttgtgtagttagttatttattatttataggaatataatatttgtagtatattagtaagtttttttatgttttttattattatttttattttcgatattgatttatggaaatttttttaatttggtttttgtgtttttgtgataagtttcgtttattagtaatgtttggtataaattattttagatttattttgtattttttttgttgaagtttagaaattggttattttttttgaaaagatttagttttttttattgggtattgttattgagaaattagtatttagatattaggcgttttattgggaagttattgtttagggtattttgaaagtagaggtaagagttagtaaatagttaatgttatttattttatattttttaaaaatttttttaaaaattttagttaattatagggttttttttttattttttttattttagattttagatttttatagttaagaattttggtttttagttatattaatatattgattatttagttttagaattattattttgttatattattaaataataaatttaagtaaagtttaagattttttgtaattttgtttttagattgatggtatagagttatagtattttataaaaagttatttgaatttatttttttttttttataattgtaattttaaagtgttatttttaagatagttgtagggagataagttaattttttttttttttggttggaatataatttttatagggtaggggtgtgtgtgttgttttattgtttttagtttagtttttaggttttagacggttataaaaatttgttagtgaatgttaggtttgagttatgtattgagttatttttggtagaatttaataatttggtgggtttagaatagagtgtgatataaggtttttgggagagggtggaagattgagaaagtgtgtaaattttagatagtaaacgttagggttttggatgtatttaggaggagttgaagcggatatagaaaaggttttttttggtattttaagttcgaattaagaggttaagttggagtttaagttgcgtgtgtttaaatgttttaagggttggagtgtatttaggataggcgttttgggttaggttgttaatattgaaaagagtttgttgggcgttgtggtttaagtttgtaattttagtattttgggaggttgaggcgggaggatcgtttgagtttcgaagtttaaggttgtagtgagttatgatcgcgttattatattgtagttttagcgtgggttatagagcgagattttgtttgaaaaaagagaaaatgttgaatttagttagggatgtttggaggagatcgagggaattttgtttaagtttgggaattagaggcgcgggaaggttttgttttttcgttatttagagattacgttttttagtaaatttaattttcgggttttattttaggtttttaagtttacgtgataataagtttcgttttttgttgtttcgtagatgttattcggtgattggtcgcgtttgaagtcgcgtttcggcgtcgcgttgtagttttaggtttagtcgagcgtcgatttacgttttagttttaattgggcggtcggtttttaattggaagggtttttgagttttagttttcgggcggcgttgattattggcgggtaggatggaggcggagttttgggttgtcgttttttttcgggggttaaggtgagcgattgtaggtaaattcggcgatagcgtagttcgcgtcgattttggtttttttgtttgtttcgttaggtgagtttgcgttagattttcgttttttttttgcgttcgttcgaatgcgtttgcgcggtaatagtcgtttgtttttgcgttttttttttatgttttttgggtatatttttttatttttttttatgttttgttattatttcgtttttaggtttttttgcggggtttttttagttcgggttttttttttatttttttttattttttaggattttggcgttttagttgtaagggttgcgttttcgggagtcgttatgcgggtcgttttagagtttgtgggtttttttgtttttattgtttttttttttcgcgtagg

SEQ ID NO: 200 - DNA, 5388 bp, Artificial Sequence
  chemically treated genomic DNA (Homo sapiens)
tttgcgcggaggaggagggtagtgagggtagggaggtttataggttttgagacgattcgtatggcggttttcgggggcgtagtttttgtagttggggcgttagggttttggggggtgggggggggtgggggaaggattcggattggggagatttcgtagaagagtttgggggcgggatgatggtagggtatggaggggagtggggagatgtgtttaggaggtatggggaaggggcgtaagggtaggcggttgttgtcgcgtaggcgtattcgggcgggcgtaggaaggggacgggggtttagcgtaggtttatttgacggggtaggtaaaggagttagggtcgacgcgagttgcgttgtcgtcgggtttgtttgtagtcgtttattttaattttcgggggggggcgataatttaaggtttcgtttttattttgttcgttaatggttagcgtcgttcgaagattgaggtttaaaagtttttttaattggaaatcggtcgtttaattggggttggggcgtgagtcggcgttcggttggatttaaggttgtaacgcgacgtcggggcgcggttttaaacgcggttaattatcgagtggtatttgcgggatagtagagggcggagtttgttgttacgtgggtttggaggtttggaatgggattcggaagttgggtttattgggaaacgtgatttttgggtggcggggaagtaggattttttcgcgtttttagtttttagatttgagtagggttttttcggttttttttaagtatttttaattgaatttagtattttttttttttttagatagggtttcgttttgtagtttacgttgaggttgtagtgtagtggcgcgattatagtttattgtagttttgaatttcggggtttaagcgattttttcgttttagttttttaaaatgttgggattataggtttgagttataacgtttagtaagttttttttaatattagtagtttggtttaaagcgtttgttttgagtatattttagtttttaaaatatttggatatacgtagtttggattttagtttggttttttagttcggatttaaaatgttagaggaagttttttttgtgttcgttttaattttttttaaatatatttaaagttttagcgtttattatttgggatttatatatttttttaattttttatttttttttaaaagttttgtattatattttgttttaaatttattaggttgttagattttgttaggagtgatttagtgtatagtttaaatttggtatttattaataaatttttatgatcgtttaagatttaggaattagattgagagtaatgaaataatatatatatttttattttgtggaggttatgttttagttaaagaggaaaagaattaatttatttttttatagttattttagaaatgatattttgggattataattatgagggaagaaaaatgaatttaggtaattttttatagagtattatgattttatattattaatttaaaggtaaaattgtaaaaaattttgaattttatttagatttgttgtttggtaatataataggataataattttgaagttgagtaattaatatattgatgtgattggaagttaaggtttttaattgtgggaatttggaatttggaatggggaaagtggagaaagaattttatgattgattggaatttttaaaaagatttttaaaagatgtaaagtagataatattaattatttattggtttttatttttgtttttagaatgttttaagtagtaattttttagtagaacgtttagtgtttagatgttgattttttaataatagtatttaataaaaggaattaagtttttttaggagaaatggttaatttttaggttttagtagggaaagtataaggtgagtttggagtgatttgtgttagatattattaatgagcggggtttattataaggatataggaattagattgaaagggtttttataggttaatatcggggataaaaataataatgaagagtatgagggaatttgttgatgtgttgtaaatgttatatttttataggtggtgagtgattgattatataggtttatttacgttaaaatattcgtcggttaggtacggttaatttacgcgtgtaatattagtattttgggaggttgaggtgggtggattataaggttaggtcgagattagtttgattaaatggtgaaattttatttttattaaaaatataaaaattagtcgggcgtggtggtatacgtttgtaattttagttatttaggaggttgaggtaggagaattatttgaatttagaaggtagaggttgtagtgagattatattattgtattttagtttgggtgatagagcgagattttattttaaaaaaaaataataataattaagttgtatatttaagatttatgcgttgggtcgggcgcggtggattatatttgtaattttagtattttgggaggtcgaggcgggtggattacgaggttaagagatcgagattattttggttaatatggtgaaatttcgtttatattaaaaatacgaaaattagtagggtatggtggtttaaaatttagatgataggttgatgggtgaagtaaattattatggtatatgtatatttacgtagcgaatttgtatgttttgtttgtattttagaatttaagagttaaaaaaaaaaaaaaaaataaagaataggttaggtgtagtggtttatgtttgtaattttagtattttgggaggtcgaggtgggcggattacgaggttaggagattaagattattttggttaatacggtgaaatttcgtttattaaaaatataaaaaattagtcgggtatggtggcgggcgtttgtagttttaattatttgggaggttgagataggagaatggtgtgaatttaggaggtagagtttgtagtgagtagagattgtgttattgtattttagtttgggtaatagagcgagatttttttttaaaataaataaataaaaaaataaaaatattttttaaaatgtgttattttttttttttgatttagaaattgtagagggaatataataaaattttatttatagagtagtagtttttaaattatgtgtattataattaattgggaaattgagaaattttgatgttaaggttgtattttatatcgattaagttagaatgtagtttggataaagtttaggtttaattattttttaaagtttttaggtggttttattgtgaagttatgttgagaatattgttttgtatatttattttttatttattgttttaattttaatttttgagattattaatttatttttttttttttttttggagtatttgggaatattgaggatagttattatgtgttttttttttttttttagtttttttagtgtgtaatatttttagtttttttaggtgtttttttggattttgaattatggtaaggtgtttgttaggatagacgtattttaaaaggtatgatttataataattttaaattgtaaatattttaaagtttattaatagtaaatggataaattgtgatatatttatatgattgaatattatatagtaatgaaaattatatttattttaaatattgacgaattttataatgttaatatgaaaagaatatatgattttatttatataaagtttaaatgtagataaaattaaatgatattgttagaagttagaatggtggttatttgtgggaagaaaggaagtagtagtgattgggaggagtataaaggaggttttgaagtgttgatagtgttttaatttttttattgaatgtggttatttacgtttgttttgtgttaatgaattgtatatttgttttgggtatttttttatatgtatgatatattttataattttaaaaaaaatttgaaatattatgaggtttaagataaaagatatgaaaatttattttaattatttaaatttttatgtataggatggttgttgttgttatttaatttttttattttttttttagttttggaattaaattgtttgggtttagttttagttttattatttagtagttgaggattttgtgtaaatttgtttgtttttttaagtataaaacgagaatattgttattttagaatattttttttagtttttatttagatagttggtatttattatatgtgatatatttatatgatggatatgatagtatagatatttattgagtgattgaaaattggaggaagttaagaaatataaagtgtttagaatatagtttggaatatagtaagtaataaatagtagtagttgttattatttttggttttagagtttttgtggacgtataagggagaagttggggtttttttaagaagggaaatttttagaagaagaaaataaaaattgttttttttttttggagtttttggatgaggtggatgttggtttttgttattagttagatgtttagtttggtttttattaagggtttaagggaaagtaggaggagaataattagataggagtattttattattaaaaaaggtttttattataaaatgaattttaataaaattaggtttggtttttaatttttttcgttgggtagaggttttagggtgggttagggtaggggagatgggggtggggggttttgaaagaatagagtaggttgttttttttttattagttttagttgttgttttttttttataaagggttagaagagtttttttaaagttttttgagagagtttttatttttttaattaggatttttttaattattgttgttataggattttagtaatgtcgtattgtaggatttaggaggtttcggttggtttttagtagaggttatttagggttatttagtttgagcgatggcgtaggagagtaattatagtagtaggggatttagaatgaggatagtaagttagatagtaaagttggttaggatgagttttcgggttcgggttttttagcgtattgttttttcggatcggtttgttttatgtcgttttttcgtttgtgggggtaggtttttggttaggttttttttttgtttttgttttaaggtgtttatttttttatttcgtttttttttttttgttacggattaaaattttatatttaaattttttatttttttttttagtttttgattttaattttttatttgtaaaataaggtatttatttttgggttttgtttattttttagggtggttatagtttataagatcgtttatgggaaagtattttttaattttgttattttttattttttttaattatttaagattgatttagaatttgtaattattggtaagaaatagtgaggttagagtaattttatttatgtttaaatattattttatttttatagtttaatgggtttta

SEQ ID NO: 201 - DNA, 5571 bp, Artificial Sequence
  chemically treated genomic DNA (Homo sapiens)
gaaatttcgtttttattaaaaatataaaaaattagttgggcgtggtggtgggcgtttgtagttttagttattcgggaggtcgaggtaggagaatggcgtgaattcgggaggcggagtttgtagtgagtcgagattattttattgtattttagtttcggtagtagagcgaaatttcgttatatatataaaaaaagaataagtgaaaattagttcggcgtggtggtttatttttgtaattttagttaggtgggaggtttaggtagtaggatcgtttgggcgtaggtttaggttgtagtgcgtcgtgatttattgtgttattgtatttcggattttcggtgattagagtgagattttgttttaaaaataaataaataaaaattaaaataaaaaaagaaatatttagtttttgttttgtaaagatagggtttttttatgttgtttaggttgtttttttgagtttaagtaattcgtttgtttcggttttttaaagtgttgggattataggcgtgagttattatgtttggtttttttaaatttagaatgttttttgtttggttaggcgcggtggtttatgtttgtaattttagtattttgggaggttgaggtcgtcggattatttgaggttaggagtttgagattagtttggttaatttgatgaaattcgtttttattaaaaatataaaaattagtcgggtgttgtggcggacgtttgtaattttagttatttgggaggttgaggtaggagaatcgtttgaattcgggaaggggaggttgtagtgattcgagattatgttattgtattttagtttgggcgagagtgggattttgttttaaaaataaataaattaaataaaataaataaaaaattgagtaaattttttttaggagataaatgagtgatgtagatttaatacgtttttatttgattaattataaatagcgtatagagttttagttatataattttagttatataaatgtattgattagatttatagatattttaaaaaattgtgtatcgatattatttttaaatttttttttaaatttgttttttaaaaaaatttcgtgattatagaatttgttgaagttattgtttttttgttttttttttttgtataagtatatagtttttggatgaagttatttttttgataatgatttgattaaatttatattaggtagaatatgaaaattatttaaggattaatttggatattgtttaaattaatattaataaatgtttttttttttagagaattgttagtataattgtggttttttatttttttaaaagtatttgttatttaattattagggtgatttttttgattttttgttagattttttgagatagtataaatagtgttaattttattaagattatatttcgataaattaaaatattaagttttttattttcgaggagtaatttttgatttataatatatttgaatgtttattaattattttttaaagtagttttaagtaaattaaagttgtttgttaagtaaggtttatgttttgtaatttttagttgtgaagtttttattatataaagtagatatattaaatgttaattattttagttttaattaaatatttagttttttaaagatttagaaaaagtgaaaaaggttgaagttgatatatatttttttttttaaaaggtttaaaagatttattagaaataattattttaaattatatttttttttaaatggttaaaaatcgaattattaatttagtagtttatttttggtattttttaggtgtaagatcgtttgggttgggcgcggtggtttacgtttgtaattttagtattttgggaggttaaggtaggtggattataaggttaggagatcgggattattatggttaatacggtgaaatttcgtttttattaaaaatataaaaaattagttaggcgtggtggtaggcgtttgtagttttagttattcgggaggttgaggtaggagaatggcgtgaatttgggaggtagagtttgtagtgagttaagattgcgttattgtattttagtttgggagatagagcgagatttcgttttaaaaaaaaaaaaaaaaaaaaaaaggtcgttttaaaaaatattattattataattacgattaatattattgttattattattgttaatatttattagaagtttattttgtattgggttatatgttttataaataagagttttatttgttttttataataattttatgaggtagatgttgttattatttttattttgtttaaagtttaataaggttaagtaatttgattaatgtttaattagtagttgttagatttcggaattgaaattaggttaatttagtttaaagtttttgtttttaatttttatgttttcgaagtttatttaatttatttaaatttggtataaattgattttaattatggtttttttgttagaatttattatagtttttttttttattaataaatgttggataaagtatgtatttagggaggttgggtatggtggtttatatttgtaatttaaggaggttgggtatggtggtttatatttgtaattttagtattttgggaggtcgaggtaggcggattataaggttaggagttcgagattagtttggttaatatggtgaaatttcgtttttattaaaaatataaaaattagttgggtatggtggcgggcgtttgtaattttagttatttgggaggttgaggtaggagaattaattgtttgaattcgggagatggaggttgtagtgagtcgagatagtgttattgtattttagtttgggtaatagggcgagatttcgttttaaaaaaaaaaaaaaaaaaagggtatttaaggaataggaagataaagtataatggaaaagtaaatgaataaaaaggatttaaaaaaataaattttaattgttagattagtggatagtgaattaatgttttgagtttgtttattaatttgtggtagaattataattgttttttaaagagtggaaaggttttgaataaaagtggagaggtagagagggtttttttaggataggttgattgttttcgtaaaggtaaagggtttgtaaagtgttaggcgagtgggaataagtgggaatagttttgtttgattatatttgagggtttgagaaaggaaagggagggtagaagggatggaagtgggaattatatatgtttaatgatgttttgttcggtgttaaggatagttttagattttgataagcggaaagttttgaatatttaggaggtgaatttgggttattttatttttttttttagttgttgtatgattttgtgttattttatttatgttttatttttttatttgtaaaaagggagtaatttttgtttttttgggtttttttttagttataaaaaatgaatgagttcggttatagtatataaataaaaggaaaatatgtaatattttgtaggataaatttataaaagttgtggaggatttgggtatttttataaagtaagtattgtagaaaatttttaaaggaaatatttaaatttattaatgatagttatagggattttgattttttttttaaatggtaggtattttaaaaaattaaaatagaatgtagttagtttttaattatttaggttattgataatttaatttatggattatatagtattttaatttatttattttatacgtcgttattaattttatatgaagtttaaaaggataaaggatgtaagtggaattggttagtgtttcgggttatttttaagggaggtagagggtggggggttttttttgagataagatttggggttggttaataattgttggtattgtttgtttggtaataataggttgatgaaaaggtgattataacgtgaaaattggttaaattaagcgtatttttttattttcgttttagatgaggaatttttcgtttttatagaaggggttgaggtagtatttggtattataatattaatatttgtttcgtgattttttttttattcggttttttgatatatatttttttttagaaattaggattcgttggtgtttttgtatttttaaaatgggaatttcgtggttgagtttttagtcggtcggaacgattgagggttgtatttttttttcgtaggagcggggttttcgtttttagttttgttttaggtttgatttttttatttttttcgtgatttatgttttgcggatttttcgttttcgacgcgttttttaatatataaatttttagaattcgtttttagtttatagcgcgacgttagttcgttttagtcgatttggaggtttcgggtttgagttatatagaaagattattttcgtcggtatttttatatatagttcgatattcggcgcgtcggttttttcgtttgatatattaacgttcgtcgttttcgcgtaatttgttatgtttcggttcgagtttttgatttaaaatttttagcgaaacggagagtcgtagagtcggtttcgggcggtttttgatggttttgttattgtttgggtttgaatcgatacgtttttttttattttttttttttcgcggttttatatttagttttcgtttttttttacgtttcgcgtttttttttttttattttggcgttttttttttttcgttacgtcgtggcggcgtagagattattttgatcgcgagagttgggcggggcgggggcggggcgcgtcgagttatgtagattaatcggtttttggttggttggagtagcgttggtaggggcggggtcggggcgcggttatagagcgcgcggggcgggggtcgaggggagtcgtttagtttcgtcgtttttttatttttttttttttttcggtcggttcggtagttttgtttttcgttttggtttttcggagaggtttcgtttcgttttcgttcgtcgcgtttttttcgcgcgtttttttcgtcggcgcgttttttttttttatttttggttgcggggcgagtcgggcgtttgttgtagcggtcgcggtggttgaggaggttcgagaggagtcggtggtagcggcggcggcgggatcggtagtagtagtagtagtagtagtagtagtaattattagttttttgtttcgcggcgttgtcgtacgagttttacgagtcgtttatttcgtcgtttttagcgttgttcgatttcgttggcgcgttttttcgtcgttagtttcggtagcgtttttagttgtttttcgattcgttttcggtttttcgcgttagtcgtagttatagtcgtaacgttattcgtagttatagttatagttatagttttaggtatagttttcggtatagtttcggtttcggtttttgcggtagtttttttgggtatcgtttttgcgtcgatattttggaggttgggatgtttttgtttaaaattaattcgtttgtttatttgcgcgtcgcgttttgtaacgatttgtacgttattaagttggcgttcggtgagagtatttttcgttttcggttcggggatgcggggcggcggcgggattttttgggtggggagttggcggttcgcgggtcggtattgagttttcgtgttttttttttttttagg

SEQ ID NO: 202 - DNA, 5571 bp, Artificial Sequence
  chemically treated genomic DNA (Homo sapiens)
tttaggaaagggggaagtacggggatttagtgtcggttcgcgagtcgttagttttttatttaggagatttcgtcgtcgtttcgtattttcgggtcggaggcggggggtgtttttatcgggcgttagtttggtggcgtgtaggtcgttgtagggcgcggcgcgtaggtgggtaagcgagttgattttggataagagtattttaatttttaggatgtcggcgtagggacggtgtttagaggagttgtcgtaggagtcggagtcggggttgtgtcgaaggttatgtttggggttgtggttgtggttgtggttgcgggtggcgttgcggttgtggttgcggttggcgcggaaggtcgagggcgagtcggaggataattgagggcgttgtcgggattggcggcgggagggcgcgttagcggggtcgggtagcgttgagaacggcggggtgagcggttcgtggggttcgtgcggtagcgtcgcggggtaggaggttagtggttgttgttgttgttgttgttgttgttgttgtcggtttcgtcgtcgtcgttgttatcgatttttttcgggtttttttagttatcgcggtcgttgtagtagacgttcggttcgtttcgtagttaggagtaaaggggaggagcgcgtcggcggggagggcgcgcggggagggcgcggcgggcggggacggggcggggttttttcgggaggttaaggcggggagtagggttgtcgggtcggtcgagggaggagagggggtggggaagcggcgggattgggcgatttttttcggttttcgtttcgcgcgttttgtggtcgcgtttcggtttcgtttttgttagcgttattttagttaattagaggtcgattgatttgtataattcggcgcgtttcgttttcgtttcgtttagttttcgcggttagaatggtttttacgtcgttacgacgtggcgggaaggaaaaggcgttaaaatggagggggaggggcgcggggcgtgaggggaggcgggagttgggtgtagggtcgcgagggaggaaggatggggaggggcgtatcgatttaaatttaaataataataaagttattaaaggtcgttcgaggtcggttttgcggtttttcgtttcgttgagggttttgggttaagggttcgagtcggagtataataagttgcgcggagacgacgggcgttagtgtgttaggcggggaggtcggcgcgtcgggtgtcggattgtgtgtggggatgtcgacgagggtggtttttttgtgtgatttagattcgagatttttaagtcggttggggcgggttgacgtcgcgttgtaggttgggggcggattttgggggtttgtgtgttggggggcgcgtcgggggcgaaggattcgtaggatatgagttacggagggagtggaggagttaggtttggaatagaattggaggcgggagtttcgtttttgcgggaaagggatgtagtttttagtcgtttcggtcggttaaaagtttagttacgggatttttattttagaaatgtaaaagtattagcgaattttgatttttgggaagggatgtgtgttaaagggtcgggtaaagaggaaattacgaagtaaatgttagtgttgtgatgttagatgttgttttagttttttttgtgagggcggaaaattttttatttaaaacgagggtgggagggtgcgtttgatttaattagtttttacgttgtagttatttttttattagtttgttattattaggtaggtaatattagtaattattggttaattttaagttttgttttaaaggaaattttttattttttgttttttttggaaataattcggaatattgattaattttatttgtattttttgtttttttaaattttatgtagagttgataacgacgtgtgaaatgagtaaattaaaatattatataatttataaattgaattgttagtggtttaagtaattgaaagttaattatattttattttaattttttgaagtgtttgttatttaaaggaaaaattaggatttttatagttgttattagtgaatttaaatgttttttttgaaagttttttatagtgtttgttttataaaagtgtttagattttttataatttttatgaatttattttataaaatattatatattttttttttgtttgtgtattgtggtcgaatttatttattttttatgattaggagaaaatttaagggaataagaattattttttttttgtagataggaaaatgaaatataaataggatggtatagggttatatagtagttaagagaggagatgaaatgatttaaatttattttttgagtatttaaagtttttcgtttattagggtttaaaattgtttttggtatcgaataagatattattaaatatatgtgatttttatttttattttttttattttttttttttttttttaaatttttaaatgtagttaaatagaattatttttatttgtttttattcgtttagtattttatagattttttgtttttgcggaagtaattaatttgttttgggagagttttttttatttttttatttttatttaaagtttttttattttttaggaaataattgtagttttattatagattgatgaataaatttagagtattggtttattgtttattaatttgatagttgggatttgtttttttaaattttttttgtttatttatttttttattatattttgtttttttattttttgaatgttttttttttttttttttttttgagacggaatttcgttttgttatttaggttagagtgtaatggtattatttcggtttattgtaatttttatttttcgggtttaaataattggtttttttgttttagttttttaagtagttgggattataagcgttcgttattatgtttagttaatttttgtatttttagtagagacggagttttattatgttggttaggttggtttcgaatttttgattttatgattcgtttgtttcggttttttaaagtgttgggattataggtgtgaattattatgtttagtttttttggattataggtgtgagttattatgtttagtttttttgaatgtatattttatttaatatttgttgataaaagagaagattataatggattttaataaaaaggttataattaaagttaatttatattaaatttaaatgaattaagtgggtttcgggaatataaaagttgggagtaagggttttaaattaagttagtttggttttaatttcgggatttggtagttattagttaggtattggttaagttatttaattttattaagttttagatagaatggagataataatagtatttattttatagggttgttgtaaggagtaaataaaatttttgtttgtaaagtatataatttagtatagagtaaatttttaataaatattagtaatgatgatggtaataatgttgatcgtggttatgatgatgatgttttttaaaacggtttttttttttttttttttttttttgagacggagtttcgttttgttttttaggttggagtatagtggcgtaattttggtttattgtaagttttgttttttaggtttacgttatttttttgttttagtttttcgagtagttgggattataggcgtttgttattacgtttggttaattttttatatttttagtagagacggggttttatcgtgttagttatggtggtttcgattttttgattttgtgatttatttgttttggttttttagagtgttgggattataggcgtgagttatcgcgtttagtttaaacggttttatatttagaaggtattaaaggtaaattattggattaatagttcgatttttaattatttggggagagatgtgatttaaaatagttgtttttagtagattttttaggttttttagaaaaaaaaatatgtattaattttaattttttttattttttttaggtttttgaaggattaaatatttaattagagttaaagtgattaatatttaatatatttattttgtatagtgggggttttatagttggaagttataaaatatggattttgtttggtaaatagttttgatttatttaaaattgttttaaaagataattagtaaatatttagatgtgttgtgggttaaaagttatttttcgagagtagggaatttgatgttttgatttatcgaaatatagttttaataaaattagtattatttgtgttattttaaagaatttaataaagaattagaaaaattattttaataattaaatgataagtgtttttggaaggataaaaggttataattatgttaatagttttttgggaagaggagtatttattaatattaatttgaataatatttaaattaatttttaggtggtttttatattttgtttgatatgggtttaattaagttattgttaaaggaatgattttatttagggattatatgtttatgtaaaaaaaaaaaataaaaaaataatgattttagtaagttttgtagttacgaaatttttttaaaaaataagtttagaagaaagtttgaaagtgatatcggtatataattttttaaagtgtttgtaagtttagttaatgtatttatataattaggattgtataattaagattttatacgttatttataattaattaggtagagacgtattgaatttgtattatttatttattttttaaaaaaaatttatttagttttttatttattttatttagtttatttgtttttgagatagagttttattttcgtttaggttggagtgtagtggtatgatttcgggttattgtagtttttttttttcgggtttaagcgatttttttgttttagttttttaagtagttgggattataggcgttcgttataatattcgattaatttttgtatttttagtagagacgggttttattaggttggttaggttggttttaaatttttgattttaagtgattcggcggttttagttttttaaagtgttgggattataggtatgagttatcgcgtttggttagataggaaatattttaaatttaaaaagattaggtatggtggtttacgtttgtaattttagtattttgggaggtcgaggtaggcggattgtttgagtttaggagagtagtttgggtaatatagggaaattttgtttttataaaataaaaattgaatatttttttttttgttttaatttttatttatttatttttgagataaagttttattttggttatcgagggttcggagtgtagtggtataatggattacggcgtattgtagtttagatttgcgtttaagcgattttgttgtttgagttttttatttagttggaattataggggtgagttattacgtcgggttaatttttatttgttttttttttgtgtgtgtgacggggtttcgttttgttatcgaggttggagtgtagtggagtgatttcggtttattgtaagtttcgtttttcgggtttacgttatttttttgtttcggtttttcgagtagttgggattataggcgtttattattacgtttagttaattttttgtatttttagtagagacggggtttt

SEQ ID NO: 203 - DNA, 5501 bp, Artificial Sequence
  chemically treated genomic DNA (Homo sapiens)
ttaatgggtatagataagaaagtttgttttttttatttgcgttagttttttagatttgttttagttagttattataattttggtggtttaaatgatagaaatttatttttttttagtttcggaggttagaagtttgaaataaaggtgtgaataggattatattttttttgaaggttttagggaggttttatttttggtggcgtttagtttttgttggttttaggtaatttttggtttgtgattgtatttttgtttttgggttatattgttgtcgttttttttgttatatttttgttgtgtattttttataagaatatttgttattggatttagagttaatttgaaaaatttagggtaagtattttgttttaagatgttttatgtaattatagtttgttatatgaggtaatgtttataggttttggagattatgatgtggatatttttttgggggttattatttagtttattatagtttattttttggtattttaaaatttatatttgttttatatgaaaaagatatttattttttttaatattttttaaagttttaatttatatagtatgaattaagattaaatttgtatttatatattagtttagaagttttgtattttattatttaagttagatgtgggtgagatttcgtgtatgatttattttaggattaaatttttttggttgtggatttgtgatattataggttattagtttttaaataattttggaatttggataaataaatttatttaaaatgatgtaataggtatatgatagatgtttttattttgaaagggaaaattggaagggataaagaagttattatttttaattaattttgatttagtagagaaaattttattaggatttaaggtttgtaaataattttttagtttgaagtgtcgtttattgggtttataatagttgtgtagatttttgtgtttgtttatagtagaattatgggtttttttgtatttatggtggttttataggtttttgagtttgtgtttatagtgattttataggtttgtgtttttgtatttattatttttgtttgtttttttggtttttgtttttgtgtttttggttttgtttttggagttatttttgtttttttttgaaggatcgtatgtttgtagtttagtagttttattagtttattttttgttcgtagtagtttggattttaatagtttttttttattttatattgtttttgttatttttaggttaagttgtttttgttgatgtaatatttttaaaaattttgtgggttttttgtgtaatgttatggagtttaatgttattagataagagggttttttataaattttttgggataattttatttttatttttgatttttattgagatggttgaatgagtttaagagttttatgttttattttttcgtgttattatatttagtatattttttttatttttgtaaaagagatggggtttcgttatgttgtttagtttggttttgaatttttgggttcgatttttttgtttttattttttagagtgttgggattataggtggtcgtgtttgatattttagtaaaattgtaatttaagttattaattttattgagtatttacgtggaaataaaaattaagttttttttttcgtggagttggtattgtatattggtgggaggaggagtgagtagggagtgtataatgtgtaattacgtgtgaatatttttagttttttttagtattgtgaaggaaatatataagtaaaaatttgggtttggtttaggaacgtgataagggtgtgattgttaggttgggatttgaatgatgagaagaaggtagttagggaaagaattatataatgaggggataatgttgagtaggtatatgtatgtatgaaatatgggcgtgtgtgtgttttaaataatgagaaaagtggtaagaaatgtagtaggagagtaggtaggaggtggattatataaggttttgtgggttatgaaaaggagtttggatttttttttttttttttttttttttttggagatttatttttgttgtttaggttggagtgtagtggttcgattttggtttattgtaatttttatttttagggtttaatttttttgttttaattttttaagtagttgggattataggcgtttattattacgtttggttaatttttgtatttttagtagaaatggggttttattatgttggttaggttgattttgaatttttgattttaggtgattcgtttgttttagttttttaaagtgttggaattataggtgtgagttattgcgtttcgttaggagtttggattttattttaagtgtagtgggagggtgtataaatagggatatattttgatattatattttaaaaagattattttttgtttggggaatattttataagaggataagagtagaagtaggaagtttattgaggaggttttggtaatagtttaggaggttatgggagtttgatttagggtagtggtagttcgggatgagaggttatttagtttagtatatatttttgagatagaatagataaggtttgttggtagacgggatgtggggtgtgaaaagagtaattaaaaatgatttttatgggtttggtttgatagtagggtggattaaaatgttattaattgagatgggggaaagttaaggagaagttggtggggtaagagttaggagttttttaggatattttatttttgagatgtttattatggattagagttatttagtagatagtttgatgtatgagattggaatttaagggagaggttaagatttgaattatgagtttaggagatttttaagttagatatgttatttaaataggtaaaattggataagttggaaaagttggttagaagattgaagtgtgaagttattttttataaaggttggagagtggaggaggagttgggaattagtgtttaggcgtatatgtgcgtatatatatattttgttgaggattggttagtgaggaaaaaggaagtttagagtatgtggaattttagaagttaattgaagtaagttattttaagaagaattttgtgaagtagattaaatgtcggttgttttaagacgataaggatagataatggattattttttttggtttttttggtattaattttaaaaatatagtatttgtaaaaatgggttaggtgtagtggtttacgtttgtaatttagtattttaataggttaaggcgggtggattatttgaggttaggggtttgagattagtttggttaatatggtgaaattttatttttattaaaaatataaaaattagttgggtatggtggtaggattttgtaattttagttattcgggaggttgaggtaggagaattatttgaattcgggaggtagaggttgtagtgagtcgagatcgtgttattgtattttggtttgcgggataagagtgaaattttgttttaaaataaaaaaatttgtaaaattgattttataattttttatatttgtaatttttaaaatttagaggtaaatatatttttatttaaggaggaataattttttagagtaaaataatttgaatattatttggaatagagattggatagaaaaaagtgtgaatagggaaaattaggataagttatatatgtaaatgagagtataaagagtaaatgagagtggttattgtttattgtagtttaattaattagatagttaagttgtaggtataaagtttttttaatttttattttttaagtaataaattgaggaaaatataaatatgtataaaatttttataaaagttatttataaaagggtaagtagtaatatatagaaaagatttattagattagtaataaattatttttattaggaaaatggtaaatgatatgaataggaaatttaaaaaaagaagaattatagatttttaataagtataatttaagatatatattgatattgtaaggaaatataattattataattttgttaattaaagaaattaatgatatttattggaaaataatgggaatttttaatagattgggttagaagattagaagtgtacgttttaaaatattaatagtttagttgtagggtgagattattgattttaattttttttttttatatatttttttagatttttttatagtaattacgtattattttgtaataaattttaatttttcgatgtataaagtaattgtttggaattgtagttcgatatgaatttaggagttacgtttgtaaaataaattattgttgatgtgatatttttattttttaagtagattgtaaattttttagatgtaggttattatgttataattagggttttattgtttatgatttagatgaaatattttttttttttttgtggtttttttattaatttggtttttatcgtaaaggtagggggattaaaaataaaatattttttgatattggttggtaggtgtattaatacgtgtgcgggaggatttttgttttcggtatggtttacgtcgggtttcggtagcgttttagtacgtaaggggttgtattggagtgtggattgttcggtatttttagagaaagttttgatagtgtgacgttagtgtcgtttttaattacgtataaaacgcgttatgtattgggtagttattatagtgtatatttttgtgtaggaagttattttattagcgtaagtattttagaattaagatcgtattttcgtttttttttttagggaaaggattttagataaatattgagaaaatagatttaatattttaggttaaaattttaggtttttttataggaaggtttttgggttgttattttgaggtgtttatttttttcgcgtcgtgtttacgtttacgagtttacgaatttttcgagttttttttttttatttgtcgagggttcgtttttttagtttcggttcgtttcgtttaggacgcgtgacgttataataagcgtcgtgcgtttcgttttttatcgggggtaattattgtttcgtcggtcgcgtcggagttgggttgtttttgttttcgtttttaagttttggtattttttttaagttgggagagggttttagtttttggttttgaatattttggggttttcgggtgtaggtcgttatgagtaaacggaaggcgtcgtaggagatttttaacgggggaattatcgatatgtttataggttagtatcgggtcgggtttcgttggtttttttttttttttttagtttttttttttgtttttttttttttttatatcgatagtttagtgggtagggtaggttttttgtagcgggtcgtttttcgtggggattttttttcggcgtttttggttggttgttagttttgtcggttatatttgggttatcgtttgggttgtttttggtttggtttttgaaggaaacgggtggttattgttttttagaggttgttatatttttttttagaaaatagttttcgtttgtttattcgtggtttttgtttattcgagttttttgttgttttttaga

SEQ ID NO: 204 - DNA, 5501 bp, Artificial Sequence
  chemically treated genomic DNA (Homo sapiens)
tttgaaaggtaatagaaggttcgggtgaataagaattacgagtaaataaacgagaattgttttttggaaggggatatggtagtttttaagagatagtgattattcgttttttttaagggttagattaaaagtagtttaagcgatggtttaggtgtagtcggtaggattgataattagttaggggcgtcggagggagatttttacggaagacgattcgttgtaaggaatttattttatttattggattgtcggtgtgggagagaaggaaggtaggggaagaggttggaaggaaagaagaaagttagcggggttcggttcggtgttaatttgtgagtatgtcggtgattttttcgttgagagttttttgcggcgtttttcgtttgtttatggcggtttgtattcgagaattttagagtgtttagaattagggattagagtttttttttagtttgaaggaggtattaggatttggagacgggagtaggagtaatttagtttcggcgcgatcggcggaataatggttgttttcgatggggggcggggcgtacggcgtttgttgtgacgttacgcgttttgggcggggcgggtcggggttagaggggcgagttttcggtaggtgaggagagagaattcggagggttcgtggattcgtggacgtggatacggcgcgggggaaataggtattttagaatgatagtttaggggtttttttatgggaagatttggagttttgatttaagatattaaatttgtttttttagtgtttatttggaattttttttttagaaggggaaacgggagtgcgattttgattttgaaatatttgcgttggtggggtagttttttgtataaaaatgtgtattgtaatagttatttaatgtatggcgcgttttgtacgtggttagaggcgatattggcgttatattgttaaaattttttttaaggatatcgggtagtttatattttagtgtagttttttacgtattagggcgttgtcggagttcggcgtgaattatgtcgagaataggaattttttcgtatacgtgttagtatatttgttaattagtgttaaaagatattttatttttaatttttttgtttttgcggtagggattaaattaatgaagagattataagaaagggagaagtgttttatttagattatgagtaatggaattttaattataatatgatgatttatatttgagaaatttatagtttgtttgagaaatggaaatgttatattagtaatagtttattttataagcgtaatttttgggtttatatcgaattgtaattttaggtaattgttttgtgtatcgaaaaattaaaatttattataaaatgatacgtagttgttgtagagaaatttggaaaaatgtataaaaggagaaaattaaaattagtgattttattttatagttgaattattaatattttgggacgtatatttttagttttttaatttagtttattaaaaatttttattattttttaataaatattattagtttttttgattagtaaggttgtggtgattgtgtttttttataatattagtgtatattttaagttatgtttattggaaatttgtaatttttttttttttgaattttttatttatattatttattatttttttaatgggggtagtttgttattaatttggtagattttttttatatattattatttgtttttttatggatagtttttgtaaaaattttgtatatatttgtattttttttaatttattatttgaggaataaaagttaaaaaaattttatgtttgtaatttaattatttgattagttaagttgtagtgagtagtgattatttttatttattttttatatttttatttatatatatgatttgttttagttttttttgtttatatttttttttgtttaatttttattttaggtgatatttagattattttgttttgaagaattatttttttttaaataaaaatgtatttatttttgaattttaaaagttataaatgtagggaattgtgggattagttttataaatttttttgttttgagatagagttttatttttgtttcgtaggttagagtgtaatggtacgatttcggtttattgtaatttttgtttttcgggtttaagtgatttttttgttttagtttttcgagtagttgggattataggattttgttattatgtttagttaatttttgtatttttagtagagatggggttttattatgttggttaggttggttttaaatttttgattttaagtgatttattcgttttggtttattaaagtgttagattataggcgtgagttattgtatttagtttatttttataaatattatatttttaaaattagtgttagagaaattaaggaaaataatttattatttgtttttatcgttttagaataatcgatatttgatttgttttataaagttttttttgaaataatttgttttaattggtttttaagattttatatgttttgggttttttttttttttattggttagtttttagtagggtgtgtgtgtgcgtatatgtgcgtttgagtattggtttttagttttttttttattttttagtttttatgggaaatggttttatattttagttttttaattagtttttttaatttgtttagttttatttgtttaaatggtatgtttagtttgaaagttttttaaatttatagtttaagttttgattttttttttgagttttagttttatatattaggttgtttattggatagttttagtttataataggtattttaaagataaaatgttttaaagaatttttgatttttgttttattagtttttttttaatttttttttattttagttaatagtattttaatttattttgttattaggttaaatttataagagttatttttaattgttttttttatattttatatttcgtttgttagtagattttgtttgttttgttttaggaatatgtgttgaattggatgattttttatttcgagttgttattgttttagattaaatttttatgattttttgaattgttattaaagtttttttagtgggttttttgtttttgtttttgtttttttatagaatattttttaaatagagggtgatttttttaggatgtagtattaaaatatgtttttatttatatatttttttattgtatttaggataaaatttaagtttttggcggggcgtagtggtttatatttgtaattttagtattttgggaggttgaggtaggcggattatttgaggttaggagtttaaggttagtttggttaatatggtgaaattttatttttattaaaaatataaaaattagttaggcgtggtggtgggcgtttgtaattttagttatttgggaagttgaggtagggaggttgaattttggaggtggaggttgtagtgagttaagatcgggttattgtattttagtttgggtaataagagtgagtttttaaaaaaaaaaaaaaaaaaaaaaaaaaatttaagtttttttttatggtttataaggttttatgtgatttattttttgtttgtttttttattgtattttttgttattttttttattgtttaggatatatatacgtttatattttatatatatatgtgtttgtttagtattgtttttttattgtatggttttttttttggttgttttttttttattatttaggttttagtttggtagttatatttttgttacgtttttggattaggtttaggtttttatttgtgtgttttttttatagtattaagaaggattggaaatatttatacgtggttgtatattatgtattttttgtttatttttttttttattaatgtgtaatgttagttttacgggagaagggatttaatttttgtttttacgtaagtatttaataaagttaataatttaaattgtagttttgttgaagtgttaaatacggttatttgtaattttagtattttgggaggtggaggtaggaggatcgagtttaggagtttaagattagattgggtaatatggcgagattttattttttttataaaaataagaaaaatgtattgggtgtggtggtacgaagagatgaagtatgggatttttggatttatttaattattttagtagaagttaggaatagagatgggattattttagaaaatttgtggaggatttttttgtttaatggtattgaattttatgatattatataggggatttataagatttttgagaatgttatattagtagagatagtttagtttggaagtgatagagatagtgtgaaatgagaaaaggttgttgaaatttaaattgttacgggtaagaaatgggttgatagagttattgggttgtaaatatgcgattttttaagaaaaagtaagaatgattttaagggtagagttaggggtatagaggtagaggttagaggagtagatagaagtgatggatgtagagatataggtttatgaggttattgtgagtatagatttagaggtttatggagttattatgggtatagagaggtttatggttttgttgtgagtagatataaaggtttgtataattgttgtgggtttagtgggcggtattttaagttagggaattatttgtaggttttgaattttaatggaattttttttgttagattaaaattggttgggaatggtgatttttttattttttttaatttttttttttagaatgagaatatttattatatgtttattatattattttaaataaatttatttatttaaattttaaagttatttggaagttgataatttgtagtattataggtttatagttagagaaatttaattttaaaatgaattatgtacggggttttatttatatttgatttagatgatgagatgtaggatttttgagttaatatatagatgtaaatttggttttagtttatgttgtatgagttgagattttgggagatgttgggaggaataaatgttttttttatgtaggataaatatggattttggggtgttagagggtggattgtagtgggttgaatggtggtttttaagaagatgtttatattataatttttagagtttgtgaatattattttatatggtaaattgtgattatatgaaatattttgagataaagtgtttattttggattttttaaattggttttaaatttaatggtaagtatttttgtaagagatatatagtagagatgtgatagagaaagcggtagtaatatgatttaggggtagagatgtagttataagttaaggattgtttaaagttaatagaagttggacgttattagggatagaatttttttagagtttttagaagaggtgtgattttgtttatatttttattttagatttttggttttcggaattgggagagaataagtttttgttatttaagttattaaagttgtggtaattagttagggtaggtttaggaaattaacgtaggtagagagagtaggtttttttgtttgtgtttattgg

SEQ ID NO: 205 - DNA, 19513 bp, Artificial Sequence
  chemically treated genomic DNA (Homo sapiens)
gttgagaaaattgaggattaggttagaggcgttattgtagagaaaagttgttaaaaaggttttttagaggagttagtatttgaattaaagtagggataatatataagtattgagtacgtgttgtatgttaggttttattttaagtgttggtatatggggtaaagaataaagtagattaaatttcgtgttttaaattttgtgtttatttggggaaagagtattttaaggagatggggatgtagtatgtgcggaagtttgaagtggagaaagagttcgggttgttttacgtgatggttgtacgttggtgtggttgagagaataggggggaaggggataagggataattttggtgagattagatttttatttgggttaggaggggagggattagtagttgaagggttatagggtttaagttttttttttcgttgtcgtttttagattatgttgttagagatagttaggcgttataattacgagatagagtgtattatttttttgaaggattttatttatagtaaggacgatttttatcgtgtaggtagggtttaggggaggtttcggggaggtttggcgtttttgttggttggaagatttggggttaatttatttttgttggagtttttgtttttttatttttaaagttggggtgagggttgagttaaggtgagagtgaggtaagagtgtatgtgttacgtgtggtggtgtacgttaatagttttagttattcgaggttgaggagggtagattgtttgaggttatagtgagtcgtgattgtgcgacggtattttagtttggtgatagagaagatcgtgtttttattttttaaaaaaagtatgtattgagtgtcgattttgtatattgggttgtagtggaagttgagatgggaggagttttgttattatattaggtattttggtgggtattaggaaaagtatttttcgttttcgttaaaacgtggttttatttaagggaggcgggttggagttcggtttattgtgaagcgggtagttttttttattgtttaggggagtattgttttttgttttttgagagcgttaatttgcgtgggtgggtttttggaagaaggtttgggtagtgagaggtattgtttaggaaaagggtgggaggagtattgttagtgttgtagagtatgtattagggtttcgtttttttattgttttataatttttgggggatttttttgtatttttcgatatttgtttaaattttattttttttttttttttttatttcggtttttttattattcgagacggttttagtaatttttttagtatgagtttagtagggtagggttgtagggaagcgtttttggtagaggagattggcgattgtagaggttttgaggttggggagagttggtggtttggaggaattatagggaggtttaggtagttggagtataaggagatggggtggagaggaggtcgggaattttattttatttttttttagtcgtttttttgttattattttggaatattgttagggtttttttgaggggtcgtttgtttttatttttgtttgatggggttgtttatagtataggtagaagggttttgttagtatttaaggttgtttatttttttttttcgtttagaatttttcgcggttttcgttttattgggagaagagttagagttttttttgtggtttataaagttttttaggatttggtttcgtttattttttgtttttagtttttattttttttttttgttttagttattttggttttttattggtatttatttagtatgttgtagttaagggtttgtgtatttggagttttttttgtttagaattagggggattaattggttttagtttgtttaggatttttttagttttaatattgaaagttttatggtttgggtagttttcgttttaagttatgggaatagtagacgttggttatttttataattttttatttttttcggattggttattgttttagcgttatttagagcgtagttttttttgttcgttttgtgtaaaatagaattatggtttagtagggttttttatatttttttgtattgtttggttttattgaatttatagttttttgataggttgggtttttttttaatgtgtttgtttatgatcggttttttaggtttttaaatgtaagtgttggagtttggtacgtggtaggtatttagtgatatttgatgattgaatgaataagttagttttgggaatgagtttgggttttattttgagtagtggaagttagcgttgggattagtacgatgtgatttaggttttaaaagtttttttttgtttttgtgaaggggataagaatagggattcgggaagttgtagttatcgtttaggtgggaagggagggtggtgataggatagtagaaaatattgaagaaatatgtatttttatttatttttttattgggtagtatgtgtggtatatttattatatgttagtatttatgggtacggggtataggtggatagaaatgataagaacgttgtaattattgttgtgtttttagttttagagattgtgggtagcgttagggtttaggatgtggggtacggtttcgggttgagggagttacgggttgtttttcgtttcgtaggtttgtaggtggagtttattaattttattttcgagttttcgcgggttatgcggcggttgggtttggacgacgttgagtacgttttgtttatcgttattaatattttttcggtcgatcggtttaacgtgtaggagtcgggtcgcgtggaggcgttgtagtagttttacgtggaggcgttgttgttttatacgcgtattaagaggtcgtaggtagggtttcgtagagtttttgcgtagagttaattacgtttcgcggtttacgtggttcgtttaggttgggttttgttagttatattgttttttttttcgtagagtttttttttaggttttattttgttcgattgggagttaggtttagtttaagtatagaggcgggttttacgttggtttttacgtttggtcggggaggggtttttttttttgttggggtgggttttttaaagtttggtagggtaggggtttagttagcgtttatttgtttttttttttaggattagttgcgtttttcgcgtatgtttatgaagttggtgagtttgcgtacgttgagttttgtgtattcggagtaggttttcgttttgcggttttaggataagaagttgtcgtttttgttgtcggagatttgggacgtttacgagtgaggggttggttatttagttttatagttttgtttgattattttttagtagatagacgtcggtatttttttttttttttagggtggaaggggttttgggtcgagtttgtagatttatcggtttttattttttgggataagttttagtttaggtttaggaggttttttttttgtttagcgagttttttagaaggggtgaaagggttgtaggtttcgattattgatttttttcggttgttttttttttttagtttatattttaagtttagtacgtagtgtattttgaatagagggaggggaggatttatggtttttttttttagttcgggagattagggtttttttttttttttgtttttatttaataaaaattaaaaatagaaataggaaaataaaatatgaatataatttagttcggagttggagtgtaagatggagagggcgcgggtttttagggattttagtgatattgggtgttcgaatttgattgagtaggtgggattgggtgtttttaggttgttgggaaaagggtggtatatagggttttagtgttgggtggtgtgtcgtttgttgtgaaagtttaggatagaggttttagttttagggttatttttttggataaggtgaattagaatttatttttgaaggataaataggatttaagtgaatgaggggatttggatttttgttcgaataataagtgtttgttgaggttttttgtgggttaggtattgggttggttattttagagatggagatatttatttaataaatgtttttagagtattaattatagttaggtataattttaggtattggaaatatttgtgaataagataattatttttttattaagattcgggggatagggattttaatgagcgtggtattgtggtggggttagaggaaattagggaaggtattataatagaggtaatcgttgggatttaaaataagagtttgggggttgggtttttaagttgagggaatagtacgtgtaaagtttgaaaggagagacgttaggagttcggagcgaagcgacgaagtttttttaattttttttgtttttgtgttagttttgaaggagttgaatgagtaattttaatcgagggcgaaaggggggttggatggagggatgtaatttaaaggtgtatttatttggggcggggaatagcggaagtgagagtagttattaatgattattttattttaagagtagtgtatcgggcgttttataagtgtttttattatgcgttgttgagtttaatttacgtatagggaaattgaagttaggatgaaggagaatagattaagttaggattttatcgtttatcggttagtttttgcggggattttgggcgttaggttattagttggttgttgggtagcgacggggtagcgttttttatacggtttcgggcgagaggcgggcggggggacgcggaggatgcgcgcgtaatattcgagggtgggaggagagagaatagaatcgcggcgcgtttagatcgtacgaggtcgtgaaggtagtcgcgcggaggggcgtggtttcgggtagataggttatggggaggcggagttaagggaattttttagtaagggggcgaggttatttcggaagttgagagagggggcggggtttgttttgtagtcgaataagcggggcgtggttttgttcgtatttgggtaggcgggggcgtggttcgtttttgagcgtcgcggttttgggtttgcgcgcgcgggagttaggggttacggcggcgtaggttgtggcgggaaacgttgtttgaagcgggtgagtagaggggaaaaagggagttcggggtagtgggtttggtagggaacggggtttgagtagttaggtatatagatttgagagacggttgcgagggtattttttggttcgggggcgcgtaggagagggtaggggttaggggttttttgggcgagggcgcggggacgagtaggaaaaggtcggggtgggggtggaatttttcggcgggtagggggcgtatgcgtcgggtatcgtggggcgggacgtggttcgggaggagttggggggattgggtggtgtacgtgcgggtttggtgttattttggattcgttgggtgtttgagtattttgtgttaggtatttttttggaagtaggaataagttagagaagtttttgtttcgggaagatagacggtagataagtgatgagttttaatagattagtaaagtagtgttttggggttgtgagatgtttttagaaggaaattaacgtagggtaacgtgataatgagcgaagagtttgttgttttagttggagtggtttagaatcgatcgttttgggatttttaagtgtaaagttttgaggtggaaggagtttggcgtatttgtagtaggagtcgaggggacgagagaaatatagatgaggtcggagttatgatggggaattagattttatagggttttgtaaaatttggtatggaattttttttttattttaggtttagcggggagtcgtgggagggtttgagcgtggaaataatacgattcgttttatgttttgaaaaatttattattgagtggaaattggattgtagtaggaataagaatggaaggagggagatttgttaggagggagagcgttttgtaggtagagaattaggtttcggttatttttgcgggcggagatagggggattggttgatggattgggcgtaggagtaaggggaagagtttaggatgatttttgggtttgtggtttgagtagtaggttggatggggaaggttaagggagaagtaggttggggttgtcgttttgaaggtaaagattagtgggggagtgagtgggtagggtttagagcggagttaggagtgggtagggcgatgttagtgtttcgttttagtttttttattgaaggaatttgttgttattgtttttttttttttttttttttttttttgagatagagttttgttttgttatttaggttggaatgtagtggtgtaaatttagtttattgtaattttcgtttttcgagtttaggcgagtttcgtgttttagttttttgagtagttgggattacggtatttattgttatgtttagtttattttttgtatttttagtagagatggggtttcgtcgtgttggttaggttggtttcgaatttttgattttaggtgatttatttgtttcggttttttaaagtgttgggattataggcgtgagttattacgtacggtcgtttttttttttttttgtattttttttttataggttttttttttttttagagaggttttttttttttttttgaaatgttttttttttttttatgtgtttttgatagttgttgtttggataggttttttgttgagtattggggagttaatgattatttagtttggttggggaaggataggagattttagtttagagtgcgttgagttatggcggagtagtgatagtttttgggagttaagagaagaatttgtgcgtttagggaagatttattagagtggttgatatttatagggagttttaatttatatgtttttttttttttggtttttgagatagggttttgttttgtcgtttaggttggagtgtagtggcgcgatttcggtttattaatttttatttttcgggtttaagcgatttttatgttttaggttttcgagtagttgggattataggtgtgtgttattacgtttagttaatttttgtatttttagtagagatagggttttgttatgttgtttagattggtttcgaatttttgattttaagtaatttttttatttcggttttttaaagtgttgggattataggtgtgagttattatattcggtttaaatttatgttttgaagtaatcggatattgtgtagagtgatgttggagattttaatttgggtaagatgttgatttttttttttaaggagtttataggttgaaaggattttagttttgtattgtgtaataacgaaagtggtataaggcgttgtgggaattttgaagggtagttggttagtttggaggagttaagtttgagttgagtttttggatgtagtggagttttatgtagcgaatattgtttaaggttttttgggggtttattttgtgttgggtgatgttaaggttttagaggagagttagtttttgttttgttatttagaggtttttggttggtaagggaggaagatatatatttaggtagtttagagatagtagttatagaggtttaggggaaggataaggtcgaaagtatgtaggtgagtttgggtaatatagtaagattttggtttttataaaaaatataaaagttaggtcgggcgcggtggttaaggtttgtaattttagtattttgggaggtcgaggcgggtagattatgaggttaggagattaagattattttggttaatacggtgaaatttcgtttttattaaaaatataaaaaattagtcgggcgtggtggtgggcgtttgtaattttagtattttgggaggtcgaggtggacggattatttgaggtgaggagtttgagattagtttggtagatatggtgaaattttattaaaaatatataattagttggatatggtgggcgtttgtaattttagttatttgcgaggttgaggtaggagaattatttgagtttaggaggcggaggttgtagtgagtaagatttttttttaaaaaaatatataaataaaaataaagttgtgagattgggtaagattggatgaggttattgaggaaatgagtgttttatttatcgagaaaattggtgtttggtttgtagcgagtacgtggtgttattttgttgttgaatttttgttaagtgtttgttatcgaagggtcgtgagaggggtagaggatagtgtttgttaagtttttattttgtgttagggttaatgagaggggatatataggggttttttttttttaatgttgttgtgtttttattaataagagtttaggttttgtttttggtgatatcgttttttttatcgtattttcgtagttatagttaattgattaagggtagttagttagttttttttttttttttttagttttagtattgattttgggtttttataagtttttgcgttttttttgttttattcgggttttttttcgtagattattattttttgtttttttttggttatttgtataattcgaagttagagtcgttaacgacgtttgtttttttttgtaagttatatatgtacgcggttgttatttaaagagtataaacgtagttaaagttttttttatataaaattttttgtatacgtttacggttgtattatttataaaaggtggaagtaattttaatgtttatttattgatgaagggatacgttagacgtgttttagttatatagcggaaaagtatttagtaaaaaagggatatagtattgacgaaaggtcgttatatatatgagcgatgaatatatttagagaaagtagttagatataagaggttgtatattttaagattttatttataggaaatgtttagaataggtagatttatggagatagaaagttagatgagtggttgttaggggtgggggtagatgggttgaatgtagggagagagttaaaggatttaggttttttggggtgatgagagagttttaaaattgattgtggtgatggttgtttaattttgaatatattaaatattattgaattatatatattttaaatgggtgaattgtatagtatgtgaattatagtttaataaagtagttagtaaatgaagttttttattttgttttttaggaaattagttttttagttttttttatagaatgatgtattaaaagtaaatagatttatatatatgttttgtattataataaaaaagacgtttatatattttttgtattataataaaaaagacgtttatatattttttgtattaaaagtaaaaagatttttatatatttttttgtttattttgtaaatttgttattatttttattttatatattttttttttaatattttgaaaagttttaaatttgtagagaaggtataaattgagtatagtgaatagttatggttttttgtttagatttattggttgttggtatgatattttatttgttttatgttttatttaagtatatgtatatatttgtattttttgttttttttttggttgaattatttgaaagttgtggttattatgatattttatttttgaaaattttagtagttaattttttttttttttttttttttttttttgagacggagttttgttttgttatttaggttggagtatagtggtgcgattttggtttattgtaatttttgttttttaggtttaagcgatttttttattgtagttttttgagtagttgggattataggcgcgtattattatatttggttaatttttgtatttttagtaaagatggggttttattatttttgttaggttgtttttgaatttttgattttatgatttacgtgtttttgttttttagagtgttgggattataggtatgagttatcgtatttggtttttttttttttttttggtatagtattttattttgttatgtaggttgtagtgtagtggggtggttatagtttattgtagtttcgatttttttaggtttagttgatttttagtttttcgagtagttgggattaaaggtgtgtgttattatattttgttaatttttatattgtttatagagatagggtgttattatgttgtttaggttgattttaaatttttgggtttaagtaatttttttgtttcggtttttaaatgttttgggattatagtcgtgagttatcgtatttggtttttagtagttagtttttaagaatagggatgttcgtttgtagaattatagtgttattgttattattatgtagtttaatatgagatagtgacgttattgaatagacgatttttatttagatttgttacgtgtttttgtaatattttttaaggttataaataattttttattttttttttttttttaagattgagttttgttttatcgtttaggttggagtgtagtggtattatttcggtttattgtaatttttgttttttgggtttaagttatttttttgttttagtttttcgaatagttggaattataggtatgtattattacgttcggttaatttttttgtattttttgtagagacggggttttattttggttaggttggtttcgaatttttgattttaggtgattcgttcgttttgggtttttaaagtgttaggattataggcgtgagttattatgtttagtttgtttttttttttgttttttgttttgtttttttttttttttttgaaatagagttttattgttatttaggttggagtgtagtggtgcgattttggtttattgtaatttttattttttaggtttaattaatttttttgttttagtttttcgagtagttaggattataggcgtttggtattacgtttagttaatttttatatttttagtagagatagggttttattatgttggttaggttggttttaaatttttgattttaggtaatttatttattttagttttttatagtgttgggattataggtgtgagttattgcgtttggttaataatttttttttttttttttttttttttttttttttttaagttatatgaagtaaatttattatttatagttaggtaataagggaaaatcgaagtataggatttattgtgagttaatttttcgagatttaggaaggttgtttcgggaggatggagttttatttgtgtgtattttatttgtatttggaaagtagattattttgggttttatattttggaggtaatatgatatgttgggttaaaatgatgaaggatattttgtttttaggagggattggaatagagtttgggttgttttagttagtttttttttattttaggatattgtatttttagtatattttatagttatttttgagaattattttttttttttttttagtatttattgattatttttgggtgttttttggagagggggatttggtagggttataggataatagtggagggaaggttagtagataaataagtgaataaaagtttttggtttttttaggtagagggttttgcggtttttcgtagtgtttgtgtttttgggtatttgagattagggagtggtgatgatttttaaggagtatgttgtttttaagtatttgtttaataaagtatattttgtatcgtttttaatttatttaattttgagtggatatagtatatgttttagagagtacggggttgggggtaaggtcgtagattaatagtattttaaggtagaattttttttagtatagaataaaatggagttttttatgtttatttttttttatatagatatagtaataatttgatttttttttttttttttattttttttttttttattcgataaaatcgttatcgttattatggttcgtttttaatgagttgttgggtatattttttagacggggtggcggttaggtagaggcgttttttatattttagacggggcgtcggggtagaggcgttttttatattttagacgatgagtagtcgggtagagacgttttttattttttagacgggatggcggttgggaagaggcgttttttattttttagattgggcggttaggtagagatgttttttattttttagacggggtggcggtcgggtagaggttgtaatttcggtattttgggaggttaaggtaggcggttgggaggtggaggttgtagcgagtcgagattacgttattgtattttagtttgggtattattgagtattgagtgagcgagatttcgtttgtaatttcggtatttcgggaggtttaggcgggtagattattcgcggttaggagttggagattagttcggttaatacggcgaaatttcgtttttattaaaaaatataaaaattagttaggtatggcggtgcgtgtttgtaattttaggtatttagtaggttgaggtaggagaattaggtagggaggttgtcgtgagtcgagatggcggtagtatagtttagttttagttcggtattagagggagattgagaggggggagggggagggggagggagagggagaggttttttttttttttattttttcgtttttgttgttcgggttggagtgtaatggcgtaattttggtttattgtaattttcgttttttaggtttaagcgatttttttgttttagttttttaagtagttgggattataggcgttcgttattatgataagttaatttttgtattttttttagtatagacggggtttttattacgttggttaggttggttttaattttttgattttaggtgatcggtttgttttagttttttaaagtgttaggattataggcgtgagttattgtatttggtttattattttatttttttaatttaagttttaatttaggataatatatattgttatggtaatttttttattttttaagatatgttttgtttttttgtttagattgtattgtagtggtgtagttatggtttattgtagtttttattttttaggtttaagtgatttttttattttagttttttaagtagttgggattgtaggtatgtattattatgtttaagtaatttttaattttttgtagagattgattaatttttaattttttgtagaaatggagttttattatgttgtttaggttagtttttaatttttggttttaagtgattattttattttagttttttaaagtgttgggattatagacgtgagttttttagtttaggtaatttatttttttatgatatcgatagttttaaagattatagattagtgttgttattttttattttggattcgtttgttttttttttttgttttgttttgagatagagttttgttttgttatttaggttggagtgtagtggcgtgatcgtagtttattgtaatttttgttttttaggtttaagtgatttttttgttttagttttttaagtagttggtattataggtatttattattacgtttggttaatttttgtattttagtagagatggggttttattatgttggttaggttggtttggaatttttgattttaagtgatttattttttttggttttttaaaatgttgggattataggcgtgagttattgtatttaggttgtttgttttttaatgattagaattagggtaaacgtttttttagatattgttttttaatataaaagataaaattgtgagtgtattattgtgtattttgttttatttattgaataatgtttttttgagaattttttttattagtatataaagagtttttttatttttttatatagttgtatagtattttattgaacggatttaatatatttaaatagttttttgggggaggatagttaggtggtttttagtttttggggattttaaacgatgttttcggaaataattttataaatgtagttttttttatgtgataatatatttatagtgtacgtttttagatgtggaattgagtttttaaatttttatgtttataattgaggtggtatttatatggcgtgttatgtttaggtttttagtgtatagttagttgtatagtgtgttttattattttagaaatttttttatattttttttagttttttttattttaggagtagttattagtttgatttttagcgttgtagattattttagtgtattttataattttgtttaaatggtattgtataatttttatggaggtaaaattagttattttaaagtaaataatggttgggcgtggtggtttatatttgtaattttagtattttggggaggttaaggtaggtagattatttgagtttaggggttttagattagttttagtaatatggtaaaattcgtttttattaaaaaataattggttaggtatggtggtacgtatttgtttttataattatttaggaggttaaggtgggaggattatttgagttcgggaggttaaggttgtagtgagttgagattatgttattgtattttagtttgggtaatagagtgagattttgttttaataaagagagaaagtaataataaagtaaagaatttagttggtacgtttatagtgttgtataattattatttttgtttagttttaaaatattttattatttttatagaaaattttatatttcgtaagtagttattttttatttttttagtgtgtattttgttttttgtatagtttgtttttaagatttattcgtgttgtatgtttgttaggagttggtttttttttaatgttgagtgtttgttatgaatttttttgaatatttttaatatatattttattagtttagaatttttttatgtttattttaggtttaagttgttgtattaaggagtttttaaaatatagtggtttaagaaagatataaattgatttttttatataacgttttggaagataggtaagtgtgtagggttggtagatagttttgttttggaaggttgttggggagtttagtgttgtttttgtttttgtggttggtttttttattatatttatgttttagttattgtgacggggaagagggtgggaggatgttttagtagttgtatattttatgattatttttatttttggagggagaatttagttacgtggtttttttggtagcgtatattgggaaatgtagtttttggttgggtagtttgtggttatttcggatacgtagggttggaggggtgtgttttattgtaaaaaagtaaagtaaagtcgggcgcggtggtttatatttataattttagtattttgggaggtcgaggcgggcggattatttgaggttaggagttttatattagtttggttaatatggtgaaattttatttttattaaaaatataaaaaaaaattagcgggtatgatggtggacgtttgtaattttagttattcgggaggttgaggtaggagaatcgtttgaagttaggaggcgaaggttgtagtgagtcgagattagttattgtattttagtttgtgtgatcgagtgagatttcgtttaaaaaaaaaataagtaaaataaaaaggtaaaatgaggattggatatggggtaatcgttatgagatttagggatagatagttgatttgtttatttgtttttttttagtcgtatttaggatttgttttaggttttagtaattttttttgttttagtttggattttgggggataagtattttgtttttgtttgtttgttttttgagatagaattttatttttgttgtttaggttggagtgtaatggcgtagttttggtttattgtaatttttattttttaggtttaagggatttttttgttttagttttttaagtagttggggttttaggtgtgcgttattatgtttagttaattttttttttttttttttttagtagagatagggttttattatgttgataaggttggttttaaataattgattttaagtgatttattcgtttcggttttttaaagtgttgggattataggtgcgagttacggtgtttagttgggtataggtattttttaaaaatttttttttttgataattttaaattaataggaaggttgaaagaataaatagtgtaggtcgggcgcggtggttgggtataggtattttttaaaaatttttttttttgataattttaaattaataggaaggttgaaagaataaatagtgtaggtcgggcgcggtggtttatatttataattttagtatttcgggaggtcgaggcgggcggattacgaggttaggagattgagattatagtgaaatttcgtttttattaaaaatataaaaaaattaggcgggcgtagtggcggacgtttgtagttttagttatttaggaggttgaggcgggagaatggcgtgaattcgggaggcggagtttgtagtgagtcgagatcgcgttatcgtattttagtttgggagatagagcgagatttcgtttttaaaaaaaaaaaaaaatagtgtaaagaatatttgtacgttttttgtttagattatttgttttaatattttgttttatttatgatttgtatggatgttttttattttttttttttttgtatacgtatatttattttttataaagaatttttaatattttgtagatattatggtcgtttatttttaaatatttgagtgtgtatttttttagaatatttttattgaattataataaagttatttatttaagtttaatttgtatataattttgtttaattaattagaggatatatatttttttttttttttttttttttttgagatagggtattgttattttgtttagtttagttttaaatttttgggtttaagcgatttttttattttggttttttaaagtgttgagattataggtataagttattatgtttagtgaatttttttgttgtggttgtttttttgtttgtttgtttgggttttaattgttgttgttggtggtggtttttttttgtttttttttttgagatagaatattgttgtgttgtttaggttaaagtgtagtggcgcgatttcggtttattgtaatttttatttttcgggtttaagtgatttttttgtttcggtttttcgagtagttataattataggtgtgtatcgttatatttagttaatttttttgtatttttattaaagatagggttttattatgttgattaggttggtttcgaatttttgattttaagtgatttattcgttttagttttttaaagtgttgggattatagcgtgggttatcgtgtttaattttagttaatttttatattgtatattttgtatattgtatattttgttaaggatattgtatattttgttaaaatatatttttaaaataataatatatatatatattttttgagatggagtttcgttttgttgtttaggttggagtgtagtggtgtaattttagtttattgtatgttttgttttttgggtttatattatttttttgttttagttttatgagtagttgggattataggcgtttattattatgttcggttaatttttttgtatttttttagtagagacggggttttattatgttagttaggatggtttcgattttttgattttatgatttatttgttttttaaagtgttgggattataggtgtgagttattgtttttagtttttaaaataattttttataggttgtaattaagaaaatataggttaggtttggtggtttacgtttgtaattttagtattttgggaggtcgaggtaggtggattatttgaggttaggagtttaagattaggatggttaatatggcgaaattttgtttttattaaaatataaaaattagttaggtatggtggtgggtatttgtgattttagttatttaggaggttgaggtaggagaattttttgaatttgggaggcggaggttgtagttaagatcgtattattgtattttagtttgggtgatagagcgagattttattttaaaaaaaaaaaaaaaaagaaaatataggttaggtttggtggtttacgtttgaaattttagtattttgggaggttaaggtaggtggattatttgaggttaggagtttaagattagtttggttaatatggtgaaatttcgtttttattaaaaatataaaaattagttgggtatggtggcgcgtgtttgtaattttagttatttgggaggttgaggtagaagaattgtttgaattgggtttcgggaagcggaagttgtagtgaatcgagattgtgttattgtattttagtttgggtaataagagtgagattttgtttttttttttttttttttttgagacggagttttgttttgtggtttaggatggagtataatggtacgatttcggtttattgtaattttcgttttttaggtttaagtaatttttttgttttagttttttgagtagttgggattataggcgtttgttattttatttggttaatttttgtatttttagtggagatggggttttattatgttggttaggttggtttcgaatttttgatttcgtgattcgtttattttggttttttaaagtgttgggattataggcgtgagttattatattcggttttgattatgtttttaaaagaaagaaaaagaaaatataaatatatataagtagtagtttgtatgtgttttgtgttgtgttttgtttgttattgtgggttttggattcggggagaaagtaggttattataaacggtattttggagatagttggagaaattgggaaaggtgttttttattttatattaattttgagttagtgttaaatgttttagattgtatcgtattgtgttcggtgaaaggaattttttattgttaggtattacgtgttaatatgtggaggggtatgggatttgtaaggaatttttaaattatttaggaaaagaagtaataatatgatgtgtatatcgtatatgtgggagggtagagagaggcggtgagagagtatatatacgatacgttgattatcggggagtttggggaagggtatataggagttttaggtatttgagattattttaaagtatttaggttggtgtaaaagtaattgtagtttttgttattttaatggtagatggtttgggtagatgggtggttggtaggcgaggtatcggagatagaggtttatggaaaataaagagatgtgttaaggtcgggcgcggagatttaggtttgtaattttagtattttgggaggttgaggcgagtggattatttgaggttaggagttcgagattagtttggttaatatggtaaaatttcgtttttatttaaaatataaaaattagttgggtgtggtggtgggcgtttgtaattttagttattcgggaggttgaggggagaatcgtttgaatttgggaggtagagtttgtagtgagtcgagattatgttattgtattttagtttgggtgataagagtataattttattttaaaaaaaaaaaaaaaaaaaaaagtaagagatgtgttaaggatttagtgtgatgggagagagggtcggggagtcgacggggttgttgttgtagtagttaataattgagcgtttggaatgtgtttttattttattgtttgtagggtgtagagagttatgttagtatagttagtttagagtaggaaaaggttcgtggttatggtgggtgtatgggatgttatggagatagggtaagaggtgttttcggttagaatttttattaagttttaatttgtttagtagg

SEQ ID NO: 206 - DNA, 19513 bp, Artificial Sequence
  chemically treated genomic DNA (Homo sapiens)
tttgttgggtaagttggagtttggtggaggttttgatcggagatattttttattttgtttttatggtattttatgtatttattatgattacgagtttttttttattttggattggttgtattaatatagttttttgtattttgtaggtagtggggtgggagtatattttagacgtttaattgttagttattgtagtagtagtttcgtcgatttttcgatttttttttttattatattaggtttttagtatattttttgtttttttttttttttttttttttgagatggaattgtgtttttgttatttaggttggagtgtaatggtatgatttcggtttattgtaagttttattttttaggtttaagcgattttttttttagtttttcgagtagttgggattataggcgtttattattatatttagttaatttttgtgttttgagtagagacggggttttgttatgttggttaggttggtttcgaatttttgattttaggtgatttattcgttttagttttttaaagtgttgagattataggtttgagttttcgcgttcggttttggtatatttttttattttttataaatttttgttttcgatatttcgtttattaattatttatttgtttaggttatttgttattgaaatgataaaaattgtaattatttttgtattaatttaaatattttgaaataattttaaatgtttagaatttttgtatgtttttttttaggtttttcggtggttagcgtgtcgtgtgtgtgtttttttatcgtttttttttgtttttttatatgtgcggtatgtatattatattgttatttttttttttgagtaatttgagagttttttgtagattttatatttttttatatgttagtacgtagtgtttaataataaggaattttttttatcgagtatagtacgatataatttaggatatttaatattgatttaaggttgatataaaataaagggtattttttttaatttttttaattgtttttaaaatgtcgtttatagtaatttgtttttttttcgagtttaggatttatagtagtaaataaaatataatataaaatatatatagattgttatttatatatatttgtgtttttttttttttttttttaaagatataattagggtcgggtgtgatggtttacgtttgtaattttagtattttgggaggttaaggtgggcggattacgaggttaggagttcgagattagtttgattaatatggtgaaattttatttttattaaaaatataaaaattagttaggtgaggtagtaggcgtttgtaattttagttatttaggaggttgagataggagaattgtttgaatttgggaggcggaggttgtagtgagtcgagatcgtgttattgtattttattttgggttatagagtaagatttcgttttagaaaaaaaaaaaaaaaaagatagaattttatttttgttgtttaggttggagtatagtggtataatttcgatttattgtaattttcgtttttcgggatttagtttaagtaatttttttgttttagttttttaagtagttgggattataagtacgcgttattatgtttagttaatttttgtatttttagtagagacggggttttattatgttggttaggttggttttgaatttttgattttaagtgatttatttgttttggttttttaaagtgttgagattttaggcgtgagttattaagtttggtttgtgttttttttttttttttttttttgagatggagtttcgttttgttatttaggttggagtgtagtggtgcgattttggttgtaattttcgttttttagatttaagagatttttttgttttagttttttgagtagttgggattataggtgtttattattatgtttggttaatttttgtattttagtagagatagggtttcgttatgttggttattttggttttgaatttttgattttaggtgatttatttgtttcggttttttaaagtgttgggattataggcgtaagttattaagtttggtttgtgtttttttaattataatttataaaagattattttggaggttgggagtagtggtttatatttgtaattttagtattttaggaggtaggtgaattatgaggttaggagatcgagattattttggttaatatggtgaaatttcgtttttattaaaaaaatataaaaaaattagtcgggtatggtggtgggcgtttgtagttttagttatttatgaggttgaggtaggagaatggtgtgaatttaggaggtagagtatgtagtgagttgagattgtattattgtattttagtttgggtaatagagcgagattttattttaaaaaatatatatatatattattattttgggggtgtattttgataagatatataatatttttgataagatatataatgtataagatatataatataaaagttgattagagttaggtacggtggtttacgttgtaattttagtattttgggaagttgaggcgggtggattatttgaggttaggagttcgagattagtttggttaatatggtgaaattttatttttaataaaaatataaaaaaattagttgggtgtggcggtatatatttgtaattatggttattcgggaggtcgaggtaggagaattatttgaattcgagaggtggaggttgtagtgagtcgagatcgcgttattgtattttagtttgggtaatatagtaatattttgttttaaaaaaaaaaataaaaaaaaattattattaataataataattaaaatttaaataaataaataaaaaaataattataataaaaaagtttattgggtatagtggtttatgtttgtaattttagtattttgggaggttaaggtgggaggatcgtttgagtttaggagtttaagattggattggataagatggtaatattttgttttaaaaaaaaaaaaaaaaaaaaaaaagtatatattttttggttgattagataaggttatatgtaggttaaatttaagtgggtgattttattgtggtttaataagaatattttaaggagatatatatttaagtatttaggagtaaacggttataatgtttgtaaggtattgggaattttttgtaaaaagtgagtgtacgtatatagagagaagggagataagaaatatttatgtaaattataaataggatagaatgttgaaataggtgatttgggtaaagggcgtgtaggtgttttttatattatttttttttttttttggagacggagtttcgttttgttttttaggttggagtgcggtggcgcgatttcggtttattgtaagtttcgtttttcgggtttacgttattttttcgttttagttttttgagtagttgggattataggcgttcgttattgcgttcgtttaatttttttgtatttttagtagagacggggttttattgtggttttaattttttgatttcgtgattcgttcgtttcggtttttcgaagtgttgggattataggtgtgagttatcgcgttcggtttatattatttatttttttaatttttttgttaatttgaaattgttagagaaagaagtttttaaaaagtatttgtatttagttatcgcgttcggtttatattatttatttttttaatttttttgttaatttgaaattgttagagaaagaagtttttaaaaagtatttgtatttagttgggtatcgtggttcgtatttataattttagtattttgagaggtcgaggcgggtggattatttgaggttagttgtttgagattagttttattaatatggtgaaattttgtttttattaaaaaaaaaaaaaaaaaaaattagttgggtatggtggcgtatatttggaattttagttatttgggaggttgaggtaggagaattttttgaatttgggaggtagaggttgtagtgagttaagattgcgttattgtattttagtttgggtaataagggtgaaattttgttttaaaaaataaataaataaaaataaagtatttgttttttagggtttaggttgagatagaggggattattggaatttagggtagattttagatgcggttgggaagaggtaggtgagtaggttagttgtttatttttggattttataacggttgttttatatttagtttttattttgtttttttattttatttattttttttttagacggagttttattcggttatataggttggaatgtagtggttgatttcggtttattgtaattttcgttttttggttttaagcgatttttttgttttagtttttcgagtagttgggattataggcgtttattattatattcgttaatttttttttgtatttttagtagagatggggttttattatgttggttaggttggtgtggaatttttgattttagatgattcgttcgtttcggttttttaaagtgttgggattatgggtgtgagttatcgcgttcggttttgttttgtttttttgtaatagaatatatttttttaattttgcgtgttcggagtggttataggttgtttagttaaaggttatattttttagtgtgcgttgttaggagggttacgtgattaagttttttttttaggaatgagagtgattatgaggtgtgtagttattgggatatttttttattttttttttcgttatagtggttggaatatggatgtagtgggagagttaattataaggatagggataatattgggttttttaataattttttagagtaaagttgtttgttaattttgtatatttgtttattttttaaagcgttatgtggagaaattaatttgtattttttttgggttattgtgttttgggggttttttggtataatagtttagatttgaaataagtatggaaaaattttgaattgatggagtatatgttagaaatgtttagggaggtttataatagatatttagtattagagaggggttagtttttgatagatatgtaatacggatgaattttgaaagtaggttgtgtagaaggtaaagtgtatattgggggaatgaggagtgattgtttacggagtatggggttttttgtaggggtgatgaaatgttttgaaattagatagaggtaatggttgtataatattgtgaacgtattaattgaattttttgttttattattattttttttttttattgagataggattttattttgttgtttaggttagagtgtagtggtatgattttagtttattgtagttttgatttttcgggtttaggtgatttttttattttggttttttgagtagttatgaagatagatgcgtgttattatgtttagttaattgttttttggtaaagacgggttttgttatgttgttgaggttggtttgaaatttttgggtttaagtgatttgtttgttttggtttttttaaagtgttgggattataggtatgaattattacgtttagttattgtttgttttaaaatggttaattttatttttataaaaattgtataatattatttagataaagttgtagaatatattaaagtgatttatagcgttagaaattagattagtggttgtttttagggtaggagagattgggaagggtatgagggggtttttggggtgataaaatatattatatagttgattgtatattggagatttgggtatggtacgttatgtaaatgttattttaattataaatataaaagtttggaggtttaattttatatttagggacgtatattgtagatatattattatataagaaaaattgtatttataaggttattttcggaagtatcgtttgaaatttttaaggattggaaattatttaattgtttttttttagggggttatttaaatatgttaagttcgtttaatggaatattatgtaattgtgtaaaggaatgaggaagttttttgtgtattgatagggaaggtttttaaagaggtattgtttagtagataaagtaagatgtatagtggtgtatttataattttattttttgtgttgaaaaataatgtttaagaaaacgtttattttgattttagttattaagaaataaatagtttgggtgtagtggtttacgtttgtaattttagtattttgggaggttaaggagggtggattatttgaggttaagagttttagattagtttgattaatatggtgaaattttatttttattaaaatataaaaattagttaggcgtggtggtgggtgtttgtaatattagttatttgggaggttgaggtaggagaattatttgaatttgggaggtagaggttgtagtgagttgcgattacgttattgtattttagtttgggtgatagagtaagattttgttttaaaataaaataagaaaaagaaataaacgaatttaaggtgaggggtgataatattggtttgtaatttttaaaattgtcgatgttatgaaaaagtaagttgtttgggttaggaggtttacgtttgtaattttaatattttgggaggttgaggtgggatgattatttgaggttaggagttagaaattagtttaggtaatatggtgagattttatttttataaaaaattaaaaattagttaatttttataaaaaattaaaaattatttaagtatggtggtgtatatttatagttttagttatttgggagattgaggtgggaggattatttgaatttgggaggtgaaggttgtagtgagttatgattgtattattgtaatatagtttgggtaagagagtaagatatgttttaaaaaatgaaaaagttgttatgataatgtgtgttattttaggttagaatttggattaaaaaagtaaaatgatgggttaggtgtagtggtttacgtttgtaattttagtattttgggaggttgaggtaggtcgattatttgaggttaggagattaagattagtttggttaacgtggtgaaaatttcgtttatattaaaaaaaatataaaaattagtttgttatggtggcgggcgtttataattttagttatttgggaggttgaggtaggagaatcgtttgaatttgggaggcggaggttgtagtgagttaagattgcgttattgtattttagttcgggtaataagagcgggggagtgggaaaaaaaaagatttttttttttttttttttttttttttttttttttttagtttttttttgatgtcgagttgaggttggattgtgttgtcgttatttcggtttacggtaatttttttgtttgatttttttgttttagtttgttgagtgtttgggattgtaggtacgtatcgttatgtttgattggtttttgtattttttggtggagacggggtttcgtcgtgttggtcgggttggtttttagtttttgatcgcgagtgatttgttcgtttgggtttttcgaggtgtcgggattgtagacggagtttcgtttatttagtgtttaatggtgtttaggttggagtgtagtggcgtgatttcggttcgttataatttttattttttagtcgtttgttttggttttttaaagtgtcgagattgtagtttttgttcggtcgttatttcgtttgggaagtgaggagtatttttgtttggtcgtttagtttgggaagtgaggagcgtttttttttagtcgttatttcgtttaggaagtgaggagcgtttttgttcggttgtttatcgtttgagatgtggggagcgtttttgtttcgacgtttcgtttgggatgtgaggagcgtttttgtttggtcgttatttcgtttgggaggtgtatttagtagtttattgagaacgggttatgatgacgatggcggttttgtcgaatagaaaagggggaaatgggaaaggaaagagagattagattgttgttgtgtttgtgtagaaagaagtagatataggagattttattttgttttgtattaagaaaaattttgttttgggatgttgttaatttacggttttatttttaatttcgtgttttttgaaatatgtgttgtgtttatttagggttaaatggattaagggcggtgtaagatgtgttttgttaaatagatgtttgaaggtagtatgttttttaagagttattattattttttaattttaagtatttagggatataaatattgcggaaggtcgtagggttttttgtttaggaaaattagagatttttgtttatttgtttatttgttgattttttttttattattgttttatgattttgttaaatttttttttttaagaaatatttaagaatgattaataaatattaaaaaaaaaaaaaaaatagtttttaagaataattgtagaatgtgttaggaatgtaatattttgagataaggagggattggttgaaatagtttaggttttgttttagttttttttagaaataggatgttttttattattttagtttaatatgttatgttgtttttagaatataaaatttaagatggtttgttttttaggtataaatggggtatatataaatgagattttattttttcggggtaatttttttgagtttcgggagattggtttataatgaattttatgtttcggtttttttttgttgtttagttgtaaataataaatttattttatgtaatttgaaaaaaaaaaaagaaaagaaaagaaaaaaagaaattattggttaggcgtagtggtttatatttgtaattttaatattatgagaggttgaggtgggtggattatttgaggttaagagtttgagattagtttggttaatatggtgaaattttgtttttattaaaaatataaaaattagttgggcgtggtgttaggcgtttgtaattttagttattcgggaggttgaggtaggagaattgattgaatttgggaggtggaggttgtagtgagttaagatcgtattattgtattttagtttgggtgataatgaggttttgttttaaaaaagaaaaaaaaaataaaataaaaaataaaaaaaaaaataggttggatatggtggtttacgtttgtaattttagtattttgggagtttaaggcgggcggattatttgaggttaggggttcgagattagtttggttaaaatgaaatttcgtttttataaaaaatataaaaaaattagtcgggcgtggtggtgtatgtttgtaattttagttattcgggaggttgaggtaagagaatggtttgaatttaggaggtagaggttgtagtgagtcgagatagtgttattgtattttagtttgggcgatagagtaagatttagttttggaaaaaaaaaaaaaataagaaattatttatagttttgaagaatattatagggatacgtggtagatttaaataagaatcgtttatttaataacgttattgttttatgttaaattgtatgatgatgataatgatattgtagttttgtaggcggatatttttgtttttaagagttgattgttggaggttaggtacggtggtttacggttgtaattttaggatatttggaggtcgaggtagggggattgtttgaatttaggagtttgagattagtttaggtaatatggtgatattttgtttttataaataatataaaaattagtagggtgtggtggtatatatttttagttttagttattcgagaggttgaggattagttgagtttggggaggtcgaggttgtagtgagttgtgattattttattgtattataatttgtatgatagagtaaaatattgtattaaaaaaaaaaaaagaggttaggtgcggtggtttatgtttgtaattttagtattttgggaggtagaggtacgtagattataaggttaggagtttaagagtagtttggtaaagatggtgaaattttatttttattaaaaatataaaaattagttagatgtggtggtgcgcgtttatagttttagttatttaggaagttgtaataggagaatcgtttgaatttgggaggtagaggttgtagtgagttaaggtcgtattattgtattttagtttgggtgatagagtaagatttcgttttaaaaaaaaaaaaaaaaaaaaaaaaagagttaattgttggagtttttagaggtgaagtattatgatgattataatttttaaatagtttagttaaaaaaaggataaaaggtataggtatatgtatgtgtttggataaagtataaagtaaatgaggtgttatgttaatagttagtgaatttaggtaaagggttatggttgtttattgtatttaatttgtattttttttgtaggtttgaaattttttaaaatattaagggggaaatatataaaatgaaaatagtaataaatttataaggtgggtagaagagtatgtagaaatttttttgtttttaatgtagggagtatgtagacgttttttttattgtaatgtagggagtatgtagacgttttttttattgtaatgtagggtatatgtataaatttatttgtttttaatgtattattttataaggagagttaagaaattggttttttgggggatagggtagaagattttatttgttaattgttttattgagttataatttatatattatataatttatttatttaaagtatatatagtttaatggtatttagtatgtttagagttaggtaattattattatagttaattttagaatttttttattattttaaaaagtttaaattttttagttttttttttgtatttagtttatttgtttttatttttggtagttatttatttaattttttgtttttatggatttgtttattttgggtattttttataaatgggattttggaatatgtagttttttgtgtttggttgttttttttgaatgtgtttatcgtttatgtgtgtggcggtttttcgttagtgttgtgttttttttttgttgagtattttttcgttgtatggttagaatacgtttgacgtatttttttattagtggatggatattagggttgtttttattttttgtgagtggtgtagtcgtgagcgtgtgtagggggttttgtgtgaggaagattttgattgcgtttgtgttttttgggtgataatcgcgtatatgtgtgatttataggaagaagtaagcgtcgttagcggttttggtttcgggttgtgtaagtagttagagagggatagggagtgatgatttgcgaggagagattcgggtgggatagaggaagcgtaggggtttgtgggagtttagagttagtgttgaagttggaggaggaaggaaggagttgattggttgtttttggttagttggttgtggttgcgggggtgcggtgggagggacggtgttattaggggtaaaatttgggtttttgttagtggaggtatagtagtattaggaaggaaaggtttttgtgtgtttttttttattggttttggtataggatgagagtttggtaaatattgttttttgttttttttacgatttttcggtagtaagtatttaatagagatttagtaataaaatgatattacgtgttcgttgtaggttagatattagttttttcgatgagtgagatatttatttttttaatgattttatttaattttgtttaattttatagttttatttttatttatatatttttttgggaaaggattttgtttattgtaattttcgttttttggatttaagtgatttttttgttttagtttcgtaggtagttgggattataggcgtttattatgtttagttagttgtgtatttttagtagagttttattatgtttgttagattggttttaaattttttattttaagtgattcgtttatttcggttttttaaagtgttgggattataggcgtttattattacgttcggttaattttttgtatttttagtagagacggggttttatcgtgttagttaggatggttttggttttttgattttatgatttgttcgtttcggttttttaaagtgttgggattataggttttagttatcgcgttcggtttagtttttgtattttttgtagagattagggttttgttatgttgtttaggtttatttgtatgttttcggttttgttttttttttaggtttttgtgattgttgtttttggattgtttgggtgtgtgttttttttttttattagttagggatttttggatggtagagtaaggattgatttttttttgggattttagtattatttagtatagggtgggtttttaggaggttttaggtagtgttcgttgtatgaaattttattgtatttagagatttagtttaggtttagtttttttaagttgattagttgttttttagggtttttataacgttttgtgttattttcgttattgtataatgtagagttgggatttttttagtttgtgagttttttgagaaaaggagttagtattttgtttaagttggggtttttagtattattttgtatagtgttcggttattttaagatatgagtttaggtcgggtgtggtggtttatatttgtaattttagtattttgggaggtcgaggtgggaggattatttgaggttagggattcgagattagtttgggtaatatgataaaattttgtttttattaaaaatataaaaattagttgggcgtggtggtatatatttgtaattttagttattcggaagtttgaggtatgagaatcgtttgaattcgggaggtggaggttagtgagtcgagatcgcgttattgtattttagtttgggcgatagagtaagattttgttttaaaaattaaaaaaaaaaagatatgtgagttgaaattttttgtgaatattaattattttggtgagttttttttgagcgtataggttttttttttggtttttaaagattattattgtttcgttatagtttagcgtattttggattgaaattttttgtttttttttaattaaattgaatgattattggttttttagtgtttagtagagggtttgtttaaatagtagttgttagaaatatataagagagggaagagtattttagggggagggaaggaatttttttagggggaagagagatttgtgggggggaagtgtaggaaggaggagaagcggtcgtgcgtggtggtttacgtttgtaattttagtattttgggaggtcgaggtaagtggattatttgaggttaggagttcgagattagtttggttaatacggcgaaattttatttttattaaaaatataaaaaatgagttgggtatggtagtgggtgtcgtaattttagttatttaggaggttgaggtacgagattcgtttgaattcgggaggcggaggttgtaatgagttgagtttgtattattgtattttagtttgggtgatagagtaagattttgttttaaaaaaaaaaaaaaaaaaaagagaagatagtggtaataagtttttttagtggaagggttgaggcgaggtattgatatcgttttgtttatttttggtttcgttttaaattttgtttatttatttttttattaatttttgtttttagagcggtaattttaatttgttttttttttagttttttttatttagtttgttgtttaaattataaatttaggagttattttggatttttttttttgtttttacgtttagtttattagttagtttttttgttttcgttcgtaaaggtaatcggagtttgattttttgtttgtaggacgtttttttttttaatagatttttttttttttatttttatttttgttataatttaatttttatttagtggtgagttttttaaaatatggggcgaatcgtgttgtttttacgtttaaatttttttacggtttttcgttgaatttagaataaaggagaaattttatattaagttttataaggttttataggatttagttttttattatgatttcgattttatttgtgtttttttcgttttttcggtttttgttataaatacgttaagttttttttattttagggttttgtatttgagggttttagagcggtcgattttggattattttagttaaagtaataggtttttcgtttattattacgttattttgcgttagtttttttttgagagtattttatagttttagagtattgttttattgatttattaaaatttattatttgtttatcgtttgttttttcgagatagggatttttttgatttgtttttgtttttagaaaagtgtttggtatagagtatttaaatatttagcgaatttaggatgatattaagttcgtacgtgtattatttagtttttttagtttttttcgggttacgtttcgttttacggtgttcggcgtatgcgttttttgttcgtcgaggaattttatttttatttcggtttttttttgttcgttttcgcgttttcgtttaggaaatttttggtttttgtttttttttgcgcgttttcgggttaaagggtgttttcgtaatcgttttttagatttatgtgtttggttgtttaagtttcgttttttattaggtttattgtttcgaatttttttttttttttttatttattcgttttaaatagcgtttttcgttatagtttacgtcgtcgtgatttttgattttcgcgcgcgtaagtttagagtcgcggcgtttagagacgggttacgttttcgtttgtttaagtgcgggtaaggttacgtttcgtttgttcgattgtagggtaggtttcgtttttttttttagttttcgaagtggtttcgtttttttgttgaaaaatttttttaatttcgtttttttatgatttgtttgttcgaagttacgttttttcgcgcggttatttttacgatttcgtgcggtttgggcgcgtcgcggttttgttttttttttttttattttcgggtgttgcgcgcgtatttttcgcgttttttcgttcgtttttcgttcggggtcgtgtagggagcgttgtttcgtcgttgtttagtagttagttggtgatttgacgtttaagattttcgtagaggttggtcgataagcggtagagttttggtttgatttgtttttttttattttagttttagtttttttatacgtaaattagatttaataacgtatgatagggatatttgtggggcgttcggtatattatttttaggataaggtgattattggtaattatttttattttcgttgtttttcgttttaaataaatatatttttaagttgtatttttttatttaatttttttttcgttttcgattggaattgtttatttagtttttttagggttggtataggggtaggaaggattggaggaatttcgtcgtttcgtttcgaatttttggcgtttttttttttaaattttgtacgtgttgtttttttaatttggaggtttagtttttaggtttttgttttaggttttagcgattgtttttgttgtgatattttttttgattttttttagttttattatagtgttacgtttattaaagtttttatttttcgagttttggtaggaggatggttattttgtttatagatgtttttagtgtttagaattgtgtttaattgtagttaatgttttggaaatatttattgggtgaatgtttttatttttagaatggttaatttagtgtttggtttataggaggttttagtaaatatttgttgttcggatagaagtttaggtttttttatttatttaaattttgtttattttttaagggtgagttttgatttattttgtttagggaggtgattttgaggttgaggtttttgttttgaatttttatagtaggcgatatattatttaatattgggattttatgtgttattttttttttaatagtttggggatatttagttttatttgtttaattaggttcgggtatttagtgttattgaggtttttagaagttcgcgttttttttattttgtattttagtttcgggttggattgtatttatattttatttttttgtttttgtttttagtttttattaaataaaagtagaggaagaggaaggttttggtttttcgggttaggggggagagttatgggtttttttttttttttgtttaaggtgtattgcgtgttgggtttgaggtgtaagttggggagggagggtagtcgggaagggttagtggtcgggatttgtaatttttttattttttttggaagattcgttgggtagggagggagttttttggatttggattggggtttattttaagggatgagagtcgataggtttataggttcggtttagggttttttttattttaggaagaggaaggggtgtcggcgtttatttgttggagggtggttaggtaaggttgtggggttgggtggttagttttttattcgtggacgttttagattttcgatagtagaggcggtagttttttgttttggagtcgtaaggcgaagatttgtttcgagtgtatagagtttagcgtgcgtaggtttattagttttatgagtatgcgcgggaagcgtagttggttttgagggaggaggtaggtgggcgttggttgagtttttgttttgttaggttttgggaggtttattttaatagaaaggagggttttttttcgattaggcgtgggagttagcgtggggttcgtttttgtgtttggattagatttggtttttagtcgagtagggtggggtttgaggaaagattttgcggaggggagggtagtgtggttggtagaatttagtttgaacggattacgtgggtcgcgggacgtagttggttttgcgtagaggttttgcggggttttatttgcggttttttgatgcgcgtgtaggatagtagcgtttttacgtagggttgttgtaacgtttttacgcggttcggtttttgtacgttgggtcggtcggtcgagaagatgttgatggcgatgagtagggcgtatttagcgtcgtttaggtttagtcgtcgtatggttcgcgagaattcgaagatggggttgatgaattttatttgtaggtttgcggggcgggaggtagttcgtgatttttttagttcgaaatcgtgttttatattttggattttggcgttgtttatagtttttggggttgggaatatagtagtaattatagcgtttttgttatttttgtttatttgtgtttcgtgtttatgagtgttggtatgtagtaggtgtgttatatatgttgtttagtgaaggaatgaatgagggtgtatgtttttttagtattttttattattttattattattttttttttttatttgggcggtggttgtagtttttcgagtttttatttttgttttttttataaaggtaaagggaagtttttaaaatttaggttatatcgtgttggttttagcgttggtttttattgtttaaggtaaagtttaaatttatttttaaaattgatttgtttatttagttattaaatgttattgagtatttgttacgtgttaggttttagtatttatatttgagagtttaggggatcggttatagataaatatattaggaagaggtttagtttgttagagggttgtgagtttaatggaattaggtagtgtagagaagtgtgaagggttttgttgagttatggttttattttatataaggcgggtagggaaggttgcgttttgggtgacgttggagtagtgattaattcgaaggagatgagggattgtgagggtgattaacgtttgttgtttttatgatttgggacgggggttatttaggttatgagatttttagtgttaaaattgggaaggttttgggtaaattaggattagttggtttttttagttttgggtagaggaaattttaagtatataggtttttggttgtagtatgttggatgggtgttagtaagaggttagagtggttggaatagggggagagggtgagagttgagggtagagagtgagcgaggttaggttttaaagggttttgtgggttatagagaggattttagttttttttttagtgagacgggagtcgcggagggttttgagcggaggagggaagtgggtagttttaagtgttgataggatttttttgtttgtgttgtgagtagttttattaggtaggggtggaggtaggcggttttttaaggggattttggtagtgttttagggtggtggtagaggagcggttgggaaggggtagggtgggattttcgattttttttttattttatttttttgtgttttagttgtttgggtttttttgtagtttttttaaattattagttttttttaattttagggtttttgtaatcgttaattttttttgttagaaacgtttttttgtagttttgttttgttaagtttatattaaaagggttattgggatcgtttcgggtggtgaaagggtcggagtaagaggaaggggagagggtggggtttggatagatgtcgggaaatatagagaggttttttagagattgtgggataatgagggagcgaggttttggtgtatgttttgtagtattagtaatgttttttttattttttttttaggtagtgttttttattgtttaggtttttttttagaagtttatttacgtaggttagcgtttttagagggtaggaagtagtgtttttttagatagtaaagaaggttgttcgttttataatggatcgagttttagttcgttttttttgggtgagattacgttttggcgggggcggggaatgttttttttaatgtttattaagatgtttgatgtggtaatagggttttttttattttaatttttattgtaatttaatgtatagagtcggtatttaatatatgttttttttaaaaaatagagatacggttttttttgttattaggttggaatgtcgtcgtataattacggtttattatagttttaagtaatttgttttttttagtttcgagtggttgggattattggcgtgtattattatacgtggtatatgtatttttattttatttttattttggtttaatttttattttaattttggagataaagaaatagagattttaatagggatgagttggttttaggttttttagttagtaggggcgttaagttttttcgaagttttttttgggttttatttgtacggtggaagtcgtttttgttgtaggtgaagttttttaagaaggtgatatattttgtttcgtggttgtagcgtttggttgtttttagtagtatgatttaagggcggtagcgggagggggagtttgagttttgtgattttttagttgttagtttttttttttttggtttaaatgggggtttaattttattaggattattttttgttttttttttttttgtttttttagttatattagcgtgtagttattacgtgagatagttcgagttttttttttattttaggttttcgtatatgttgtatttttatttttttaggatattttttttttaggtgagtataaggtttggggtacggggtttgatttgttttgttttttgttttatatgttaatatttggaatagagtttggtatatagtacgtgtttaatatttatatgttatttttattttgatttaaatgttaatttttttgaaaagtttttttggtaatttttttttgtaatagcgtttttagtttgatttttaatttttttagt

SEQ ID NO: 207 - DNA, 6312 bp, Artificial Sequence
  chemically treated genomic DNA (Homo sapiens)
cgtgagttattgcgtttggtttttataaggtatttttaatatttaatatgttatggataatattttatattaaatatatttgtatgataggattttttatagttatagagttggtgatagtattaaggtttttttagttttttggagtgatgaattttgttttttattttagagttttttttttttgtaatggaaaaatgtttttttttgtaattgagaatattatttagatattaggggtattattaggggatatggttattttttttttttttttttagtcggattgtagaagttggaggaaaaggtagtatatttgtggtaaagtttttggttataaaattttggttatatttataaaattttaattttaggtgaaaggggaatataaatttaatttttttgaaaattataaagaatagagatagatattaatgagttgtaggtattattgtgtaagttgagtgtagaaatcgtttggtagttgggtaggcgtcgttggttagagtatggtaggttttttatggttaaagttattaagattttgattgtttaggattttattttggggtttttggggtataaaaggttttggtataaagagtatgttattttttttaattatggtattttttttagatgtaagattttgagttgataggagtatgagatcgattgtattaatttttggatttagttttaagtaattttttttttatataataagtttaaatggatggtaaggtaagagaggagttgttttgtttattttatttttatttttttttgaatttttttttttatttttattttatttaatggttttgtgtttatatgatgtttttattttatttatttatttattttgagatagagttttattttgttatttaggttgaagtgtagtgacgtgatttcggtttattgtaatttttgttttttaggtttaagtaatttttttgttttagtttttcgagtagttgggattataggtatttattaggacgtttggttaatttttgtatttttagtagagacggggttttattatgttggttaggttagtttcgaatttttgatttttagtaatttattcgttttagttttttaaagtgttgggattataggttattgtgttcggtttatatatttttgatatttttatttttgttttttaatattattatgtattttattgtagatatgaaggattttaattggtattagaggttatgtatttaaaatttaagtttatttagaaattataataataaaaataataatatttagtatttattatatattaattaatattattttggtgttatttatttatttatttttgagatagagttttgtttttttgtttaggttggagtgtagtggcgcgattttggtttattgtagtttttgtttttcgggtttaaattatttttttgttttagttttttgagtaattgggattataggtatatattattatatttggttaatttttttgtagttttagtagagatggtggtttgttaggttggttaggttggtttcgaatttttgattttaggtgatttatttgttttagttttttaaagtgttgggattatagaagtgagttattgcgtttagtttggttttatttatttataattttatttaatttttagaataattttattatttttttattataattatttttattttatagatgagaaaattaagatttagaaaagttaggtaatttgttaaagtttatatatttaggcggttgtagaattagaatttaaatttagttttatttgattttagagtcgtttttgatattggtttattttttgttttagtaagtttagaagttagggaattggaaggaataataataaaaaaataaatttaatttaatgttaagagaattgttgataagatatattttatttttattttatgtttaatgttaatttttgtattttgggtagggtgtttattataaagttatttgtttaaggttattttttttttatttcgtttttattattagatgatttttatttatagttatgtttaaatattatgggtaatatttagatttgttgtatattgaatttgttattagagtaaagatttttttttaaagtatatttgttttatttattttttggtgttttttaataaattaaaaagataattttttttggtttgttttaaattttttgttttaaatattttttagttttagaattgagttagtgaggttaaattagttaagattagataagttaaaatgaatttttatttttatgtttattagatattttgttttatagaatatataatttgaattttttttaaagaaaaatatattttgattaatttatttttgtattgtttatgattatgtatgttttattttattgtttgatgttaagagttttttagaatttattttttaagaagttaagttatggtatttaattatttggtaggatgttttaagtatatataattattatattttttttttattttgtgatggtggtgagttaagtaatttgtattaagagaaaataaataatatttatattaatgttattaataaggagtttatagtattttggaaaaatttataattttagtatatagtgggtgtttaatattttattatttattaaattaatattattatattttttttaggtaagagaatttaggtaggttgggtgcggtggtttatatttgtaattttagtattttgggaggttgaagtaggcggattatttgaggttaggagtttgagattagtttggttaacgtggcgaaattcgtttttattaaaaatataaaaattattcgggtatggtggcgggtgtttgtaattttagttatttgggaggttgaggtaggagatttgtttgaatttgggaggtagagtttgtagtgaatcgagattgtattattgtattttagtttgtgtaatagagtgagattttggtttaaaaaaaaaaaaaaaaaaaaaaaaaagagagagagaatttaggtaaagagaaataatgttgattttgttttatatgttagattttggaaggttaattgtatgattgtggttgagattttgtatttgggagtgtgtagttttaaattttgattattattttaggtaagtttttttttttttttgagtgtttgtttgttttttgttttattagatagtttttatataggtttatggtaacggtaaagaataagattagatagtatattgggtatggttttataattacgggtattaagtgatgattttttttttatttattttatttggttttaatttttatttttttattgtttggggatgttaattgtaaaatagggatagaatttgggttaaagggttttttttttagtttggtaaattaagtatgtgataagatttttagaagagtagatttaaggtatttttttttgtgtatattaatgggaggtgtgaagggaaagtagaattgtaatttttagtttagggaggttaagttagtcggttttgttaaatacgttgttttggataaaggaggatttttagttttgttattggttgatggggtttttagtgttttttttagtttgttggtggggatgatgtttttagagtcgtagagtgagtagtttttttttaagtatcgttgagtatttgggtgtggaagggttgtttgatattgagggtggggtttttggaagataggcgattaggtttagtttttgttttgttttttatggttaaatgttttttggaaagtttttatattttttaaattttgggggtattatgattttttttttgtttattttaaattatttttagttagtattgttgggagaatataagttttagggtatggtttttggttcgtttggatgattttttcggatttggtatatagttggcgttttatggaattagatatttatgtaaaagtagggataatggaatgtgaaaacgtttcgtaaattttaaagcgatttataattagatagaggtttaattttagggtatacgagtttttttttttaagtacgtattatagttgttttttacgttatcgagacgcggttaggataggtgtatttattttttttgggtttttttttttgaaagtaggttagggcgcgtaggggttgagggttttttatttttagagagaattaaatttggaggaaagtaattatcggcgaggagcggggcgcgtggaagcgagtcgcggttcgaggtttaaagaaaagtttaagtttcgttttcgttatcgcgttcgacgagatatttaggttcggggacgggtgtgtgtcgcggaagttaggtgtattgcgtagtattttttcggtaggtatacgtttttttatttacgagtgatttaattataaggtgttagtcgcgtttagaggtgggggtggttaatttaagcggttattcgttgttcgtttttgtttttaaagatgacggaaatttatacgattatagagtcgtagtattttagatgagttacggggtcgtaattttcgttttcgtgatcggattgttaggttttaggtgaggagttgagtttattattagagcggtttttttaggggaattagttataggttgttagtggtttcggtttttattcggtttgcgtttgcgcgcggtttaagttttcgttttttttggaatagtgtttagggattagttcggttcgtcgttgtgcgtattgcgtatgttttagttttatttttttttttttttattatttcgtttttcgggagttacgtttaaaaagttaaggcgttttagttattagtcggttacgtcgcgtttgcgttttgatttttagtttgcgttttaatttcggtcgtgcggtcgttcggggagggttttgtagttgcgtagtttgtttttcggtttttttttttttcgtttttcgtcgttttttgacgtcgggcgtgacgttattacgttcggcgggcgttattatagagagtcgagttttggagttttagcgagcggaggaggaggcgtagcggtcgacggtcgagtattgcggtgagagttagcgggttagcgttagttttaatagtcgttagaagtatacgaggaatcggcggcggcgtgtgcgtgtaggttcgtgtgcgggcggcggcgcgggaggagcgcggagcggtagtcggttggggcgggtggtattatggacgagaaggtgtttattaaggagttggattagtggatcgagtagttgaacgagtgtaagtagttgttcgagttttaggttaagagtttttgcgagaaggtgagttgtagtacggttgcggatagtcgtcgcggggtcgagttcgtcgaggaaaaggcggtcgtgaggagggtgtaatatggcggaggtcgtcggttcgggtttttcgagttttcgagatcggcgtttattttggtcggcggcggttttttaacgattcggcgttttttgtttttcgcgtagggattggttgtcgtcgtcgtttaaaatggcgtcgtttattcgatttttgggtttttgagttagtcggttttggcgttagacgaggtggtagggggagcggagattttgtgggttatcgttagggacggttttgagggtgagttggtttggattttgcggtttgggaatggagtttgggttttttcggtgggttgagtaagagttttttcgttggtatttaggtttagttaggtttagagttgtttagaggattttttaaaggtagttttgttaggtcgtattttagaatatatttaaaggttatatagttttagtattttttggtggtttgtattatatttattaagcgattttttttagaaattaaggtaaggggtgtttttaagaatttttaaattatttttttaatttaatttttacgaaggttatggtggtagttataagggaggagtgtaatttattttttatagttggaagaaatcgggaatttggtgagttatattatataaggagtttttggattggaaattaagtgtcggttgaatatgatttatatgttgatttaaagttttttttaagtttaatatatttggtattttgtcgtttatttttaaaatgaattatataaaatggaagagcggtaaattttgtatttttgttgtaaaaattatttgatagtattttgtggttgtaagtagtagtagtgataataattgtcgattgagattgtattttagatattgtgtttagtgtttaaataatgttttatatatattgaaaatagaatgttgtagtttatttagtaatattaaatttt

SEQ ID NO: 208 - DNA, 6312 bp, Artificial Sequence
  chemically treated genomic DNA (Homo sapiens)
aaagtttagtgttattaagtggattataatattttatttttagtgtatgtgagatattatttaaatattaagtataatgtttggaatataattttagtcgatagttattattattattattatttgtagttataaaatattattaagtaatttttgtaataaagatataaaatttatcgtttttttattttatgtggtttattttaaaaataaacggtaaaatgttaagtgtgttaagtttagagaaggttttgagttagtatataaattatatttaatcgatatttgatttttaatttaaaagttttttatgtagtatgatttattaaattttcgattttttttaattatgaaaaataagttatattttttttttatagttattattatgattttcgtaaaaattaggttaagagaataatttaaaaatttttaaagatattttttattttgatttttggagaagatcgtttggtgagtataatataaattattaaggggtattaaagttgtgtgatttttaggtatgttttgggatacggtttaataagattgtttttgggggattttttgggtagttttggatttaattaggtttgggtattagcggaaagatttttatttagtttatcggagaggtttaggttttatttttaagtcgtagaatttaagttagtttatttttaaaatcgtttttgacgatgatttatagggttttcgttttttttgttatttcgtttggcgttaaggtcggttgatttaaaagtttaggagtcgagtgaacggcgttattttaggcggcggcggtaattaatttttgcgcgggaggtagggggcgtcgggtcgttaggaagtcgtcgtcggttaggatgggcgtcggtttcggagattcggggggttcggatcggcggttttcgttatgttgtattttttttacggtcgtttttttttcggcgggttcggtttcgcggcggttgttcgtagtcgtattatagtttattttttcgtagaggtttttgatttgggattcggatagttgtttgtattcgtttagttgttcgatttattggtttagttttttggtgaatattttttcgtttatgatgttattcgttttagtcggttgtcgtttcgcgtttttttcgcgtcgtcgttcgtatacgggtttatacgtatacgtcgtcgtcggtttttcgtgtatttttggcggttgttgaggttggcgttggttcgttggtttttatcgtagtattcggtcgtcggtcgttgcgttttttttttcgttcgttgaggttttagagttcggttttttgtaatggcgttcgtcgggcgtggtgacgttacgttcggcgttaggaggcggcggggagcggaggggaaaagggtcggggagtaagttgcgtaattgtagagtttttttcgggcggtcgtacgatcggagttggggcgtaaattgggggttaaagcgtaggcgcgacgtagtcggttggtaattgaagcgttttgattttttgggcgtggttttcggagggcggggtggtgggggaagggaaggatggagttggagtatgcgtagtgcgtatagcggcgaatcggattaatttttgagtattattttaggagaggcgagggtttgggtcgcgcgtaggcgtagatcggatggaagtcggggttattggtagtttgtaattggtttttttgggaaggtcgttttggtgatgaatttagttttttatttggggtttggtagttcgattacggaaacgagaattgcgatttcgtggtttatttggggtgttgcggttttgtaatcgtgtgggttttcgttatttttgggggtaggaacgggtagcgagtggtcgtttggattaattatttttatttttgggcgcggttggtattttgtaattaggttattcgtaggtggaggagcgtgtatttatcgggggagtgttgcgtagtgtatttgattttcgcggtatatattcgttttcggatttaggtgtttcgtcgggcgcgatggcgggggcgaggtttgggtttttttttgggtttcggatcgcggttcgtttttacgcgtttcgtttttcgtcggtggttgtttttttttaagtttaattttttttgggaatgagagatttttaatttttgcgcgttttggtttatttttaagaggggaagtttagagaagatggatgtatttgttttgatcgcgtttcggtggcgtgagaagtagttgtgatacgtgtttaaaagagagagttcgtatattttaggattggatttttgtttggttatgaatcgttttggagtttgcgaaacgtttttatattttattgtttttgtttttatataaatatttggttttatagagcgttagttatatgttagattcggaggggttatttagacggattagggattatgttttggagtttgtatttttttaatagtattggttgaagatggtttgggataggtagaagagagattataatgtttttaggatttgaaagatatagaagttttttaaagaatatttaattataaagggtaaggtaagagttgaatttgatcgtttgttttttaggaattttatttttagtattaggtaatttttttatatttaagtgtttagcgatgtttgggaggagattgtttattttgcggttttgagggtattatttttattaataggttgaagaaggtattggaggttttattagttaatagtaggattgaaaatttttttttatttaagataacgtgtttggtaaggtcgattggtttggtttttttaggttggaaattgtaattttgttttttttttatattttttattagtgtgtataaaagaaagtattttagatttatttttttagaagttttattatatatttaatttattagattgggaaaaagattttttagtttaaattttgtttttgttttgtagttaatatttttaaataatagaagggtaagagttaagattaagtggaatgaataaggaaaaaattattatttagtgttcgtgattataaagttatatttagtgtgttgtttaattttattttttatcgttgttatgaatttgtgtgagaattgtttgatggggtaagaagtagataggtatttagaaaagagaagggatttgtttaagatagtggttaggatttaaaattgtatatttttaagtataaagttttagttatagttatgtagttgattttttaaggtttgatatatggaatagaattaatattatttttttttgtttagatttttttttttttttttttttttttttttttttttttgagttagagttttattttgttgtataggttggagtgtagtggtgtaatttcggtttattgtaaattttgttttttaggtttaagtaaattttttgttttagttttttaagtagttgggattataggtattcgttattatgttcgggtaatttttatatttttagtagagacggatttcgttacgttggttaggttggttttaaatttttgattttaggtgattcgtttgttttagttttttaaagtgttgggattataggtgtgagttatcgtatttagtttgtttagatttttttatttggaaagggtgtggtgatgttagtttgatagatgatgaagtattgaatatttattgtgtgttaaaattatgagtttttttaaagtattgtgagttttttgttggtagtattaatgtaggtgttatttatttttttttgatgtagattatttggtttattattattataaaatggagggaagatataataattatatgtatttaaaatattttgttaaataattaaatgttatgatttaattttttaaggaatgaattttaggaagtttttagtattagatagtgaagtaaagtatatatgattataaataatatagaagtaaattaattaggatatatttttttttagaagaaatttagattgtgtattttgtagaataaaatatttaatggatatgaaaatgaaaatttattttgatttatttggttttgattaatttgattttattgatttaattttagagttgaagaatatttggaataaaaaatttaaagtaaattaaaaagaattgtttttttaatttattgggaaatattagagagtaaataaagtaaatatgttttgagaaagaatttttgttttgatggtaaatttaatatatagtaagtttgagtgttgtttatgatgtttaaatatagttataaataaaaattatttgatgatgggggcggggtaggaggaggataattttgagtaaatagttttataataggtattttatttaagatataaaaattgatattaaatatggagtaggaatgagatatattttgttagtaatttttttggtattaagttaggtttatttttttgttgttgttttttttagttttttgatttttaaatttattgagatagaaagtagattagtgttagaaacgattttggagttagatggaattgggtttgaattttggttttgtaatcgtttagatgtgtgaattttggtaagttatttaatttttttgagttttggtttttttatttataaagtgggaataattataatagaaaaataataaggttattttgagaattaaatgaaattataaataaataaaattaggttgggcgtagtggtttatttttgtaattttagtattttggaaggttgaggtaggtggattatttgaggttaggagttcgagattagtttggttaatttggtaaattattatttttattaaaattataaaaaagttagttaggtgtggtggtgtgtgtttgtaattttagttatttaggagattgagataagagaatagtttgaattcgggaggtagaggttgtagtgagttaagatcgcgttattgtattttagtttgggtaaaagagtaggattttgttttaaaaataaataaataaataatattaaaatagtattaattaatgtataataagtgttagatgttgttatttttattattataatttttaagtgggtttggattttaaatatataatttttaatgttagttggagttttttatatttgtagtgaaatatatagtggtgttaggaaatagaaatagaggtattaaaaatatgtaggtcgggtatagtggtttgtaattttagtattttgggaggttgaggcgggtggattattgaaggttaggagttcgagattagtttggttaatatggtgaaatttcgtttttattaaaaatataaaaattagttaggcgttttggtgggtgtttgtaattttagttattcgggaggttgaggtaggagaattgtttgaatttgggaggtagaggttgtagtgagtcgagattacgttattgtattttagtttgggtgatagagtgagattttgttttaaaataaataaataaataaaataaaaatattatgtaaatataaagttattggatgaagtggggatgaaggaggaaatttaaggagaggtagagatggaataaatagaataattttttttttgttttgttatttatttagatttgttatatagagaaaaagttatttaggattaaatttaagaattaatataatcggttttatgtttttgttagtttagaattttatatttgaaaagggtgttatagttgaaaaggataatatgttttttgtattaaggttttttatgttttagaagttttaaaatgaagttttgagtagttaaaattttagtggttttggttatggaaagtttgttatgttttggttaacgacgtttgtttagttattagacgatttttgtatttagtttatataatgatgtttgtagtttattggtatttgtttttgttttttgtagtttttagaaaaattaagtttatattttttttttatttggaattagaattttataaatgtagttaaaattttgtggttaggaattttgttatagatatattgtttttttttttagtttttatagttcggttaaagaaaaaagagagaaatgattatgttttttggtgatgtttttgatgtttggatagtatttttagttataaaaggagatatttttttattataggaaaaaaaaattttgaaatggaaggtaaagtttattattttagaaggttgggaaaattttaatattgttattaattttgtagttatgaaaaattttattatataagtatgtttgatatagaatattatttataatatattaagtgttaaaaatattttataaaggttaggcgtagtggtttacg

SEQ ID NO: 209 - DNA, 6852 bp, Artificial Sequence
  chemically treated genomic DNA (Homo sapiens)
tgaaatttaatttttattaaaaaaaaaaaatataaaaaaaaaaattttattattgttatatttttgttatgtgatattggagaagttattgagtttttttgggatttagtttttttatttgtaaatggagatttaaaaaattttattttggtggggcgtagtgggttatatttataattttagtattttgggaggtcgaggtaggtggattatttgaggtttggagtttaagattagtttggttaatatggtgaaatttcgtttttattaaaagtataaaaattaattgggtatagtggtgtgtgtttgtaattttagttaattaggaggttgaggtaggagaatcgtttgaatttaggaggtggagattgtagtgagttaagatcgcgttattgtattttagtttgggtaatagagtaagattttgtttaaatatatatataatataatatatattaatatatatataatataatatattaatatatattatatatattatattaatatatattatatatattatataatatatattatatataaatataatataatatatataatatatatatataattattttatagtttgtttagaagatgaaatgagataaatatttaagtgtaatagaaggtattgattattatatttagtgtgggttacggaaatgaaaaaagatattgtgtatatttataaagtttttattttatttgttttttgtaggtagattgttttgtagagtgtttataagattttattaggggaattatttaaattgtttaagttatatatgatttttttgaaaatattttaatagtagttgggtatagttttgtttatgtttttaattttagtatttttagaggttgaggtgggtagattatttgaggataggtgtttgaggttagtttgggtaatatagtaaaattttgtttttatttaaaaaaaaaaaaaaaagtttagtttggtggtatgtttttgtaagtttagttatttgggaggttgaggtatgagaattatttgtattcgggaggtagaggttgtagtgagtcgagattgcgttattgtattttagtttgggtgatagagtaagattttattttaaaaaaaaaaataatagtaattaatgaaagttaagaaagtaaattgggaattagttaacgtgtatttatttttagatttttttgagtaagatagggtttttaagtttatatatttgtggttaagtgttggtttgtgtttttttggtatttttcgattacgtgtttttttattgtattttttagtagtagatgtgtgtaaagagttataaatttagtaataataggtgggaataggtttgtttttttttggttttttttgttttgattaaagggttttttataggatttggtaagcgtgttttgtttggtgtattaagtagatagatatttttataggaagttttatatattgagatgattttttttttaaattagagtaggtggcgacgttttattttttaattgttagggtttttttgagtttgtttttttatttttgagatgaagtaggtttatcgttatgagggtaaaatattatggtttgttgagagatttaaattagatagtatttatggttaaggttttgtaagttggagatagtaaattatttggaagaatatgtataagttatgaagttgaggtggggagatggtttgaggttagtaatgtgagattaatttgggaaatatagtaagattttgtttttataaaaaattaattgtatatggtggtgtttgtttgtagttatagttatttgagaggttgaagtaggaagattgtttgagtttagaatttcgaggttgtagtgatttatgattgtattattgtagtttgggtaagttggagtgtaatggtttgatatcggtttattataattttcgtttttttggtttaagcgatttttttgttttagtttttcgagtagttgggattataggtacgtattattatataaggttattttttttgtatttttagtagagatggagtttttttatgttggttaggttggttttgaatttttaattttagttgatttatttgttttggttttttaaagtattgggattataggcgtgagttatcgtgtttggtaaaaatgtttttttaagtggaagatagatatggaagtgagatggataagagtaatttttgattttgggttagcgggtgttttggtttttttttttaatggttattttgatgaaagggaggtggtttatggttttttgaaagggttgattagggtttaaaaagagttaggtcgtttatattagggtgttagggtgtattggtttttgattattagatttaagttagtttattttataggtatgtagtatttttaaggttttaaataatgtttttaaaatagtatttggtataaagtcggtgttatatatatttttgttataattattttagtttttaggtaagttttattggtttttaagaataaattatttatgtaaattaaattatttttagggtatgtaaagtttatattttttttttttgtttttttttttttttttttttttttttttgggttttggttaagatggagagttttttttggagagtttgggattgaattattaaagaagggtagagtaagtaaaaaggaaaataaatgaaggtatatttagagaaatatatttatgaaaaatattagtattgaagaaaatatagtacgtagtgtattgaagttttgtatttgttgtataggtagttaaaagatgatatatagagggtggatttttagttttgattaatttattggtaacgtgggaaatatttatgtagaaatagaggaatgattatgtagtggtgtagttgtttttttgaaggaattttgaacgttgtattatagtttaattgttttggaaattaaaaatatggtagaaagtggagatggtggggaggacgtgtaaatatttttaattttttttttttggtttttaaacgtttttattattttatttagttttaggttaaattttggatgtttttataggtgttttttacgtgtaaaatgtgtatatttattttttaggagtatcgtggagatggaatgggatatgtaaagtgtgttgtatatagtaattgtattattagagtattttttaatagaagtgtatatttttttatagttgatgattggtattttttgtttatttttttttttttattttttaattttattgacgatgtttttaatataaatttaataataacggtagttaatatttattatgtgtttaaattaagttattttatttttttaataattttattaggtaggattgttatttttattttttgagttttggaattatattaggtagtttggttttagagtttagtattttttgtgtttttgtttttgttttgataggatcgtattttgttttttaggttggagtgtagtgatgtgattatatagtttattgtagttttgatttattgggtttaagtagtttttttattgtagttttttagtagttgggattataggtacgttattatatttggttaatttaaaaaaaaaaattttttttggagagatgggtttttttatgttttttaggtcgaattcggaatttttggttttaagcgatttttttatttcggttttttaaagtgttgggattataggcgtgagttatcgcgttcggttttgagtttagtttttaagtacgtagtttaatacgtttagttggagagacgtcgggttattttttgggttatatttttttattataaatttaggttttttttagaaattatttttagtgttcgtagtgtttaggattttcgttttggattttggggtttacgagaaggtaatttaatttatttagatagaattagtttaatcgtgtttttttgaatttcgtgaatttttatttcggttgagtagtaagtttgtatcgttgtttttttttttgtggttttagggttaatttaaagtgataattttttaagaagtagtacggggttttttgtttgtttgttttttgtttttgagacggagttttgttttgttatttaggttggagtgtagtggtgcgatttcggtttattgtaatttttgtttttcgggtttaagtaatttttatattttagttttttaagtagttaggattataggcgtatattattacgtttggttaatttttgtatatttttaagtagagacggggttttattatgttggttaggttggtttcgaatttttgattttgtgattcgttcgttttagttttttaaagtgttgggattataggtatgagttatcgtgttcggtttaggtatttttagaagatataggattttatgaatttttgtaggagagtacgtaaattggatttttaagttcgttttagagtttcggcgttagtgttcgaggttgggatattgttaggtgtatatagtcgcggtttggcgtaggcggtgcggatagagggtatgttatggcgagacgttggcgcggcgtaggttttgtcggtcgggatacggagggcggggtataggcgtagtaggaagggggcgtggttaagagtcgttcggtcgttttttcgttttttttttttcgtttttcgttttagttcggcggtttcgttttttaggtgacgttattggttaggttagtcggcgttattttgaaagtggagtcgtttgtttttgtcgttgtcgtcgtcgtcgtcgttgtcgtagtcgtcgtcgtcgttgtcggagaaagagtacgagcggggaagttttagagtgaaatttagtattttgtcggttggtttgttcgttttttttttttttttttttcggttttcgtttttttttttcgtaggtgttattcgtcgttattcgttttttttatttttttatttttaggtgaggggggtgagtttaggaagcggagatttcgaggaatttagtagggttattatttgtagcgtaatatggtaggtaaaggagaaatttttttcgttttttgataaggtatcgtttttttatttttttttttattattttttagcgatcgttcgcgtttcgcgtagagttatagggcgtttttcgggtttgagggagtagggtttagaggggtggggtgggggcggggagggttttcgggaggtaagtggttacggtgagagttattgggtttggagaacggggttggcgtcgtggcgggggtgggggtggggtgtgtcggcgagtttggggtgaggcgtgggtggggcggggtgggggtgcgtgtagatttgtttttttcgttcgggagtttggtggatttttttttatttttttattttgtttttcgtttttattttttttttttgtaggtttttatttaatttttatttttttttttgttgtaagtttttttgggtgtatatatatatttattttgtttcgagaaggaagagcgttttataagttaaaatatagtgggggtatatgtgtattttttttttattgtagatgttaatatttttgagattggaagtttaaattttttgtttcgaattatttcgttttcgtttttttttttttatcgtcgaagagtgtaaggttttttatgtatagtaagttgtatgaaaataatttaaattttgcgtttagtatgttagtttttttgtagatgttttttttttaaaagggtttggtagagttagttaaaatagttgcggagtttagagatataaatagtaaggaggagagagatttaggtagaagttttgaaggggaggggaaaggatgtagagagaaaattagtttggaaataaatttagtaaggaataggggtgatgggggagagagaagtaatgtaattgttttgagaattttttttgtatatgttggtattgttaaatttttttttttatgtagtagaattagttgtagatttagatttagtttttttttttttagagttttaggatatttttaattatttcgattttagtatttgtacgtgaaatagaaatatttcgagatgagattagtttttcgtgttgtatttattatttagataattaaattttttgaaaaagttaatatgtcggattgatttacggtttgttataaataagttgtttgttggttttgttgaaaaatgaaatgagattaaaattgttttgtacgagatgatattagtaaaatgaattttttgttaggttttttggagttaagggatgaggtgaagggaggtagaataagttttttttgatagtttttttagtagtatttatttcggtttttttttttttttgtttggagttagtgatttgttggtaatgaatgtaaagaaatgggtgtagtgtttgttgtgtgtgtattttggtgataaggtttatatgaattattattttttatttaggtagtaatgttttcgaagtttttttttcgttttatgttttatggtagtttaattttattaatttttttgtaggttttttgtatatttaagaaaattttttaatttttggtatttattttttttttggtaggttttgtttgaatgtaaggtttttattgtatttgataggaagtttgtgaatagatgtttaatgattatagaatatgtgtttttaaatatttcgtatttggaattttttttttttttttaatgtagtattaagtattggggattaatttttttttaaattggtgtttttggtggtagttgtatgtgtgggtagaattaggttgttagtattatgttaattatggatattatttttgtgtttacgagagttaatataagtagaattcggttttaattggtatgttttttttttttagg

SEQ ID NO: 210 - DNA, 6852 bp, Artificial Sequence
  chemically treated genomic DNA (Homo sapiens)
tttggaaaaagaaaatatattaattaaaatcgagttttgtttatgttgattttcgtaaatataaagatggtatttatggttggtatgatattaatagtttagttttgtttatatatataattattattaagagtattagtttggaaagaggttagtttttaatatttggtattgtattagaaagaaaaaaaagattttaggtacgaaatatttaaaggtatatgttttgtggttattaaatatttgtttataaattttttgttaaatatagtaaaagttttatatttaggtaagatttattagaaaaaaagtaaatattaagagttaaagagtttttttaagtgtataaaaagtttgtagaagagttaataaggttaaattattatgaaatatagaacgaagagaaaatttcgggaatattattgtttgggtaaggagtaatgatttatatgaattttattattaaagtgtatatatagtaaatattatatttatttttttgtatttattattagtaaattattggttttagatagagaggaaaagaaatcgaaatgaatgttgttaaagagattgttaaaggaagtttgttttgtttttttttattttattttttgattttaaaggatttggtaaagaatttattttgttaatgttatttcgtgtaaaataattttaattttattttattttttaataaggttaataagtaatttgtttatagtaaatcgtaagttaattcgatatgttaatttttttaaaaggtttaattatttaaataatgaatatagtacggaaaattggttttatttcggaatgtttttattttacgtgtaagtattgaggtcgaaatgattgaaaatgttttggggttttagggagaaagaaattgaatttaaatttgtaattgattttattatatgaaggaaaagatttagtaatattaatatgtataaaaagaatttttaaagtaattatattattttttttttttttattatttttattttttgttaaatttatttttaaattggttttttttttatattttttttttttttttttaaagtttttatttaaattttttttttttttgttatttatatttttgaatttcgtaattattttaattaattttattaaatttttttgggaaaaggatatttgtaaaaaagttaatatgttaaacgtaaagtttaaattatttttatgtaatttgttgtatatgaaaggttttgtatttttcggcggtaaaagggaagaaacggaaacgaaatggttcgaaataaaaaatttaggtttttagttttaaaaatattggtatttatagtggggaaaaaatatatatatgtttttattgtattttaatttataaggcgtttttttttttcgaggtaaaataaatgtgtatatatatttaagaaggtttgtagtagggggaaaaatagaaattaaatgaagatttgtaggaaaaaaaaataaaggcggggggtaaggtggggaggtgggagaagatttattaggttttcgagcgggagggataaatttgtacgtatttttatttcgttttatttacgttttattttaagttcgtcggtatattttatttttattttcgttacggcgttagtttcgttttttaagtttagtgatttttatcgtgattatttgtttttcgggagtttttttcgtttttattttatttttttggattttatttttttaaattcgaggggcgttttgtggttttgcgcgaggcgcgggcggtcgttagggggtgatggagggaggaataaggaagcggtgttttgttagggggcgagggggattttttttttatttgttatgttgcgttgtaaatggtgattttgttgggtttttcggggttttcgttttttgaatttattttttttatttggggatgggggggtagagagggcggatggcggcggatggtatttgcggggggaggggacgggggtcggggggaaaaggaaggaggggcgggtagattagtcggtaggatgttagattttattttggggttttttcgttcgtgtttttttttcggtagcggcggcggcgattacgatagcgacggcggcggcggtagcggtaggggtaggcgattttatttttaaaatggcgtcggttggtttggttagtgacgttatttagggggcggagtcgtcgggttggggcggagagcggagggggaggggcgggggagcggtcgggcggtttttggttacgttttttttttgttgcgtttgtgtttcgtttttcgtgtttcggtcggtagggtttgcgtcgcgttagcgtttcgttatggtatattttttgttcgtatcgtttgcgttaggtcgcggttgtgtgtatttagtagtgttttagtttcgagtattagcgtcggggttttggggcgggtttaggagtttagtttacgtgtttttttgtaaggatttatggggttttatgttttttaggaatatttgggtcgggtacggtggtttatgtttgtaattttagtattttgggaggttgaggcgggcggattataaggttaggagttcgagattagtttggttaatatggtgaaatttcgtttttatttaaaaatatataaaaattagttaggcgtggtggtgtgcgtttgtaattttagttatttgggaggttgaggtgtgagaattgtttgaattcgggaggtagaggttgtagtgagtcgagatcgtattattgtattttagtttgggtgatagagtaagatttcgttttaaaaataaaaaataaataaataaaaaatttcgtattgttttttaggaaattgttattttggattagttttgagattataaagaaagggatagcggtgtagatttattgtttagtcggggtgaaagtttacggggtttagagggatacgattgggttggttttatttgggtgaattaaattattttttcgtgggttttaggatttaaggcgggagttttaggtattgcggatattaagagtgatttttaagagaaatttgagtttgtgatgagagggtatggtttaagaagtgattcggcgtttttttagttaaacgtgttggattgcgtgtttaagagttgggtttagggtcgggcgcggtggtttacgtttgtagttttagtattttgggaagtcgaggtgggaggatcgtttgaggttaggagtttcgagttcggtttggagaatatagggagatttatttttttaaaaaaaatttttttttttaaattagttaggtatgatggcgtgtttatagttttagttattagaaggttgtagtaggaggattgtttgagtttagtaggttaaggttgtagtgagttatgtgattatattattgtattttagtttgggagatagaatgcgattttgttaaaataaaaataaaaatataaaaagtgttgggttttgaagttaggttgtttaatatgattttaaggtttaggagatgaagatgatagttttatttgataggattgttggggagatgaaatgatttaatttgagtatatgataaatgttagttgtcgttattattagatttgtattgaaagtatcgttagtaaggttaagaggtagaaggaaaaaaatgaataggaaatgttagttattagttatgaggggatgtgtatttttgttgaaagatgttttaatgatgtagttgttatatatagtatattttatatattttattttatttttacgatatttttaggagatagatatgtatattttatacgtgaaaaatatttgtaaaagtatttagaatttggtttaaggttgaatggagtgataaaggcgtttggaaattaagaagggggagttaaagatatttatacgttttttttattatttttattttttattatatttttgatttttaggatagttgaattgtaatgtaacgtttaaaatttttttaaaggaataattgtattattgtatgattatttttttgtttttgtatgaatattttttacgttattaatgaattaattaaaattaaaaatttattttttatgtgttattttttggttatttgtataataggtataaaattttagtgtattgcgtgttgtattttttttaatgttggtgttttttataaatgtatttttttgggtatgtttttatttatttttttttttgtttgttttgtttttttttggtggtttaattttagattttttagggagagttttttattttaattagaatttagaaggaaggagagagagagaaaggaagatagaaaaagagaatatagattttatatattttgaaaatgatttggtttatataaatgatttgtttttagaagttaataaagtttgtttagaaattgggataattataataaaaatgtatatagtatcgattttgtgttaggtgttgttttaagaatattatttggagttttgggggtattgtatgtttgtggaatgggttgatttgggtttgataattaagggttagtgtattttggtattttggtgtaaacgatttggttttttttgggttttggttagtttttttagaggattataagttattttttttttattagaatggttattaggaggagaggttagaatattcgttagtttagagttaagggttgtttttgtttattttatttttatatttattttttatttaaaaaaatatttttgttaggtacggtggtttacgtttgtaattttaatattttgggaggttaaggtaggtggattagttgaggttgggagtttaagattagtttgattaatatggagaaattttatttttattaaaaatataagaaaaatagttttgtgtggtggtgcgtgtttgtaattttagttattcgggaggttgaggtaggagaatcgtttgaattagggaggcggagattgtggtgagtcgatattaagttattgtattttagtttgtttaagttgtagtggtgtaattatagattattgtagtttcgaaattttgggtttaagtaatttttttgttttaattttttaagtagttgtgattataggtaggtattattatgtgtagttaattttttgtagagatagggttttgttatgttttttagattggttttatattgttggttttaagttatttttttattttagttttatgatttgtgtatgtttttttagatggtttattgtttttaatttgtaaaattttggttatagatattgtttggtttaaattttttaataagttatgatgttttgtttttatgacgatgagtttgttttattttagaggtgaggaaatagatttagaaaggttttagtagttggggagtggggcgtcgttatttgttttgatttgaaggaaaggttattttagtgtatagaattttttatagaaatatttgtttgtttagtatattaaatagagtacgtttgttagattttataaaggattttttaattagaataaggaaggttagaggaaagtaagtttgtttttatttattgttgttgagtttatggttttttatatatatttgttattgagaggtgtagtggagaaatacgtagtcgggaagtattaggaaagtataggttagtatttaattataaatatgtgggtttgaaaattttgttttgtttagaaagatttaaaggtggatgtacgttggttggtttttaatttgtttttttggtttttattgattgttgttatttttttttttgagatggaattttgttttgttatttaggttggagtgtagtggcgtaatttcggtttattgtaatttttgtttttcgggtataagtgatttttatattttagttttttaagtagttgggtttataggagtatgttattaggttgagtttttttttttttttttaagtagagataaggttttattatgttgtttaggttggttttaaatatttgtttttaaatggtttgtttattttagtttttgaaagtgttggaattagaggtatgagtagagttgtgtttagttgttgttaagatatttttaaaagaattatgtatagtttaaataatttaggtgatttttttgataaaattttgtagatattttatagagtaatttatttgtaggaagtaggtggaatagaagttttgtaggtgtatatagtgtttttttttattttcgtggtttatattaaatgtaataattaatgttttttattatatttaaatgtttgttttattttattttttagataagttatgaggtgattatatatatatattatatatattatattatatttatatataatatatattatataatatatataatatatattaatataatatatataatatatattaatatattatattatatatatattaatatatattatattatatatatatttagatagggttttgttttgttgtttaggttggaatgtagtggcgcgattttggtttattgtaatttttattttttgggtttaagcgatttttttgttttagttttttgattagttggaattataggtatatattattatgtttagttaatttttgtatttttagtagagacggggttttattatgttggttaggttggttttgaattttagattttagatgatttatttatttcggttttttaaagtgttgggattataggtgtgatttattgcgttttattaaggtaaaattttttaaatttttatttatagataaagaaattgaattttagagaggtttagtgatttttttaatgttatatagtaaggatgtggtagtgatgggatttttttttttgtattttttttttttagtagagattgggtttta

SEQ ID NO: 211 - DNA, 10048 bp, Artificial Sequence
  chemically treated genomic DNA (Homo sapiens)
  unsure (3184, 3255, 3396, 6016, 8568)
taaatagttggttggtttttgttaattagaagtatttttatgatatattaggatttttattttgatatgtaattttttttttgtagtattttttgagtaaaattttttggtgttattttagagtgattttttgtttttggtgttattttagagtgattatgttatttttttggatttgtttttaatattaattttaatataggtttttatttagttgagttgattttttagttttattgtgttatgtttttgttatttagatttttatagttttgttgtttgtattattttaattgttttttttattttaaggttttagttgatgttattattttagtttttataattatatttagttgagattgttgaatggatttatatgtttatatataaaataaagggttaggttaggtatagtggtttatatttgtaattttagtattttgagaggttgaggtgggtagattgtttgagtttaggagtttaggattagtttgggtaatatggcgaaattttgtttttattaaaaatataaaaattagttgggtatagtgttatgtgtttgtagttttagttatttagtaggttgatgtgggagaatagtttgagttagggaggtggaggttgtagtgagttaagattatgttattgtattttagtttggataatagaggaagattttgttttaaaaaaataaaggggtagatttattttggtataatatattgtatatataatattgttttttaatagttatatataaattaaaataagagatttttttagataaatgtttaaaattattttttttgttttgtgtaattaatttatttttttttaaaatattttatgtagttgatttttttagaaaaaaagaatattataaattattattgttttcgtttttaaagggggaagggtaaggaataataagagggtttagaaagttttaagaaatttgttttggattttaaattaagtttaatagaatgaattgtataaatatagaatgtgttgtgttttatagttttattttttgttttttatttaattttatttttttttagggtatattttaaatttattttttagttttgtaggtttttttagtatagggtaagggagtattttttttcgtttgggatattagaggttattttaaaaaagaaaaaaaatatttagtttttagggttatagtggagaggttagttttttttttatataattttgttagagggaatttgtaaaatttatgtttagtagtttattttattcggttttttttgagaaagattgttttttttgtttaggtatgtttgttttggagaaagatatatggaatggtaaggtaggaaaggaattttagatttagattaagatagttggattttaaattaataattgatgtgttttagttatttttatagtagagagtattagttttttgtttaatgaagtttttttatcgttgttattttgaagatttagattgagtatatggtttagataggattgtttgtgtttttagatagggaaagtttatgagtgatttgtaggttaagaagagatgtaggtagttgtgtaggaagtttttattggtggtaattagttagtttgttaggatggatttaattatatgttgtagggagtaggagaaaatattttttagtttattttagaaagatatttggaaaatttttatagtggttttttttattgtaattgtatatagtttttaattttttacgtgtttaaatttaatttataatttatgtgtttatgattttttatttttttttattttggttagtttttttaggagaaatttgttattttaaaatagttttttttttataatttttagttttatagattgtatatttttttgttattaaagtagagagagaagagagtagattatagattatatatttttttgtagtgaaatttttttatgtttgatttttttttggaaagttattttaaaaattatattttttggtgttatattttagttgttatgaattttttgaaattaattcgtgtttttagatttttttagaaattaagtatatatattaatatttttatttaaatataagtaaataagtaaaaagtaaataaattaattttatgttagtttttttttgttaataatttattgttatagattagtttttttttaagttttttagggattttggtttttttgtttttgaattttttggaaaatattttgatatattaaaatttattaattatttttttattaaaagatatgaagaaatatttttttgtttaagggtataataatagggtaggtttttaattattgttttgattttgaaatttagtagatttataggaagtaaatgaaatgaaaatattttttgttttttgttttaaattaatattgtgttagaaagtatagtaagaaagagattatatttttattatttttttagttttatattaagtaaagtgtttggtatataagtgattatatataaaaatatttgttgagtaattgaatgattataaaattaaaatttaaatttttgtttttaagagtttagatattattggaaaataatgattaagttataaaatattatagtagaagtttttttatttgaatatgattgagtttgatagtagggaattataaattatatgtgtgtgtattataaaatgtttatataaatattttaatttaggtattaatttattttgatgttttttgatagagggttaaagttttttttttgagaatgagttttatatatatttagagttttgtgatatatttttttgataaattatatttataataggtttgttgtttgatttgtagttttagtttttttagagagagaatatagtagtaaagtaatttgaatgtagatattttttaaattttagtgattttttttttttattttatttttatttaattttatagtaaaatttttttagtagtttatttttattaaaatttagggttttttattttaatttttagaaatagtttttatttttttttacggttttattatttgtgttaggtttattgtaatgtataaattttttagtagttatttttattaaattagggttttttttaatttagaatagtttttttttttacgttatatttgtttagtttatgtaatgaatgaataantattgtgaaaagtataattagtataattagattgaggataaatgtagttgatttttagtaaatatataatntaattattaaggtaagaaatatgagagtgtaagagaaattattagttataaatttgtgtgtgatgggtattagttgttttgttttagaggagaaatggagagttttggttaaataagataatatgttaagtggagtttttntgagagacgttatatagtattttattaagtgttgtatatataaagttaagaattatagtaaggggatttaaataaataggaagtttttatgaaatagttaaattttgagatggattttgaaagatgattagaatgtataatttgaggaaagggagtatttttaggaaaggaatgaatttatttatttatagttataggttggtgttgggaaggagaggaaatttaaggtgtggaataatagaataagtattaaattgtaagtttaaaggtttagttgtatttttataaatttttttgatattttatttaggagataaataatgagggagaaaaagagtattttagtcgggagtgtaaggaaaaaatatgggaaagttatttattttaaagaattaatatggaagtttagtgagagagaaaattgagaaaataaggaacgatttaggatgaagtataagattagtggtttttagttgtaatttttttttaattatagtacgtattaaaagtttttagataaaatttgatgtgaataatagattttgttatttaaaagaaattttttaaaatatagttttagatatataagtttaatgtatatattagaaagagttgttagaatgttttgaaaagaaattagtgggaaaaagtagatttaaatttgtaggaaattagtggaaaattaaagaatttaatttttaattttagttgattaaagttttttaaaggaaaaaaatttataaatttagtatgtagtatgttattgttgtttgattattttttgttttttttttagttaaattttatttgtttatatgtatttaaaatttttttatggtatttagttgttttatttttttaatatttttaagaataaatttttaaatatgtttattattagtttaagaaaatgtttgataattatgatagttttttgttttaaaaaattttatatttgagattaatagatttttttgtaaatttttatttgagaatgaaagtttttgtttttttttttgttttgattagagagatttggaaagatttgggtatttatttttttttaaataaaaaataaaaaattatttttaatagttttaaattcgaagtttagtagtttgtttttttttttataaaatattaaagagaaaaagtcgaaaatgttttatatatttttttttttttagtttgagaagaaattgttttatgtggattgatattttatatattttgagtttaagaagttagtattatttgagaaggtattatttttaggtttagttgtaatgtttttaattttggtatatagagtagtgggtgtttttttttttagaaggttttatatttttaatatgtgtaggttaatttgatataaagttattaataaggagtaataggtttattgtaggttgtgtttataatttgaaaattatgagtaggtattgggagttatagattgtatttgggaattagttgtatgttaggataagtatagattgtggtttgtggaggttgggagagtataatgtttgaattttatttttttgggagataagaagaaaaaatatttttttatttgataagattgataatttgttaaatttgattatttttagaagtgtgttggatagttgcgaagtaaatatttattttttaaagatgatgattaaggaaatatttttacgaagggattcggatttaaggggagagttagtttttttggtaaggggttgtgattttgttttttttttacggtttaagaagcggttgaagttattttagtagatataggtttgaaatttgggtgttttgttttgttttgttttgttttgttttgaaaatatttttattattaataaaattatttagtgaattaatttataagtaattttatagtttttttgtattttgatattagattaaggaattaatgtgtgttttttatttagttatttgtagaaagttatttgtagagggattttaataggtttaaaaatagattttttggatttggagtatagtatttatattttttttttgtagagagggaatttagttttagagataataaatataatttaatgaatattttataatttaggtagaaaattattagaattttttatagaaatatttttgagaaattagaatttttgtattaaaagttttgtttgtattttgaattaatagattatatattagcgtgtatatatatttgtaataaatgtttgtttaaaaagtatgttaattttggtaatttttttttaaagtaagacgtatttgtttatatagataattgtgtatgtgtgtgtcgtaatgtatgtagataataaagattggtggttatttttagattattaaaaatgttttttttaagtaagttgtgtaattgagttatttttgtttatgatgagtattttgtagagtttttatttttttgtttaaaatttatggtagtttttattaaataagtgtttaatattgattataatataaattaaggattgtataaatgttggttatttaaaatttagtaagaaattatagttttatggttattttgattatagaataattttaaattatttgggtaaatatgaaattgtttttttgtagttanaaaatgtgatgaattaattttaagttgtttttagtttattagaatggttatttttatatattgattttatttatttatgagtatgggatgtgtttttatttgtttgtgttatttgtgattttttttagtagtggtttgtggttttatttgtagaggttttttatttttttggttaggtatattgttaagtatgttttttgtttgtttgtttgttttttgtagttgttgtaaaaggggtcgagtttttgatttgatatttagtttgttcgttgttggtgtatagaagagttattgattcgtgtatattaattttgttttcgaaaattttgttgaattattttattagttttaggagttttttggaggagtttttaggattttttgggtaaacgattatattattagtaaatagcgagaatttgattttttttttttttttttaattaattaatttatttatttatttttttttttttttgagacggagtttcgttttgtcgtttaggttggagtgtagtggtttaattttagtttattgtagattgtaagttttgtttttcgggttgatattatttttttgttttagttttttaagtagttgggattataggtatttattattatgtttagttaattttttgtgtttttagtagagacggggttttattatgttagttaggatggtttcgattttttgatttcgtgatttgttcgtttcggttttttaaagtgttgggattataggcgtgagttattatattcggtcgattttttttttattgatttgggtgttttttattttttttttttgtttgattgttttgattaggatttttagtattatgttgaagaagagtagtaagagtgggtatttttgttttgttttagtttttagagggaatgttttttattttttttaatttagtattatgttggttgtgggtttgttatagatggtttttattatattgaggtatgttttttgtatgttaattttgttgagagtttttattataaagggatgttggattttattaaatgttttttttttatttattgagatgattatgtgattttggtttttaattttgtttttgtggtgtattatatttattgatttgtatatgttaaattatttttgtatttttgatatgaaatttatttaattatggtggattatttgtttgatatgttgttagatttagttagttagtattttgttaaggattttagtatttgtgtttattagggatattggtttgtaggtttttgtttgtttggttggttatgttttttttttttggttttggtattagggtgatgtcggttttatagaatgaattagggagggttttttgtttttttgttttgtggaatagtgttaataggattggtattaatttttttttgaatgtttggtagaattcggttgtgaattcgtttgtttttgattttttttgttggtaatttttaaattattattttaatattattgtttgttgttggtttgtttagggtatttaattttttttgatttaagttagaagggttgtatttttttaggaatttatttattttttttaggttttttagtttatgtgtgtaaaggtgtttatagtaattttgaatgattttttgtatttttgtggtgttagttgtaatattttttgttttgttttttattgagtttatttggatttttttttttttttttttagttagttttgttaatggtttattaattttatttatttttttaaagaattagttttttgttttatttattttttgtatttttttttttttgtattattttttttaattttatttagttttgttttgattttggttatttttttttttttgttgggtttgggtttggtttgttttatttttgtttttttaattttttgaggtgtgattttagattgtttgtttgtgtttttttagattttttttttttttttttttttttttttttttttttgagatagaatttttttttgttgttaggtcggagtgtagtggcgtgattttggtttattgtagttagtattttttgggtttaagtgatttttttgttttagttttttgagtaggtgtgattataggtgcgtattattatatttagttaatttttgtattttttagtagagatagggttttattatgtttgttaggatggtttcgattttttgattttatgaattatcgatttcggttttttaaagtgttgggatgatgggcgtgagttattgcgtttagtttagattttttgatgtaggcgtttagggttatgaattttttttttagtattgtttttgttgtgttttagagggtttgataggttgtgttattattgttatttagtttgaagaatgttttaatttttattttgattttatttttgatttagtgattatttaggagtaggttatttaatttttatgtatttgtatggttttgagggttttttttggagttgattttaggttttattttattgtagtttgagagagtgtttgatataattttaattataattaaagtgntgtaattatttggagggtttaggtgtttattttgaattgtagtaaaaattggtgtgataattggtttttatatttttaatagttttaatatatgagtagattttattttgtgtattaatgttagatattaatatagggaaattgggttattatgataaaaataggagatttaattatttttatatatttatatgaataaattttatttttttataaaatttatatttttaagggtagttaaaatttttattatgatttttaaaattatgttataaatttatatgttaagaaatatgataaatatattttttatagatatattattgtttaaattttagagatggtattagggtaatttaaggaagaaatttgaataatattttgtgtttataatatttatataatgtatttagttagttaatagttgtgtttattttttatattttatgtagtatttaatatagtattatgtttatgagttttgataatttggttattaattaagagtggaaattagaattatgaaaatttttatggaattttttttgttttttttggtaagaattttagaattaaatttagtttttattggtaagataaatttttatttgaataatggtgtatttttttttttttttttttaaattatgggtaattttaattttttcgttgtttttttgttattttttattgatttttttaatgtttttttatagtatgttatattaaattatttttttaaaagaagaagaatataaattgtaaatgagttattaaattgtaaagggagtttggttgtgatgaaattaatgattatggtttttgtttattggagtaaattataaataagatatatgtgtattttgtagaaaatggcgtggttttagtggtaaataaattagttaggtaggggatattttagaattaaaatgttttaatttttttaataaagatttttttagtattaagggttggtagtgattttattttagtaaagttaaattagagaaggtaaaaggagttttttttttaaatatttttcggatatatatatttaaaaggaatttgtttttgtttgttgaaagagaggtaaaagttatagaaagattaagaattgtttttaaaaagaatgtattaatttagttttaatagagtgagaatatattttgagatttttaatatattaattaatattgttttttgagttttttgaaatgtttgttaaatagttgatggagaaatttatgtatttttttaaacgtaaatttatgtaaatttgagtattggtagataattaataaattaattaatttagtgtagataagtattttttagaaatatgtttattatttttaagagtatagtgagtttttaattttttttgtttttgattgtggttttttatattgttggtgagaatttttagtaaatgaatattgtttaaattttttgtgttttataattttattttttttttaga

SEQ ID NO: 212 - DNA, 10048 bp, Artificial Sequence
  chemically treated genomic DNA (Homo sapiens)
  unsure (1481, 4033, 6653, 6794, 6865)
tttaaaagaaaaataagattatgagatataaaaaatttaaatagtatttatttattgaaaatttttattagtaatataagaaattataattagagataggagagattaagggtttattgtatttttaaaggtggtaagtatgtttttagggaatgtttatttgtattaaattaattaatttattaattatttgttagtatttaagtttatatagatttacgtttaaaaaaatatataggtttttttattaattatttggtagatattttaaaagatttaaagagtaatgttagttgatatattaagaattttaaggtgtatttttattttgttggaattggattaatatattttttttgaagatagtttttggtttttttgtgatttttattttttttttaataggtaaaaataagttttttttaaatatatatattcgaaaagtatttggggaaggggttttttttattttttttagtttgattttgttgaggtagaattattgttagtttttgatgttgagaaaatttttgttaagaaaattaaagtattttagttttgaaatgttttttatttggttgatttatttgttattagggttacgttattttttgtaagatatatatgtattttatttgtggtttgttttaataggtaaaaattatggttattaattttattataattaaattttttttatagtttaataatttatttatagtttatatttttttttttttaaaaaaatgatttgatgtggtatattataaagagatattagaaaggttagtaaagagtggtagggaggtaacgaggaaattaagattgtttatgatttaggaaaaagggaggggaggtatattattatttaggtagaaatttattttattaataaagattaaatttagttttgagatttttattagaaaaagtaaaaaagattttatgaggatttttatagttttaatttttatttttaattaatggttaaattattaaggtttatgagtatggtattgtattagatgttatataaagtatgaaagatgaatataattgttgattagttaaatatattgtataggtattatgaatataaagtattatttaaattttttttttaaattattttaatgttatttttaaagtttgaataatgatatatttgtaagaaatatatttattatattttttaatatataggtttataatataattttaaaaattatgataaaaattttagttatttttaaaaatgtgagttttataaagagataagatttatttatataaatatatgaaaatggttaaattttttatttttgttataatagtttaatttttttgtgttaatatttgatattaatatatagaatggagtttgtttatatattaagattattagggatatgaaggttagttgttatattagtttttgttatagtttaggataaatatttgagttttttagatagttatantattttagttatgattgaaattatattaagtatttttttagattatagtggaataaaatttgaaattaattttaaaaggaatttttaaaattatgtaaatatatggaaattaaataatttgtttttgaatgattattgggttaaaaatgaaattaagatggaaattaaaatattttttaaattgaatgataatagtgatataatttattaaattttttgggatatagtaaaggtaatgttaagagaaaagtttatagttttaaacgtttatattaaaaagtttgggttgggcgtagtggtttacgtttattattttagtattttgggaggtcgaggtcggtggtttatgaggttaagaggtcgagattattttggtaaatatggtgaaattttgtttttattaaaaaatataaaaattagttgggtgtagtagtgcgtatttgtagttatatttatttaggaggttgaggtaggagaattatttgaatttaggaggtgttggttgtagtgagttaagattacgttattgtatttcggtttggtaatagagagagattttgttttaaaaaaaaaaaaaaagaaaaagaaaaagaaaaaaagtttgaaagagtataaatagataatttaaggttatattttaaggaattagagaaataagaatggaataaattaaatttaaatttagtaggagaaaggaaatgattaggattagagtagaattaaatgaaattgaaaaaaataatataaaagaaaaaaaatataaaaaataaatgaaataaaaagttagttttttgaaaagataaataaaattgatagattattagtaagattaattaagaaaagaagagagaaaatttaaataagtttaataagaaataaaataggagatattataattgatattatagaaatatagaagattatttaaggttattatgaatatttttatatatataaattagaaaatttagaagagatgaataaatttttggaaagatataatttttttagtttaaattaggaagaattagatattttgaatagattagtaataagtagtgatattgaaatggtagtttaaaaattattaataaaaaaagttaaggatagacggatttatagtcgaattttattagatatttaaagaagaattggtattaattttattgatattattttataagatagagaaatagggaattttttttaatttattttatgaagtcggtattattttaatattaaaattaggaaaggaggatataattaattaaataaataaaaatttatagattaatatttttgatgaatatagatgttaaaatttttaataaaatattagttaattgaatttaataatatattaaatagataatttattatgattaagtgggttttatattagggatgtagggatggtttaatatatgtaagttaatagatgtgatatattataaaaatagaattaaaaattaaaattatatgattattttaataaatggagaaaaagtatttgataaaatttagtatttttttatgatgaaaatttttagtaaaattggtatataagggatatattttaatgtaataaaagttatttatgataagtttatagttaatataatattgaattgggaaaagtggaaagtattttttttgagaattggaataagataaggatgtttatttttattatttttttttaatatagtattggaagttttagttagagtaattaaataagagaaagaaataaagggtatttaaattaataaagaggaagtcggtcgggtgtggtggtttacgtttataattttagtattttggaaggtcgaggcgggtagattacgaggttaggagatcgagattattttggttaatatggtgaaatttcgtttttattaaaaatataaaaaattagttgggtatggtggtgggtgtttgtagttttagttatttgggaggttgaggtaggagaatggtgttaattcgggaggtagagtttgtagtttgtagtgagttgagattgagttattgtattttagtttgggcgatagagcgagatttcgttttaggaaaaaaaaaaaataaataaataaattaattaattaaaaaaaaaaagagaaagttaaattttcgttgtttgttgatgatatgatcgtttatttagaagattttaaaaatttttttagaaaatttttggaattgataaaataatttagtaaagttttcgaagataaaattaatgtatacgaattagtagtttttttatatattaataacgagtaagttgagtattaaattaagaattcgattttttttataatagttgtaaaaaataaataaataaataaaaaatatatttagtaatatatttaattaaggaggtgaaagatttttataagtaaaattataaattattgttgaaagaaattatagatgatataaataaatggaaatatattttatgtttatggatgggtagaattaatatgtgaaaatgattattttgatgaattaaaagtagtttgaagttagtttattatattttntgattataaaaaagtaattttatatttatttaaataatttgagattattttgtggttagaataattataaaattatggttttttgttggattttggatggttagtatttgtatagtttttgatttatattgtagttaatgttaggtatttgtttggtgaaaattgttataggttttaagtaagaaagtagggattttgtaaagtatttattataggtagaaatgatttaattgtatagtttgtttagggaagatatttttaatgatttagaagtaattattagtttttgttatttatatatattacgatatatatatatataattgtttatatagataaatacgttttgttttaaaaaaagattattaggattaatatattttttaaataaatatttgttatagatgtgtatgtacgttaatatataatttattgatttaaagtgtaaataaggtttttaatatagaaattttagttttttaaggatatttttatgaaaaattttggtaattttttatttaaattgtaaaatgtttattaagttgtatttgttgtttttaaaattggattttttttttataagagaaaaatgtgagtattgtattttaggtttagaaggtttatttttaaatttgttggaatttttttgtaaatagttttttgtaaatagttgaatagaggatatatattaattttttgatttaatattaagatataagggagttgtaaaattatttgtgagttagtttattggatggttttattagtaataaaaatatttttaaaataaaataaaataaaataaaataaaatatttaaattttaaatttgtgtttgttgaaatgattttagtcgttttttaaatcgtgaagggagaataaaattatagttttttgttaggaaagttagttttttttttaaattcgggttttttcgtagagatgtttttttgattattatttttgaaaagtaaatgtttatttcgtaattgtttagtatatttttgaagataattagatttagtaagttgttaattttgttaggtaggaaggtattttttttttttattttttaaagaaatgaaatttaagtattgtgtttttttagtttttatagattataatttatgtttgttttgatatgtagttggtttttaaatatagtttgtggtttttaatatttgtttataatttttaagttataaatatagtttgtagtgggtttgttgttttttgttggtagttttatgttaaattgatttgtatatgttgagaatatggagttttttgggaaagggagtatttattattttgtgtattaaagttagaaatattatagttggatttaaaaatagtatttttttagataatgttaattttttaaatttagggtatgtgaggtgttaatttatataaagtagtttttttttaaattagaagaaaaagagtatgtagaatattttcggttttttttttttaatattttataaaaaaaagaataggttattgaatttcgaatttgaaattattaagaatagttttttattttttatttgaagggaagtaaatatttaaatttttttagatttttttagttaaaataagaggaaaaatagaaatttttatttttaaatgggaatttataaaaagatttgttgattttagatgtaaaattttttaaagtaaaagattattatagttattaaatatttttttgaattgatgatgaatatatttgaaaatttgtttttggaagtattaagaaagtagaataattgaatgttatagaaaagttttagatatatataagtaagtgaaatttggttaaaaaaaggataaaagatgattaaatagtaatgatatattatatattgaatttgtaagttttttttttttgagaagttttaattagttaagattgggaattaaattttttggttttttattggttttttataaatttaagtttgtttttttttattgatttttttttaagatattttgataattttttttaatgtatatattaggtttatatgtttaaagttgtgttttaaagaattttttttaagtggtagagtttattgtttatattaaattttatttgaaagtttttgatacgtattatgattgaaagaggattataattgaaaattattggttttatgttttattttgagtcgttttttatttttttaatttttttttttattgggtttttatgttaattttttgaggtgggtagtttttttatattttttttttatattttcgattagaatatttttttttttttttattatttattttttaaataaaatgttaaaaaggtttgtaggaatgtaattaggtttttagatttataatttaatgtttattttattattttatattttaaatttttttttttttttaatattaatttgtggttgtaggtgagtaggtttattttttttttgagaatgttttttttttttaaattatatattttaattattttttaagatttattttaaaatttagttattttatgaaggttttttgtttatttaagtttttttattgtaatttttaattttatatatatagtatttagtgaaatattatgtaacgttttttanaggaattttatttaatatattattttatttagttaaagttttttattttttttttgaaatagagtaattaatgtttattatatatagatttgtggttaatagttttttttatatttttatattttttattttagtagttgngttgtgtgtttattaagagttagttgtatttgtttttagtttggttatgttggttatattttttatagtanttatttatttattatataaattaaataaatatagcgtggaaaagaaagttgttttaaattaaaaaaaattttagtttagtaaaagtaattattaaaagatttgtgtattataataaatttaatataaataataaagtcgtggagaaagataaagattgtttttaaaagttaaaataaaaagttttaagttttagtaaaagtaaattattaaaaagattttgttgtaaaattaggtaagggtgggatgaaagagaaaaattattgaagtttagaaggtgtttatatttaaattgttttattattatgttttttttttaaagaaattaaaattataaattagataataaatttattatgagtgtgatttattaaagaaatatgttatagaattttaaatatgtatgagatttatttttagaaaaaaggttttgattttttattaaaagatattagaataaattaatgtttgagttaaaatgtttatatagatattttatagtatatatatatatagtttatgattttttattattaaatttaattatgtttaggtaaaagggtttttattgtaatattttgtaatttgattattattttttagtagtgtttaaatttttgaggataagagtttagattttaattttatagttatttaattatttaataaatatttttatatataattatttatatgttagatattttgtttgatatgaagttagagagatgataaagatgtggttttttttttattgtgttttttagtataatgttggtttggagtaaaggataagaaatatttttattttatttattttttataaatttgttaagttttaaagttagaatagtggttaaaagtttgttttgttgttatatttttaagtaagaaaatatttttttatgttttttgatgaggaaataattggtaagttttgatatattaaaatgttttttaaaaaatttagaggtaaaaagattaggatttttaaagggtttagaaaagaattggtttgtggtaatgagttattgatagaggaagattagtatgaagttggtttatttgttttttatttatttatttgtgtttgaatggaagtattagtatatatgtttggtttttgagaggatttgagaatacgagttagttttaaggagtttatgataattggaatatagtattaaagaatatggtttttagagtgattttttaggaaaagattaaatataggggaattttattatagagaaatatatgatttgtgatttatttttttttttttttgttttgatgataagggaatgtataatttatggggttgggaattataagagaaaagttgttttggggtgatagattttttttggaggaattaattagaatgaggaaaaatagagaattataaatatataggttataaattaagtttgagtacgtggaaaattaggagttgtgtgtagttataatggaaagagttattgtaaaagttttttaaatgtttttttggaataaattaaaaaatatttttttttgttttttgtagtatataattaagtttattttaataagttagttgattattattagtaggaattttttgtatagttgtttgtatttttttttggtttgtagattatttatgaattttttttgtttgaagatataggtagttttatttggattatgtgtttaatttgagtttttaggatgataacgataagagagttttattaggtaaaagattggtgttttttgttgtgggggtggttggaatatattagttgttaatttgagatttagttgttttggtttgggtttggggttttttttttgttttattattttatatatttttttttagaataagtatgtttgggtaagggagatagttttttttaaaaagaatcgggtaggataggttgttgggtatgagttttataggttttttttggtagagttatatggaagagaagttggtttttttattatgattttaaaaattaaatatttttttttttttttaggatagtttttaatattttaagcgagaaaagatgtttttttattttatattgaaaggatttataaaattgaggaataagtttaaaatgtattttgaaggaaggtgagattgggtaggaaatagagaataaaattgtgaaatataatatattttgtatttatataatttattttgttaggtttagtttgaaatttaagatagattttttagaattttttgaatttttttattattttttgtttttttttttttgaaaacgaagataatagtgatttataatattttttttttttggggaaattagttatatgggatgttttaagaaaaaatgggttgattatataggataaagaaaataattttgaatatttgtttgaagaagttttttattttgatttgtgtataattgttaaaaaatagtattatatatgtaatgtgttgtattaaagtaagtttatttttttatttttttgagatagggtttttttttgttgtttaggttggagtgtagtggtatgattttggtttattgtaatttttatttttttggtttaaattatttttttatattagtttgttgagtagttgggattataggtatatggtattgtgtttagttaatttttgtatttttagtagagatagggtttcgttatgttgtttaggttggttttgaatttttgggtttaagtaatttgtttattttagttttttaaagtgttgggattataggtgtgagttattgtgtttggtttagttttttattttatatataaatatgtaaatttatttaatagttttagttgaatgtggttatggagattgagatgatagtattagttaaggttttagagtaggaaaggtagttggaataatgtaggtagtaaagttataaaaatttggatgatagaaatatagtatagtgaggttgggaaattagtttagttaagtgaggatttgtattgaggttagtgttagaagtaggtttagaaagatagtatagttattttgaagtgatattaaagatagagagttattttgaagtgatattaaaggattttgtttagaagatgttatagaaaaaaagttatatattaaagtggaggttttggtatattatgagggtgtttttgattaataaaagttagttagttgtttg

SEQ ID NO: 213 - DNA, 16914 bp, Artificial Sequence
  chemically treated genomic DNA (Homo sapiens)
  unsure (10313, 10660, 10922, 11181, 11759, 11761, 11883, 11926, 11938)
  unsure (11955, 11970, 11976, 11984, 11989, 12010, 12074, 12254, 12259)
  unsure (12344, 12789, 13046, 13517, 13525, 13529, 13615, 13647, 13658)
  unsure (13667, 14087, 14328, 14334, 14356, 14360, 14457, 14532, 14548)
  unsure (15250, 15272, 15278, 16122..16123, 16166, 16195, 16219, 16235)
  unsure (16251, 16255, 16307, 16474, 16493)
aatatagtgaatattggttttttagtttttttttatatatgagatttgtatattttttttcgattggaaggaaattgtttaggaagtgatttttaatatggtaattgtaattttattttaattataattatttttttttaattgtaaagtatatataaattgtagaatatataaatatgttaaaaattaaaattatttataattttattagttagaggtaattattaatatttttatatatttagttttttatatggtatatattttttttaaaaatggttatgtgtagtaaataatttgttaatttgttttttaaatgaatatattatgaatatatatttgttaagtattatattttgtataaattttaatttttgtatatattttatattaaagtggtatttttgaaaattggattatttttaattttttatttttattagtaatgttgtaaaaattatttttatataaatatttttaaatatttacgattatttttttaaatttttaaaagtgaaattattatattaaatttttttttttttttttttttttgagacggagtttcgttttgtcgtttaggttggagtgtagtggtataattttggtttattgtaatttttatttgttaggtttacgttatttttttgttttagtttttttagtatttgggattataggtgcgtgttattacgtttggttaatttttgtatttttagtagagatagggttttattatgttggttaggttggtttcgaatttttgattttgtgatttgttcgttttggatttttaaagtgttgggattataggtgtgagttattgtatttagttgttattttttaaatttgtgtattgaagtatgagatgtaaatagaaaagtatattaaatattggtgtagatatatttgttaaattgggtatatttgtgttatagattagatatagaatttgggcgatcggttattgagtgatatatattttttgtttgaggttgttttattaagtataagggtattttttatttggttgtatttgtcgtgtattttatttttgtttttgttttggaatatgaaattttgtttataatttgtattttgtttattattttttttttttttttatttgaatgttagttttaaggagttggtgattgtgttttttttgattatttagtattttgttaagtgttagatatagagtatgtgtttacgaaattttgggtagtaaacgaacggtcgtgttagagtagtgggtattggagaattgtgtatgtgtagttagtagtaggttatagtgaggatgtttttatttatttagtttttcgtttttttggttcgacgttttagttttttttgtaggcgtttttttatattttttgaggtttgaaatttatttattagttgtttggtgtgggtttatttttttttatttacgatgggttgtagcgtttttaggtagtggtttagggattgttggagagggggtacgggtagtcgtggtagtgtattttggtgtgttttgaagcggttggaagtttttattaaggagaagggttttaggaagtttagaggttttatttgtaggtagtagaatattttgtttatttttttttcggttttggagttttggtagttttaaagttgtagttttgggtatttaagtgtttatttttgggggtagagacggttttttgggtggggttggttttggttttttagttttagagttttaggtgttttcgtttttttggggtttggagatgtaggtagggatgggggagggtggggtgtggttatggtttttagtaaggtttaggggaattaagttaggatgaacggtatttttggggtggtagaggtgagggggatcgtttatttgttgggttgtataggtttttttttttttattttggaagaggagttagttagtagagtggtgattgttttttttggaggtttttacgttttttttttttattttttttaggttgagaaatagaagggaagaagagagaattatagagagttagataatggtagtattttcgggtgaggggttttgggtttttttttgtttttgagatggggtaggggtggggtgagggtagtgttgtggcgagagagtcgggtggtttggtatggagggtgagaggcggtagagagagaaagagaaagtttaggaggttttggagtgggtagagataggagggttcgaggttgtttttgtagtgggtaggcgagtggtaggagttttgttttatattttttttttttgttgttcgtttttttttatggtaggattgaggttttgggttttgtttgtttgttttggttggatttttaagtttaattgtgttataaagtgagtgagtagaatttagttagaggtagttatttgtttgggttggaaagagaagataagagttaagatttagcgggaggtaggtggtagtggcgatggttgtggtggaatcgggggttgtggtagtggtaggggaagtttttggattttagaagttgttttattttttcgagtttttagaagtagaggaatggggagtaggtgagagggttagtgggggggtattttagtagaagggaatttggaaagttttttttttttttttttgtatgggtttagtgttagggagttaggataaaaggtaataaaaaatttatttgttagaatttgcgaagatcgttttgatgagggaaaatttggttggaggatagagattgtttggtcgttgaggttatattatagttttgggatcggttttgaaattagggttggtgtaagggagtagatattaggaaaaggttattagtggatgggatagttagaagttttgtttattttttgtttttttttaggatttttgggatttatttgagttatttttttacgaatatttatttttttttgagttgtggtttatttagttagggtttaagagcggaggatttttggtatgaaaaataaattaaaggatattgggattgggttggatttgaatgagtaggtttaggggattttgggtaagtttttttttgttttagtttttttgtaggaaggtaattagtttagtcggatggttttggaggatgatttagaggttgtttgtgggatggatgtagtttgggagatagtgataagggtgcggtggaggtttagggtgttgtaatatttaaaagagtttttaggtttgagtttggatgtatttttcgttttttggtttcgtagtgtgtgtttgagatagagtgagatattagtaatatatgtttggattagggacggaagggattgaaattaggttagtattcgggttgtttatcggggaggattgaggggtagatatagttagggtggggaagggggttagaggggaggatatagttagggtggggaagggggttggagggaaggatatagttagggtggggaagggggttggaggggagggagattatggggttgttatttgttagttttgaggtttttttagtttgatgttttcgcgtgtttttttggttatatataattttttagggatcgtttgataaattaaaggagtgtgattaattggatagggtcggaggagtggttttggtttaagcgtgcgacgggtgtgttaatcggagaataattgggagagtgagttagggtttggatgtttttggttttttttttttatcggtttgtttttgggtttaagggtgggggtgttaattgaagtcggggttttttttgttttttttgggtcgttggaattgaatgttttaggacgtgggtttaatttcgtttttgattttgcgttttaattttttgttttgttaaatttgggacgttcgtttgattttattttattagttggaggtcgggtcgaatagcggtcgtaggacgcggttttcgttttcggacgtaatcgtacggttcgtttaggtcgtttagggtttttaggttcgggattcgtcgtatttattacggttttggtagcgaaggttaatattttcgttgttcgttcgcggatacgtagttcgtttcgttttatatatcgggtaaagttcgcgtcgtcgtcgtcgcggttggggtcggtgggtttttgttagagttttcgggttaaggtcgttgagttatagtcgttagtcggtagaggtagtttcgcgtttattttttgggtcgagcgggttgcgggaaggtattcggggaggaggattcgcgaggcggggtttgggtcggtagcgggtttcgggcgggtaacggtgttcgggaggttggttgtggggcggggacggggtatcgatggggcggagtttttttgaggagggataggaggggcggggacggaggggcggggcgtcgttcggtagcgggtcgtagtaggttggttgcgagtcgggggcgggattacggcgggcggggatagaggggtagggtcgagggcgagttattgagatttgtggaggaggaaggaggaggttatcgtttagttgttttttttttgtttttatatgttttttaagttgttggaggtagtggtgtgtatttttttaatttcgtttggtgtttttgagtttaatttttagagtgataggaaaatataattatgttgatcggggaatgttttttaatattttttgggttagggttagtattatttataaagatgataggtggtatttcgggataggagattgtttcggaaaaatatggttgagtataatttaaatttgacgtttcgtataatcgtggtagtcgcggcgttcgacgttcgggcggtcgtgagcggttttagcgtttggcggtcgttggcgcgtatgcgtttcgcgcgtttcgtattgatatggtcgtcgttcggtttcgcgcgttcgtcgcgcgtcggtcgttaataggtttgttttttgagcgtttcgtatcgatatggcggtcgttttcgttgtggtgattttaattttcggttttcggttatagtcggtcggcgtttatttgtttttaggaagttcggagtttttggtggagtcggggagaggaagggtgggtgtaagagtgaaaggcgagaggggattgtaagtattcgggtcggtttttggtcggagtaagatggttgagggcgagcggtagtcgtcgttaggtaaggtcggcggggttaggtcgggtcggggtcgggtagggtgggggcggtgttaggtgtgggaggtttaggagggcgagagttatgatacggaggaattggaggggtaaaagttgaggggtttcgaggagggattgagttgaatggttttaggggagaggtgggtggtggggcgtcgttggggagggaattaggggttgtaaaggggtggtgattggggcgtaattttgggttttgtgggagtttaggttgttcgaatgttgggtgggtagcgtcgtggttataagggggttttttgtatttttgggtagcgcgtgtttaagtaagttgttgattcggtggggaagttgttagggaggggggcgaaagtgatttcggaggttgtcgtttttattagtcgttgtttaggggatggggtggtgtttcgtgggtttgcgttcgtttcgtttttagtttcggttttcgcgttttgtttattttttatttttttattttttggttttagtgtttgagaatttattgagggaaattgttcgtggtgtttaaatttttaattttaaaaggttggttgtgtaaggaggttagttttttcggtatttttttcggtaatttttatttattttgtagtttttttttagtttattttaaataattgggatggaggtgttacggaaggattttagagattttttttgtgtagaaggagaaggttgtttgtcgatttattttgaattaagaaggattggttatagataatttttatattttcgatagaggtaaataggttggtcgattaaatatagttaatgttttgaaagtatttgatatttttgttattttgtttttaatgttggggtttttgggaaggttttaggagggagaaatgttgaaaattagaaaaggtattttttttatgttttataaaagaggtgaataaagagttgggtttcgttttttaggatatttaaaattagatatttattttgtataaaatttttgggtgtgtgtttttagaataaggatgtttaggttaggcgcggtggtttatgttcgtaattttagtattttgggaggtcgaggcgggttgattatttgaggtcgggagttcgagattagtttgattaatatggagaaatttcgttttttttaaaaatataaaattagtcgggcgtggtgatatacgttcgtaattttaattattagggaggatgaggtaggagaatcgtttgaatttgggaagtagaggttgcggtgagttgagatcgcggtattgtattttagtttggataataagagtgaaatttcgttattttttaaaaaaaaaatcggggtgtttatttttttggtttttttaagttatattggaagtagaattgttttgggttatatataaaatatattaatattaacgatggttgatgagttaaaaaaaaagtcgtaaaaaaaaaaattttataatggttttgtgttttttttttttgagatagtgttttattttgttttttaggttgaagtgtagtggtatggtttcggttgattgtattttttgtttttcgggtttaagcgatttttttgttttagttttttgagtagttgggattataggtgcgttattatgtttggttaatttttgtatttttaatagggatagggttttattatattggttaggttggtttcgaatttttgatttcgtgatttttttgtttcggttttttaaagtgttgggattataggtatgagttatcgtgtttggtttatgttttaagaaagtttataaatttgtgttcggttatatttaaagttgttttgggttgtgggttgaataagttagttttagaagttttggtgatgatttcgggtatagtggtttatatttgtaattttagtattttgggaggtcgatataggcggattatttgaggttaggagttcgagattagttatggttaatatggtaaaatttcgtttgtatttaaaatataaaaattagttgggtgtggtggtatacgtttgtaatcgtagttattcgggaggttgaggtaggagaattatttgaatttaggaggcggaggttgtagtgagtcgagattgttttattgtattttagttattgtattttagtttgggcgagagagttagattttattttaaaaaagaaaaagttttggtaaggatattaggagataggagatataaggtaattattgttattagtgagatgaatgtgtttttgaagatgagtgggggtggggagtgggaggagagagaatttgtgttttgaaagagagttgtgtttagggaggttattcgtggttggaaatagttaggtttttggttgtggtttttttttgaaatttgaaatagaatttttgggaatagttggaaagaattttttttttttagtttttttttgagatagagttttattttgttttttaggttagggtgtagtggtgtaattttagtttattgtaattttcgttttttgagtttatgcgattttcgtgttttagtttttcgagttgttgaggcgtttattattgtgtcgggttaattttttgtatttttagtagagatgggatttcgtcgtgtgggttaggttggtttcgaatttttggttttaagtaatttattcgttttggttatttagagtgttgggattataggcgtgagttatcgcgttcggcgagaagtttttaatgtaatgatgaaaattttggattttggagttatatatatttggttttgtttggtaagttatagttttgtgagttttagttattttttttttttttaaaatttttttttttttttttgagaaaaagttttagttattttttaaaataattataggttattatattttttttatagaattgtagtatgtgttttataagatgtgtgtaaagtatgggatatagtaggcgattagtaaatgttgattgtttttattttttttaaagttttaaagttgtataggttgaatatgtagacgagttttaaatggttaatgataatgttatatattatagtttttgttggggggtttaggaaggaatatttttaaaattttgaatgttgattttatattgtgaggttgttgggaatttattgttttttggaatttatgtttttataatttgaggttggagagattgtgggcgtgattttatttattattattttgtttttgaaggtttgtttttttgatttgggattgtgtgttttggtaatttgtgtgtgttttattagtaatttgttatagtgttttttggtaaggtagtttttttttaaatatggattggtttgaaggttttttttttgtgaaatatttcggttaaataatgttaggagtgttatttttttttttatttttattttttgagatagagttttattttgttatttaggttggagtgtagtagtatgattttggtttagtgtaattttcgaggagagttgtttttttgtagagaatggtgattttatatatataaaagggttgtatgtttttaaagattatttttaagttgattatttggaatgtgggatatatttttttataaaagtaatgtggttgggttattagtttgatttataaagttttttatttggtattttagttgaagtgttaatttattaatagtagttttgggttttgggaatagagtttgtaggataggtgggaggaggaagagagtttttgatttttttttggggttttggtttgagttaggtagagatttgtttttttttaaatttaggttttttatttttttttttaggtttttaagttttttggtattttttttttttttagtttttttttagataggttttatttttttaaatgttatatgttttagaaattttttaggtttttgtttttttttttttatgtagttgatgttagttaggttttaggaggaaggtagggggataaatttatattaggttgtgagtgattgatgatagttttttatttttttattttagggagagtttgtattttttttttttttgagatggagttttatttttgttgtttaggttggagtatagtggcgtgattttggtttattgtaatttttgttttttgggtttaagtgatttttttgttttagttttttgagtagttgggattataggtgtgtattattacgtttagttaattttttatttttagtagagatagggttttgttatgttggttaggttggttttgaatttttgattttaggtgatttgtttatttcggttttttaaagtgttgggattataggtatgagttattacgtttggttggattttatgttttaataggtaagataaataatagataagtagaaaagtgaataaataatataattgtatattttattgtgttattagtgaaataattaagtattgtaattgggcgattatggaagttttttttgaggaggtgatatatttatgtagaaatttgatggttataggaaagttagatgtatgaaaagttaaggaagagttttttaagaagatgtattagtaagtataaaggtttaatttaagggtggaaatgttggtattttttagaaattgatagatgaatatgattagagtatagcgagtaaagggaaaagtgaaattaggtgaggtggagtgatgcgtgggatttaaattatttagagagaattttgaagggtaagatacgaaaattgtttattatggaattttaagtggaatgagataggttgaagggtagtttattttaattagggtagtaaatttaattttgaagaattattttgattgttgtaaagaggtgggggtggaagaaggttaaaagtaaggaggttaattaggatatatatataaatgatatatatatagatatatatatgatatatatattagatatatatgatatatatttgatatatatattatatatatatatattaatgtgcgaaaggatattatttatatattattaagatagttagattttattttaaaaaagaaaaagttttggtaaggatattaggagataggagatataaggtaattattgttattagtgagatgaatgtgtttttgaagatgagtgggggtggggagtgggaggagagagaatttgtgttttgaaagagagttgtgtttagggaggttattcgtggttggaaatagtanggtttttggttgtggtttttttttgaaatttgaaatagaatttttgggaatagttggaaagaattttttttttttagtttttttttgagatagagttttattttgttttttaggttagggtgtagtggtgtaattttagtttattgtaattttcgttttttgagtttatgcgattttcgtgttttagtttttcgagttgttgaggcgtttattattgtgtcgggttaattttttgtatttttagtagagatgggatttcgtcgtgtgggttaggttggtttcgaatttttggttttaagtaatttattcgttttggttatttagagtgttgggattataggcgtgantaatcgcgttcggcgagaagtttttaatgtaatgatgaaaattttggattttggagttatatatatttggttttgtttggtaagttatagttttgtgagttttagttattttttttttttttaaaatttttttttttttttttaagaaaaagttttagttattttttaaaataattataggttattatattttttttatagaattgtagtatgtgttttataagatgtgtgtaaagtatgggatatagtaggcgattagtanaatgttgattgtttttattttttttaaagttttaaagttgtataggttgaatatgtagataagttttaaatggttaatgataatgttaaatattatagtttttgttggggggtttaggaaggaatatttttaaaattttgaatgttgattttatattgtgaggttgttgggaatttattgttttttggaatttatgtttttataatttgaggttggagagattgtgggcgtgattttatttattattattttgtttttngaaggtttgtttttttgatttgggattgtgtgttttggtaatttgtgtgtgttttattagtaatttgttatagtgttttttggtaaggtagtttttttttaaatatggattggtttgaaggttttttttttgtgaaatatttcggttaaataatgttaggagtgttatttttttttttatttttattttttgagatagagttttattttgttatttaggttggagtgtagtagtatgattttggtttagtgtaattttcgaggagagttgtttttttgtagagaatggtgattttatacgtataaaagggttgtatgtttttaaagattatttttaagttgattatttggaatgtgggatatatttttttataaaagtaatgtggttgggttattagtttgatttataaagttttttatttggtattttagttgaagtgttaatttattaatagtagttttgggttttgggaatagagtttgtaggataggtgggaggaggaagagagtttttgatttttttttggggttttggtttgagttaggtagagatttgtttttttttaaatttaggttttntntatttttttttttaggtttttaagttttttggtattttttttttttttagtttttttttagataggttttatttttttaaatgttatatgttttagaaattttttaggtttttgtttttttnttttttatgtagttgatgttagttaggttttaggaggaaggtnagggggataaantttatattaggttgtgnagtgattgatgatangttttnttattttntttanttttagggagagtttgtattntttttttttttgagatggagttttatttttgttgtttaggttggagtatagtggcgtgattttnggtttattgtaatttttgttttttgggtttaagtgatttttttgttttagtttttcgagtagttgggattataggtgtttattattacgtttggttaatttttttgtatttttagtagatatggggttttattatgttggttaggtttggttttaaatttttgattttaggtgatttatntagtntttcgttttttaaagtgttgcgattataggtttgagttatcgcgtttggttaattgttttttgggtttaagtgatttttttgttnttagtttcgcgagtagttgggattataggtgtgcgttattatgttcggttaattttttttttttgagacgagtttcgttttgtcgtttggtttggagtgtagtggcgcgatttcggtttattgtaatttttgttttttgggtttaagcgattttgtttgttttagttttttgagtagttgggattataggtattcgttattacgtttgattaatttattttttatttgaggcggagtttcgttttgttgtttaggttggagtgtagtggcgcgatttcggtttattgtaagttttgttttttgggtttacgttatttttttattttagttttttaagtagttgggattataggtatgcgttatttcgtttagttaattttttttgtatttttagtagagatagggtttttttttttttttttttttttttgagacggagtttcgnttttgttgattaggttggagtgtagtggtacgattttggtttattgtaagtttcgagttttatgttttcgttatttttttgttttagttttttaagtagttgggattaaagtattcgttattatgttcggttaattttttgtatttttagtagagacggggttttatcgtgttagttaggatggtttcgattttttgattttgtgattcgttcgtttcggttttttaaagtgttgggattataggcgtgatatattngtgttcggttatattcggttaatttttgttatttttagtagagatagggtttcgttatgttgattaggttggttttgaatttttgagtttaggtgatttgtttatttttgtttattaaagtgttgggattacggatatgagttattttatttggttaatttttaaattgtttgtagagatgggggtttttttgtgttgtttgggttggttttgaatttttgggtttaagcgattttgtcgtttgggttttttaaagtgttgggattataagtgttagttattgtgtttggtttagatttttttttttttataagttatgaaaatttttattatgtgggtatataattaattatatattattttattaattgatatttgggttgtttttaatttttttttgtttttaagatagggttttgttttgttatttaggttggagtgtagtttattttagttttagttttttgggtnttaagtgnattnttttcgttttagttttcgaatagttaggattataggtgtgtattattatatttggttaatttttgtattttttgtagagatggggntttggttatgtggtttaggttggttttaaatnttttggatttnaagtaattntgtttgtttcggtttttcgaagttttgggattataggcgggaggtattgtgtttggtttagattttatttattttataagttatgaaaatttttattatgtgggtttatttttttttttttttttttaaatttgagacggagttttgttgtgttgtttaggttggagtgtagtggcgtgattttggtttattgtaatttttgttttttgggtttaagcggtttttttgttttagtttttcgagtagttgggattataggtgtgcgttattatgtttggttaattttttgtatttttagtagaggtggaatttcgttatgttggttaggttggttttgaatttttggttttaagtgatttattcgtttcggatttttaaagtgttgggattataggtgtgagttattatatttagtttttnttttttttttaagatagttttattttgttatttaggttggagtgtagtggaacggtttagtttattgtaagttttgtttttttagtttaagcgatttttttgttttagttttttaagtagttgggattataggtgtgtgtcgttatgttaggttaatttttgtattttttagtagagatggggttttaatatgttttttaggtttggtttggaatttttgattttaaatgatttatttatntttagnttttttaaagttttgggaatantagntgtgagttatttaagtcggatttgggtataattattatttatttatggttttattaacggaaattagagggggtttttttttttttttttttttcgnagatggagttttgttttgttaattagagttggagcgtaatggtacgattttagtttattgtaatttttgtttttntgggtttaggtaattntttttgttttagttttttgagtagttaggattataggtgtgcgttattatatttggttaatttttgtatttttagtagagatggggttttattttgttggttaggttggtttcgaatttttgatttcgtgatttgtttgttttggttttttaaagtgttgggattataggtgtgagttattacgtttagtttatttgggttgtttttaattaataaaaaatttttttatttgagttagagttttatttttgttgtttaggttggagtgcgatggtacgattttggtttattgtaatttttgttttttggtttaagtaattttttttttttagttttttaagtagttgggattataggtatgcgttattatatttgaataattttatatttttagtagaaatggggttttattatgttggttaggcgtatttttaatttttgattttaggtgtgatttatttattttggttttttaaagtgttgggattgtaggtatgagttatcgcgtttcgtttaaaatttttttttttttaaagtagagatggggtttcgttgtgttgtttaggttggtgttaaatttttggatttaagtgatttttttatttggggtttttaaagtgttgagattataggtgtgagttattatgtttagttttttttttttttttttgatgtattaaatatttttgtgttttcgtgagntatatttgaaagatagattttntgtaangtagatttgttgatttattgtgtatatgtagttttttattttaaaagattgtttttttaggaggttttttttatttatagagcgggagaatttttgttttttttttttggaattttgttttgtttttattgagatagagtttcgttttgttgtttaggttggagtgtagtggtatgattttagtttattgtaatttttattttttggatttaggtgatttttttgttttagttttttaagtagttgggattataggtatgtaattatatttagttaatttttaaattttttttgtaaagatggcgttttgttaagttggttagtttggttttgaatttttggttttaagtgatttgtttgttttggttttttaaattgttgggattaggtatgagttattatatttagttagatgtttttaatttgttaattttatttagaaagagaaattatatataatttacgtgttcgtgtttatttaggaggttggtaatttattttaaatgtttattgtaattaggttttttttttttttttgagacgaagtttcgttttgttgtttgggttggagtgtagtggtgtaatttcggtttattataagtttcgttttttaggtttacgttatttttttgttttagttttttaagtagttaggatcgtagcgttcgttattacgtttggttaatttttttgtatttttttagtagagatgggattttattatgttagttaggatggtttcgatttttttattttgtgatttgtttgttttggttttttaaagtgttaggattataggcgtgattatcgtatttgatttgttttttttttttttgtgaaatgnntttgtgtatgtttgaaatattaatttggttttaattttttaancggttttgttttgggggggagagggaagnggagggtatggttattgaaggganttgttagtattgtttntttttttttttttttnagangtgagggagggtaggaggttgtgggtttggtttaataagtttttattttgtntttggaagtatgtgtttggtttattttaaggtttaggtgttggagttttggtttaaaagtgagagagaggtcgggcgttttggtttatatttgtaattttaatattttggaggttaaggcgggtggattatttgaggttaggagtttgcgattagtttggttaatantggtgaaatttcgtttttnattaaaaatgtaaaaattagttaggtatggtgatatacgtttgtaattttagttatttagaatattgaggtaggagaatcgtttgaattcgggaggtagaggttgtagtgagttgagatcgcgttattgtattttagtttgggcgatagagcgagattttgttttaaagaaaaaaaaaaaaattagttgggtgtggtggtacgtgtttgtaattttagttatttaggagattgaggtaggagaatcgtttgaattttggaggtggaggttgtattgagttaagatcgtgttattggattttagtttgggtaataagagtaaaatttcgttttaaaaaaaaaaaaaaaggtgaaagggagtgtgtgtgttgtaggggaggattttatttatttgtttgtttttttatttttttttgttaaga

SEQ ID NO: 214 - DNA, 16914 bp, Artificial Sequence
  chemically treated genomic DNA (Homo sapiens)
  unsure (422, 441, 608, 660, 664, 680, 696, 720, 749, 792..793, 1637)
  unsure (1643, 1665, 2367, 2383, 2458, 2555, 2559, 2581, 2587, 2828)
  unsure (3248, 3257, 3268, 3300, 3386, 3390, 3398, 3869, 4126, 4571)
  unsure (4656, 4661, 4841, 4905, 4926, 4931, 4939, 4945, 4960, 4977)
  unsure (4989, 5032, 5154, 5156, 5734, 5993, 6255, 6602)
ttttgataaaaaaaaatgaaaaaataaataggtaaatagaatttttttttataatatatatatttttttttatttttttttttttttttgagacggagttttgtttttgttgtttaggttggagtttagtgatacgattttggtttaatgtaatttttatttttagggtttaagcgatttttttgttttagttttttgagtagttgagattataggtacgtgttattatatttagttaatttttttttttttttttgagatagagtttcgttttgtcgtttaggttggagtgtagtggcgcgattttagtttattgtaatttttgtttttcgggtttaagcgatttttttgttttagtgttttgagtagttgggattatagacgtatgttattatgtttagttaatttttgtatttttagtnagagacggggttttattantgttggttaggttgatcgtaaatttttgattttaggtgatttattcgttttggtttttaaagtgttgggattataggtatgagttaaagcgttcggttttttttttatttttaaattaggattttaatatttgagttttagaataaattagatatatatttttaggnatagagtaagggtttgttaagttaaatttatagttttttgtttttttttatntttnggggaggaaagagaangggtaatattgataantttttttaataattatgttttttnttttttttttttttttagagtagaatcgnttagaaaattaaaattaagttgatgttttagatatatataggnntattttatagaagaaaaaaaaataggttaggtgcggtggttacgtttgtaattttagtattttgggaggttaaggtaggtagattataaggtaaggagatcgagattattttggttaatatggtgaaattttatttttattaaaaaagtataaaaaaattagttaggcgtggtggcgggcgttgcggttttagttatttgggaggttgaggtagaagaatggcgtgaatttgggaggcggagtttgtggtgagtcgagattgtattattgtattttaatttaggtaatagagcgagatttcgttttaaaaaaaaaaaaaaaatttaattgtagtaaatatttggaataaattgttaattttttgaataagtacggatacgtaaattatatgtgatttttttttttggataaggttggtaaattaaaaatatttggttaggtgtggtggtttatatttaattttagtaatttgggaggttaaggtaggtagattatttgaggttaggggtttaagattaggttggttaatttggtaaaacgttatttttataaaaaaaatttaaaaattagttgggtgtggttgtatatttgtagttttagttatttgggaggttgaagtaggaggattatttgagtttaggaggtgggggttgtagtgagttgagattatattattgtattttagtttggataatagaacgagattttgttttaataaaaataaaataagattttaggaagaggaaataagaattttttcgttttgtgggtgggaaggattttttaaggggataattttttggaataaaaaattgtatatatataatgagttaataggtttatnttatanggaatttattttttagatgtgntttacggaaatataaaggtgtttaatgtattaaaaaaaaaaaaaaaaagttgggtatagtggtttatatttgtaattttagtattttgggagttttaggtgggaggattatttgagtttaggagtttgatattaatttgggtaatatagcgagattttatttttattttaaaaaaaaaaaaattttaggcggggcgcggtggtttatgtttataattttagtattttgggaggttaaagtgggtggattatatttgaggttaggagttggagatgcgtttgattaatatagtgaaattttatttttattaaaaatataaaattatttaggtgtggtggcgtatgtttataattttagttatttgggaggttgaggaaggagaattgtttgaattaggaggtagaggttgtagtgagttaagatcgtgttatcgtattttagtttaggtaataagagtgaaattttgatttaaataaaaaaattttttattaattagaaataatttaaataggttgggcgtggtggtttatatttgtaattttagtattttgggaggttaagataggtagattacgagattaggagttcgaaattagtttggttaataaggtgaaattttatttttattaaaaatataaaaattagttaagtgtggtggcgtatatttgtaattttagttatttaggaggttgaggtaggagnaattgtttgaatttanggaggtagaggttatagtgagttgagatcgtgttattgcgttttagttttggttgatagagtaagattttatttncgggggaaaaaaaaaaaaaagaattttttttaattttcgttggtaggattatgggtaaataatgattatgtttaggttcggtttgggtgatttatanttgntatttttagaattttgggaggnttgagngtaggtggattatttgaggttaggagttttagattaggtttgggaaatatattgaaattttatttttattaaaaaatataaaaattagtttgatatgacggtatatatttgtaattttagttatttgggaggttgaagtaggagaatcgtttgaattggggaggtagagtttgtagtgagttggatcgttttattgtattttagtttgggtgatagagtgagattgttttaaaaaaaaaanagaggttgggtgtggtggtttatatttgtaattttaatattttgggaattcgaggcgggtggattatttgaggttaggagtttaagattagtttggttaatatagcgaaattttatttttattaaaaatataaaaaattagttaggtatggtggcgtatatttgtaattttagttattcgggaggttgaggtagaagaatcgtttgaatttaggaggtagaggttgtagtgagttaagattacgttattgtattttagtttgggtaatatagtaagatttcgttttaaatttaaaaaagagaaaaaaaagataggtttatataataaaaatttttatagtttataaaatgaataaaatttaggttaggtatagtgtttttcgtttataattttaaaatttcgggaggtcgaggtaggtangattgtttngagtttaggangtttgaaattagtttggattatatggttaaanttttatttttataaaaaatataaaaattagttaggtgtagtggtgtatatttgtagttttagttattcgggggttgaggcgggagngatntatttgangtttaggaggttgaggttgaagtgagttgtattttagtttgggtgatagagtaagattttgttttgaaaataaaaaaaaattagaaataatttaaatattagttgataagatgatgtgtaattaattatatgtttatataatggaaatttttataatttgtagaaagaagaaaatttagattaggtatagtggttaatatttgtaattttagtattttgggaggtttaggcggtaggatcgtttgagtttaggaatttaagattagtttaggtaatatagggagatttttatttttataaataatttaaaaattagttaggtgaagtggtttatgttcgtaattttagtattttggtaggtagaggtgggtagattatttgggtttaggagtttaagattagtttggttaatatggcgaaattttgtttttattaaaaataataaaaattagtcgggtgtggtcgggtatnagtgtgttacgtttgtaattttagtattttgggaggtcgaggcgggcggattataaggttaggagatcgagattattttggttaatacggtgaaatttcgtttttattaaaaatataaaaaattagtcgggtatggtggcgggtgttttagttttagttatttgggaggttgaggtaggagaatggcgagaatatggaattcggagtttgtagtgagttaagatcgtgttattgtattttagtttggttaatagagncgagatttcgttttaaaaaaaaaaaaaaaaaaaaagaaattttgtttttattaaaaatataaaaaaaattagttgggcgaggtgacgtatgtttgtaattttagttatttgggaggttgaggtgagagaatggcgtgaatttaggaggtagagtttgtagtgagtcgagatcgcgttattgtattttagtttgggtaatagagcgagatttcgttttaaataaaaaataaattagttaggcgtggtggcgagtgtttgtaattttagttatttaggaggttgaggtaggtagaatcgtttgaatttaggaggtagaggttgtagtgagtcgaggtcgcgttattgtattttagattaggcgatagagcgagattcgttttaaaaaaaaaaaattagtcgggtatggtagcgtatatttgtagttttagttattcgcgaagttganggtagaagaattatttgaatttaggaggtagttggttaggcgcggtggtttaggtttgtaatcgtagtattttgggagacggagngttgngtggattatttgaggttaggagtttgagattaagtttggttaatatggtgaagttttatatttattaaaaatataaaaaaattagttaggcgtggtggtgggtatttgtaattttagttattcgggaggttgaggtaggagaattatttgaatttaggaggtagaggttatagtgagttnaagattacgttattgtattttagtttgggtaataagagtgaaattttattttaaaaaaaaaaanaatgtaaattttttttaaagntgganagagtaanaggatntattattaattattntataatttggtataaantttgtttttttngttttttttttaaaatttggttgatattagttatatggagaanaaagggatagggatttaagaagtttttggaatatataatatttggagaaatagagtttgtttggagaggaattgaagaaaagaaaagtgttaggggatttggagatttaaggagaaggatangnagaatttgagtttagagaaagataaatttttgtttaatttaaattaaggttttagaaagagattagaagttttttttttttttttatttgttttgtaagttttgtttttagaatttaaaattgttattagtaaattggtattttaattaagatgttaaataaaaagttttgtaggttagattagtaatttaattatattgtttttatgggaaaatgtgttttatattttaaataattaatttggaaataatttttgggaatatatagtttttttatacgtgtgagattattattttttgtaaagggatagtttttttcggaggttgtattgagttaagattatgttattgtattttagtttgggtgatagagtgagattttgttttaaaaaataaaaataaaaaaagggatggtatttttgatattatttaatcgggatattttataggaagagagtttttaggttagtttatgtttgggaaaaggttattttattaggaagtattataataaattattgatgaaatatatataagttgttagaatatataattttaaattaaagaaataagtttttnaaaggtaggatggtgataaatgaggttacgtttatagtttttttagttttaggttatagagatataggttttaagggatagtggatttttaataattttatagtataaaattaatatttagaattttagaaatgtttttttttaagttttttaataaagattataatgtttagtattattattggttatttgaaatttgtttatatgtttaatttgtataattttgaaattttgaaaaagataagggtaattagtattntattgatcgtttattatgttttatgttttgtatatattttataaaatatatattataattttatgaagaaagtatagtagtttatagttattttaagaaataattgaggtttttttttagggaaaaaaaaagaaattttaaaaaagagagaagtaattgaggtttatagagttgtgatttgttaggtagagttagatatgtatgattttaaaatttaaagtttttattattatattaagaatttttcgtcgggcgcggttgnttacgtttgtaattttagtattttgggtggttaaggcgggtgaattatttgaggttaggagttcgagattagtttggtttatacggcgaaattttatttttattaaaaatataaaaaattagttcggtatagtggtgggcgttttagtaattcgggaggttgaggtacgagaatcgtatgaatttaggaggcggaggttgtagtgagttgagattgtattattgtattttggtttgggagataaagtgaaattttgttttaaaaaaaaattaaaaagaagaagttttttttagttgtttttaaaagttttgttttaaattttaaaaaaggattataattagggattntgttgtttttagttacggataatttttttgagtatagtttttttttagggtataggttttttttttttttattttttatttttatttatttttagggatatatttattttattgataatagtggttgttttatattttttattttttgatgtttttattagaatttttttttttttgagatggagtttagttgttttggtggtgtgtgggtggtgttttttcgtatattggtatatatatatatgatatatatattagatatatattatatatatttgatatatatattatatatgtatttatatatatattatttatatatatattttagttggtttttttgtttttaatttttttttatttttatttttttatagtaattagaatgattttttaaaattaaatttattattttgattaaaatggattgttttttagtttgttttattttatttagaattttataatgaataattttcgtattttgttttttaagattttttttaaataatttggattttacgtattattttattttatttagttttatttttttttttgttcgttatgttttagttatatttatttgttagtttttagaaaatgttaatatttttatttttaaattaagtttttatatttgttgatgtatttttttgggaagtttttttttaattttttatgtatttagtttttttatggttattaagtttttgtataaatatgttatttttttagaaaagatttttatgatcgtttaattgtaatgtttggttattttattaataatatagtggaatgtgtaattatgttatttatttatttttttatttgtttattgtttgttttgtttattagaatataagatttagttaggcgtagtggtttatgtttgtaattttagtattttgggaggtcgaggtggatagattatttgaggttaggaatttaagattagtttgattaatatggtaaaattttgtttttattaaaaataaaaaattagttgggcgtagtggtgtatatttgtaattttagttatttaggaggttgaggtaggagaattatttgaatttaggaggtagaggttatagtgagttaagattacgttattgtattttagtttgggtaataagagtgaaattttattttaaaaaaaaaaaaaatgtaaattttttttaaagtggaagagtaaaggattattattaattatttataatttggtataaatttgtttttttgttttttttttaaaatttggttgatattagttatatggagaaaaagggatagggatttaagaagtttttggaatatataatatttggagaaatagagtttgtttggagaggaattgaagaaaagaaaagtgttaggggatttggagatttaaggagaaggatagagaatttgagtttagagaaagataaatttttgtttaatttaaattaaggttttagaaagagattagaagttttttttttttttttatttgttttgtaagttttgtttttagaatttaaaattgttattagtaaattggtattttaattaagatgttaaataaaaagttttgtaggttagattagtaatttaattatattgtttttatgggaaaatgtgttttatattttaaataattaatttggaaataatttttgggaatatatagtttttttatatgtgtgagattattattttttgtaaagggatagtttttttcggaggttgtattgagttaagattatgttattgtattttagtttgggtgatagagtgagattttgttttaaaaaataaaaataaaaaaagggatggtatttttgatattatttaatcgggatattttataggaagagagtttttaggttagtttatgtttgggaaaaggttattttattaggaagtattataataaattattgatgaaatatatataagttgttagaatatataattttaaattaaagaaataagtttttaaaggtaggatggtgataaatgaggttacgtttatagtttttttagttttaggttatagagatataggttttaagggatagtggatttttaataattttatagtataaaattaatatttagaattttagaaatgtttttttttaagttttttaataaagattataatatatagtattattattggttatttgaaattcgtttatatgtttaatttgtataattttgaaattttgaaaaagataagggtaattagtatttattgatcgtttattatgttttatgttttgtatatattttataaaatatatattataattttatgaagaaagtatagtagtttatagttattttaagaaataattgaggtttttttttagggaaaaaaaaagaaattttaaaaaagagagaagtaattgaggtttatagagttgtgatttgttaggtagagttagatatgtatgattttaaaatttaaagtttttattattatattaagaatttttcgtcgggcgcggtggtttacgtttgtaattttagtattttgggtggttaaggcgggtgaattatttgaggttaggagttcgagattagtttggtttatacggcgaaattttatttttattaaaaatataaaaaattagttcggtatagtggtgggcgttttagtaattcgggaggttgaggtacgagaatcgtatgaatttaggaggcggaggttgtagtgagttgagattgtattattgtattttggtttgggagataaagtgaaattttgttttaaaaaaaaattaaaaagaagaagttttttttagttgtttttaaaagttttgttttaaattttaaaaaaggattataattagggatttggttgtttttagttacggataatttttttgagtatagtttttttttagggtataggttttttttttttttattttttatttttatttatttttagggatatatttattttattgataatagtggttgttttatattttttattttttgatgtttttattagaatttttttttttttgagatggagtttagttttttcgtttaggttggggtgtagtggttggagtgtagtggagtaatttcggtttattgtaattttcgttttttgggtttaagtgatttttttgttttagtttttcgagtagttgcgattatagacgtgtgttattatatttagttaatttttgtattttgaatatagacggggttttgttatgttggttatggttggtttcgaatttttgattttaagtgattcgtttgtgtcggttttttaaagtgttgggattataggtgtgagttattgtgttcggagttattattagaatttttaaggttagtttgtttaatttatagtttaggatagttttgaatgtagtcggatataaatttgtaaatttttttaaaatataggttaggtacggtggtttatgtttgtaattttagtattttggaaggtcgaggtaggaggattacgaggttaggagttcgagattagtttggttaatatggtgaaattttgtttttattaaaaatataaaaattagttaggtatggtggcgtatttgtagttttagttatttaggaggttgaggtaggagaatcgtttgaattcgggaggtagagggtgtagttagtcgagattatgttattgtattttagtttgggggatagagtgagatattgttttaaaaaaaagaaatataaaattattatgagatttttttttttgcgattttttttttagtttattagttatcgttagtgttagtgtattttatgtgtgatttaagataattttgtttttaatgtggtttagagaagttaaaagagtggatatttcggttttttttttggggggtgacggagttttatttttgttgtttaggttggagtgtaatgtcgcgattttagtttatcgtaatttttgttttttaggtttaagcgatttttttgttttattttttttagtagttgggattacgggcgtgtgttattacgttcggttaattttgtatttttagaagagacggagtttttttatgttggttaggttggtttcgaattttcgattttaggtgattagttcgtttcggttttttaaagtgttgggattacgggtatgagttatcgcgtttggtttggatatttttgttttaagggtatatatttagaggttttgtataaaataaatgtttggttttgaatgttttaagaaacggaatttagttttttgtttattttttttgtggggtatggaggggatgttttttttgatttttaatattttttttttttgagatttttttagggattttaatattggagataggatagtaagaatattaaatgtttttaaaatattagttgtgtttggtcggttaatttatttgtttttgtcgggaatgtaaaagttatttatggttagttttttttagtttaaggtaggtcggtaaatagttttttttttttgtataaaaagggtttttaagattttttcgtagtatttttattttagttatttaagatgaattaaaaagaggttataaggtaaataagagttatcgaaggagatgtcggagagattaatttttttgtataattagttttttaaaattagggatttagatattacgggtagttttttttaataaatttttaggtattggaattagagagtaggaggatgaggggtgagtaggacgcggaggtcgaaattggaggcgaggcgggcgtaggtttacggagtattattttattttttaagtagcgattaataaagacggtagttttcggaattattttcgtttttttttttggtagtttttttatcgagttagtagtttatttaagtacgcgttgtttagagatgtaaaaggtttttttatgattacggcgttgtttatttagtattcgggtagtttggatttttataaaatttagagttgcgttttaattattatttttttgtagtttttggttttttttttagcggcgttttattatttattttttttttaaggttatttaatttagttttttttcggggttttttagtttttgtttttttagttttttcgtgttatgattttcgtttttttgagttttttatatttggtatcgtttttattttattcgatttcggttcggtttggtttcgtcggttttatttggcggcggttgtcgttcgtttttagttattttgtttcggttaggagtcgattcggatgtttgtagttttttttcgttttttatttttgtatttatttttttttttttcggttttattaaaggtttcgagttttttgaagataagtgagcgtcggtcggttataatcgaaaatcgagagttaaagttattatagcgaagacggtcgttatgtcggtgcggggcgtttagggagtaagtttattaacggtcggcgcgcggcggacgcgcggaatcgggcgacggttatgttagtgcggggcgcgcggggcgtatgcgcgttaacggtcgttaagcgttaggatcgtttacggtcgttcgaacgtcgggcgtcgcgattgttacgattgtgcggggcgttaagtttgggttgtgtttagttatgttttttcgggatagttttttgtttcggagtattatttgttatttttgtgggtggtattgattttaatttaaggaatattagaggatatttttcggttaatatggttgtgtttttttattattttaagagttaggtttaaggatattagacggagttggaaaggtgtatattattatttttaatagtttagaagatatgtggggataggggagagatagttggacggtgattttttttttttttttttataggttttaatgattcgttttcggttttgtttttttgttttcgttcgtcgtggtttcgttttcgattcgtagttagtttattgcgattcgttatcgggcgacgtttcgttttttcgttttcgttttttttgtttttttttaaggagatttcgttttatcgatgtttcgttttcgttttatagttaatttttcgggtatcgttgttcgttcggggttcgttatcggtttaggtttcgtttcgcgagttttttttttcgggtgttttttcgtagttcgttcggtttagagggtgggcgcggggttgtttttatcggttggcggttgtaatttagcgattttggttcgaaggttttagtaaggatttatcgattttagtcgcggcggcggcggcgcggattttgttcggtgtgtggggcggagcggattgcgtgttcgcggacgggtagcgaagatgttagttttcgttgttaggatcgtggtgagtgcggcggatttcgggtttgagggttttggacggtttgggcgggtcgtgcggttgcgttcgggaacggagatcgcgttttgcggtcgttgttcgattcggtttttagttgatggggtggggttaggcgggcgttttaggtttggtagagtaggagattggggcgtaaggttagaagcgggattaaatttacgttttggagtatttagttttaacgatttaggaaagataagggggatttcggttttagttagtatttttatttttagatttagagataggtcggtaggggagagagattaggagtatttagattttagtttatttttttagttatttttcgattgatatattcgtcgtacgtttaggttagagttattttttcgattttgtttagttggttatatttttttggtttattagacggtttttggggaattgtgtgtggttagagaaatacgcggaggtattaagttagaaaggttttagaattggtaggtggtagttttatggttttttttttttttagtttttttttttattttggttgtatttttttttttagtttttttttttattttggttatatttttttttttagtttttttttttattttggttatatttattttttagtttttttcggtgagtagttcggatgttagtttaattttagtttttttcgtttttgatttaagtatatgttgttggtgttttattttgttttagatatatattacggggttagagggcggagggtgtatttaggtttaggtttagaggtttttttaggtgttgtaatattttgagtttttatcgtatttttgttattgttttttaagttgtatttattttataaatagtttttagattattttttaggattattcgattggattggttatttttttgtagggaaattgaggtaaggagggatttgtttagagttttttggatttgtttatttaaatttagtttaattttagtgttttttggtttattttttatattaaaagtttttcgtttttggattttagttgaatgagttatagtttaggaaaaaatgagtgttcgtagagggatggtttagatgggttttaggagttttggagagaaataggaaataggtagggtttttggttgttttatttattgatggtttttttttggtgtttgtttttttgtattaattttaattttaggatcgattttagggttgtggtgtaattttagcggttaggtagtttttgttttttagttaagtttttttttattaaaacgattttcgtagattttgataggtggattttttattattttttgttttgattttttggtattgagtttatgtagagaagaaaggaaagaattttttaggtttttttttattggaatgtttttttattagtttttttatttgttttttatttttttatttttgggagttcgggagggtggagtagtttttagagtttaggagttttttttgttattgttataattttcgattttattatagttatcgttattgttatttgtttttcgttgaattttggtttttgttttttttttttagtttaggtaagtggttgtttttggttaggttttgtttatttattttgtagtatagttaggtttagagatttagttaaggtagatagatagggtttagaattttagttttgttatggaggaggacgggtagtagagagagaaggtatggaatagagtttttgttattcgtttgtttattgtaagagtagtttcgggtttttttgtttttgtttattttagggttttttggattttttttttttttttttgtcgttttttattttttatgttaggttattcggttttttcgttatagtattgtttttattttatttttgttttattttaaaggtaggaggaagtttaaggttttttattcgaaggtgttgttattgtttggttttttgtgatttttttttttttttttttgttttttaatttggaaagggtgggagaaaaggacgtggggatttttaagagggatagttattattttgttggttggttttttttttagggtgagaaaggaggggtttgtgtaatttaataggtgggcggttttttttatttttgttattttaaaggtgtcgtttattttgatttggtttttttgagttttgttaagaattatggttatattttatttttttttatttttatttgtatttttaggttttagagaggcggggatatttagagttttagggttgggaggttagggttagttttatttaagaggtcgtttttgtttttagggatgggtatttaagtgtttaggattatagttttggggttgttagggttttagagtcggggagggaatgaataggatgttttgttatttgtaggtgaagtttttgggttttttgaagtttttttttttgatgaaggtttttagtcgttttaaggtatattaggatgtattgttacggttgttcgtgttttttttttagtagtttttggattattatttgaaggcgttgtagtttatcgtgagtgaggaggagtgggtttatattaagtagttggtggatgagttttaggttttaggaggtgtaggggagcgtttgtagaaggggttggagcgtcgggttaggaagacggagaattgggtgagtgagggtatttttattgtgatttgttgttggttgtatatgtatagttttttagtgtttattgttttggtacggtcgttcgtttgttgtttagagtttcgtgagtatatattttgtgtttggtatttggtagggtgttgggtgattaagaaggatatagttattagttttttggagttaatatttaagtagggaggagagaaaggtaatgaataggatataggttgtggataaggttttatgttttaggatagaggtaggagtggggtgtacggtaggtataattagatagaagatgtttttgtgtttggtgggatagttttaggtaggggatatgtgttatttagtgatcgatcgtttaggttttgtatttgatttatgatataggtgtatttagtttggtaaatatgtttatattaatgtttggtgtgtttttttatttgtattttatattttaatatatagatttaaaaagtggtagttggatgtagtgatttatatttataattttagtattttgggagtttaaggcgggtagattataaggttaggagttcgggattagtttggttaatatgatgaaattttgtttttattaaaaatataaaaattagttaggcgtagtggtacgtatttgtaattttagatattggggaggttgaggtaggagaatggcgtgaatttggtaggtggaagttgtagtgagttaagattgtgttattgtattttagtttgggcgatagagcgagatttcgttttaaaaaaaaaaaaaaaaaaaaaagtttgatgtaatggttttatttttagaaatttaaggaaataatcgtggatgtttgaaaatatttatgtaaggatagtttttatagtattgttgatgaaaataaaaaattagaaataatttagtttttaagaatattattttgatatggaatatgtgtaggaattaagatttatataaaatatagtatttagtaagtatatatttataatatatttatttagaaagtaagttagtaaattatttattatatatgattatttttggaaaaaatgtatattatatgaaagattaaatatataaaaatgttaatagttatttttgattagtgagattatggatgattttaatttttgatatgtttgtatgttttataatttgtgtgtattttgtaattagaaaaaaataattatagttagggtaagattatagttgttatgttgggaattattttttggataatttttttttaatcgaaagaaaatatataaattttatgtatggagggagattggggaattagtgtttattgtatt

SEQ ID NO: 215 - DNA, 5504 bp, Artificial Sequence
  chemically treated genomic DNA (Homo sapiens)
tatacgtgtaattttagtatttttgggaggttgaggtggttagagttatttgatttcggggggtagaggttgtcgtgagttgagattgtattattgtattttagtttgggtgatagagaagattttattttaaaaataaaaaaaggaaagaaaaaagaaaaaatattattttttttttttttaaaggtggtggggatagaaggggatatttttttggtttaagaaaagttattttttttaggtttttggagttattttgggagtttgtttttttttagtgagggagattttagggttaggttgtatttatatttgtttgttgtaattgaattggtgggtatattcgttttttaggggttggtgtttgtaggtttatttttgagttttagtttttagtgttatgtgtgtattatagtagaagattagataggattgagaggatataaagatatttttttagataagtttcgtagaaaattaattttagagatagttattttttaatttagtttcggagtaggagttaaaggagtgagtaaaaaattttcgtatagtaaaggggacgatatttttttgggaggaaatggggtgttgggaattttatgggatattttgtaacgaagttttaagttttattttaggtttagtagttattttttttttttttttgagatggagtttcgttttgttttttagtttggagtgtagtggcgcgattttagtttgttgtaatttttgttttttgggtttaagtgatttttttgttttagttttttgagtagttggaattataggcgtgtattattacgtttggttaatttttttatttttagtagagatggggttttatcgtgttggttaggttggtttcgaagttttgatttcgtgatttgttcgtttcggttttttaaagtgttgggattataggtgtgagttattgcgtttagttttcggtttagtagttttatatatatatatatatatatatgtaattttttttttgagttagtattttatttttgtttaggttggagtataggggtatgattatagtttattgtaatttttgtttttcgggtttaagtaatttttttattttagttttttcgagtagttgggattataggttcgtgttattatgtttagttaatttttttattttttgtagagatggagttttattatgtggtttaggttggttttgaatttttgggtttaagtaatttatttgtttttgttttttaaagtgttgagattataggtatgagtttttgtatttggtttaggtttagtagttttaataaatatattggttttgggtattgtatttaggggttttttttattggataattggattttagttaatttaagaggttaggggaagtttggggttaggatttttttttatagagagaaaatggggagggttaggttttgtttaggcgggggggtattttttttattttagattaggtgaaaatttattaggtaaattgtgtgttttagattttaggggttttgaaggagtatttttttttttttagggatggtttattttttggggtgagaaagggattatagaggtggttcgggggttgcggtttttgattttgttttgggtggagagtttgggttttattagagggaagggtttttatggaggaagagaggttattttttaaggatgggtggagttggagggaggagattttaggtagttggtagggaattgggtgtttaggttagaggagtttttttaggtagtttaggggtagttaggagaatagggggatttggaatatatttgaaaaagtaaattttatttataaatatatggaattttatttataaatataatattgttggattgtataattgaaattggtgatttttttttgttttgaatatatatttgtcgttgtatataatataacgtgatgtatttcgtttaaattgtggtaaaagttatatatggtggtttatatttgtagttttagtattttgggaggttaaggcgagaggattatttgagttagagattagtttgggtaatatagtaaaattttgtttttataaagaatataaaaaattagttaggagtggtggtatgcgtttgaggttttagttattcgggattgaggttgaggtgggaggattgtttgagtttaggaggtagaggttgtagtgagttaggatcgcgttattgtaaaaaaaaaaaataataataaaataaagtcgggtgtaatggtttatttttgtaattttagtatttaggaggttgaggcgaatggatcgtttgagtttaggagtttgagattagtttgcgtaatatggcgaaattttgtttttattaaaaaaataaaaattagtttggtatgatggcgtgtatttgtggttttagttatttgggaggttgaggtaggaggattgtttgggtttgggaggtggaggttgtagtagtgagttgagatggtgttattgtatttaagtttgggtgatagagtgagattttgttttaaaaaataaataaaaaaaaaatgtttaattttgtattttttaagtgatattgtgtttattttgagatttagtttaaatgttattattttagaagtttttttttttagtcgggtatagtggtttacgtttgtaattttagtattttgggaggtcgaggtgggcggattacgaggttaggagatcgagattattttggttaatacggtgaaatttcgtttttattaaaaatataaaaaaattagttgggtttggtggtgggcgtttgaagttttagttattcgagaggttgaggtaggagaatggtgtgaatttaggaggcggagtttgtagtgagtcgagtttgtgttattgtattttagtttgggtaatagagcgagattttattttaaaaaaaaaaaaaagtttttttttttttttaagagttttattttttttttttattttttagtgttttattttttaaatggaatatttttgttttttgttttgtttttgagatagggtttttgttatttaggttggaatgcgatagtataattatagtttattgtagtttttaatttttgggtttatgtgatttttttattttagttttttaaagtattgagattataggtatgagttattatatttggttttagtattttttttatataaaatattagttttttgtggttagtttagttttgagattagggtattggtatttagggggtttgtggagatgggttgtagttagttgggaggtggaagtttggtttttggttttaatttttgatgatacgttgtgtgatattgggtaaggcgttttttttttttaggttttggggtttttgtttggttgtagaggttttgtgggtttgtttttttttagtttgtttagggatgtagaagagtttgggaggtgggtaaggagggagattatggatttttattggatagatagggatattaagggtcggatgggtaaggtttgtcggaggtttttgagtaagtagagtatttgttgggtttttagtgtcggagttttggattttagtttggtgaattgcggttttcggtgtaggtttttgttttttgttgttttggtaggcggatattttttgcgtatttaggttttttttgtaatcgggaggatggttgggtggtttcgttggagtattgagtggttattaagatttaaagtaagatggggtagattttgaaaaggtttttagtttttttttcgattttattatttggttttattatttttttttattgtttattatggattagttgtttatttaggtaatattttagggtggagattttatagtagtgtagcgggatggagtttagggttataaagagtgttggggtttaggattttaggacgggggtttaggattgtaggttgggaatttttggttagtatgttaaatttttggatttttatttgtgttttgtatgttagtagtaggattttgagtaagagatattgatttatttagtatattttagggtttaggggggttgaaaggtttattcgggaaggttaggttgtttgggatgaggtggtagtttaaggagaaaatttttttttttcgggttttgttattttaagattggttttttaaatcggagattatgatgttattatagatagtaagggacgggagggggattgtaggtttgaggatggattgtattttttagtaggtttgggtgtattatattttttttagtaagtattgatttatcgtagatttttaattagtttagtgttggtttttaaggggtttttgaagtgtttggtggttttggggtaagggtgaggtttttggggggatggtttagggtatagaaggtttaggttaaatttgtgggtttagcgtagtttgttgcgatttttttttgttagtgttttggtattattttatttttttggtgtaaatttttaagtttttttttttttttatgtagttttttttttagaatttaggtttttcgttttcggttagagtttattttaattttgttttttggttttaaaagtttcggtttttattttcgagtttgtttttaggggtgttttttttggtttggtagtttattttaaacggcgcggggattatattttttagcggtttcgggtttttttgacgtagtttttttttttagttcgcggggaggtgcgggtcgggtggggggaggtgatttgatgttattttgagtagttgggcggcgggtgtcggtgcgtacggagtcgagtcggggttttcgttgcgttgtatcgcgttgggtcggagttttaggattttagcggagattcgcgcgttgcgacggtcggtgtagagttcgtcgagcgtttagtttcggttcggggttgagttgggggtatgttttagtcgttttttcggagttcgggagagaatttaggagcgtcgtcgtttagttttagcgtttcgagcggaatcgttgcgaaggggttttgaacggtcgtcgttttttttacgggtagttttcgggggttggcgatcgaagtttaggttttcgagaagtgagtgttttttattttatgaggtttggggggttaggaaggaggagttgaggtgggggagggtgttaggttttaggagcggggtggtatcgggatagtatttttagttttggggttgttttaagtggtcgggattagtggagtagcgatgcgttttattttgaaaggggtagggatgacgatcggggttttattttgagtcggggttggtttgggggataggttttattttgggaggggttgttttggaggttttttgtttgagagaagggagggatatgtttaggatgggagggggttgtatttttattttagggtttgggtaaggataggagggaaaagatttgggtattttacgtagtttttcggtttttttgaggaattgatgggttttttttgttttttttttgttgatttttttgtttgatttcgtttttaaaaga

SEQ ID NO: 216 - DNA, 5504 bp, Artificial Sequence
  chemically treated genomic DNA (Homo sapiens)
ttttttgaaaacgaagttaggtagaaagattagtaagaaagagatagagaaagtttattagttttttaggagagtcgggaggttgcgtggagtgtttaggtttttttttttttatttttgtttagattttaaaataggggtgtagtttttttttattttggatatgtttttttttttttttagatagaaagtttttaaaataattttttttagaatagggtttattttttaagttagtttcgatttagaatggagtttcgatcgttatttttgttttttttagaatggaacgtatcgttgttttattaatttcggttatttgggataattttaagattggaggtgttgtttcgatgttatttcgtttttagaatttggtatttttttttattttagttttttttttttggttttttaaattttatggggtgggggatatttatttttcgaaaatttagatttcggtcgttaattttcgggggttgttcgtagggagggcgacggtcgtttagggttttttcgtagcggtttcgttcggggcgttggggttgggcggcggcgtttttgggttttttttcgggtttcgggggggcggttagagtatgtttttaatttagtttcgggtcgggattgggcgttcggcgggttttgtatcggtcgtcgtagcgcgcggattttcgttgaagttttgggatttcgatttaacgcggtgtagcgtaacgggagtttcggttcggtttcgtgcgtatcggtattcgtcgtttagttgtttaggatgatattaagttatttttttttattcggttcgtattttttcgcgggttgaaagggggggttgcgttaggaaggttcggggtcgttgggagatgtagttttcgcgtcgtttaaagtgagttgttagattaaaggggatatttttgagggtagattcgggggtgaaggtcgaagtttttgaagttagagagtagagttgggatgggttttagtcgggggcgggaagtttggattttagaagggaggttgtatagggaaagaggagggtttaggagtttgtattaggaaagtagggtgatgttaggatattgataggaaggagtcgtagtaagttacgttaggtttatagatttggtttgggttttttatgttttaggttatttttttaggaattttatttttattttagaattattagatattttagaaattttttggaaattagtattggattagttaaaagtttgcgatgagttagtgtttgttgggaggggtgtggtgtatttaagtttgttgggagatgtagtttatttttaggtttgtagtttttttttcgttttttgttgtttatggtgatattatggttttcggtttaaagggttagttttggagtggtaaagttcgagaggaggaggttttttttttgagttgttattttattttaggtagtttggttttttcggatggattttttagtttttttggattttaagatgtgttgggtgggttagtgttttttgtttaaaattttgttgttggtatgtaaggtataggtgggagtttaggagtttggtatgttaattaaaagtttttagtttgtagttttgggttttcgttttaggattttggattttaatattttttatagttttgaattttatttcgttatattgttgtgaaatttttattttgaaatgttgtttggatgagtagttggtttatggtgagtagtaggaaagggtgatgagattagataatgaggtcggggaggggattaggggtttttttagagtttgttttattttgttttgggttttggtgattatttagtgttttagcggaattatttagttattttttcggttgtagaggaagtttgggtgcgtaagaggtgttcgtttattaaagtaatagaaggtagaggtttgtatcgagggtcgtagtttattaggttggggtttaggatttcggtattggagatttagtaagtgttttgtttgtttaggaattttcggtaggttttgtttattcggtttttggtgtttttgtttgtttaatgggaatttatgatttttttttttgtttattttttaggtttttttgtatttttgaataagttgagggagggtaggtttatagagtttttgtagttaggtaaggattttaaggtttagagaggagaagcgttttgtttagtgttatatagcgtgttattaaaagttggggttaggggttaggtttttattttttagttggttatagtttatttttataagttttttgggtattagtgttttggttttaaggttagattgattatagaggattggtgttttatataaaggaagtgttaaggttaggtgtgatggtttatatttgtaattttaatattttgggaggttgaggtgggaagattatataagtttaggagttagaggttgtagtaagttgtgattgtgttgtcgtattttagtttgggtgatagagattttgttttaaaaataaaataaaaaatagagatgttttatttgagaaatggggtattgaagagtagaggagagggataagatttttggaagaaaaaaaaaatttttttttttttttgagatggagtttcgttttgttgtttaggttggagtgtagtggtataaattcggtttattgtaagtttcgttttttgggtttatattatttttttgttttagtttttcgaatagttgggattttaggcgtttattattaagtttagttagtttttttgtatttttagtagagacggggttttatcgtgttagttaggatggtttcgattttttgatttcgtgattcgtttatttcggttttttaaagtgttgggattataggcgtgagttattgtgttcggttgaaaaaaaagatttttgaagtggtggtatttgaattgggttttaaaataggtatagtgttatttggaggatgtaaggttgaatattttttttttgtttgttttttgagatagagttttattttgttatttaggtttgagtgtagtggtattattttagtttattgttgtaatttttattttttaggtttaagtaatttttttgttttagttttttaagtagttggaattatagatgtacgttattatgttaggttaatttttgtttttttggtagagatagggtttcgttatgttgcgtaggttggttttaaatttttgagtttaagcgatttattcgttttagttttttaaatgttgggattataggagtgagttattgtattcggttttattttattattattttttttttttgtagtggcgcgattttggtttattgtaatttttgttttttgggtttaagtaatttttttattttagttttagtttcgagtaattgggattttaggcgtatgttattatttttggttaattttttgtattttttgtagagatagggttttgttatgttgtttagattggtttttaatttaagtgattttttcgttttggttttttaaagtgttgggattataggtgtgagttattatgtgtggtttttattataatttaaacgaaatgtattacgttgtgttatatgtaacgatagatgtatgtttaaaataaaaaaaagttattaattttagttgtataatttaatagtattgtatttatagatgaagttttatgtatttatagatgaagtttgtttttttaggtgtgttttagatttttttgtttttttggttgtttttgagttatttggaggagtttttttggtttggatatttagttttttgttagttgtttgggattttttttttttagttttatttatttttgagggatggtttttttttttttatgaaagtttttttttttgataaaatttaagttttttatttaggatagagttaaaagtcgtagttttcgggttatttttgtgattttttttttattttagagggtgggttatttttgggggaagggagatatttttttagggtttttgaggtttgaagtatatagtttgtttgatgagtttttatttaatttaaggtgggaaggatgttttttcgtttgggtaaagtttggttttttttattttttttttatggggaggaattttgattttaaattttttttgattttttgagttgattggaatttagttgtttagtagaagaagtttttaaatgtagtgtttagggttagtgtatttgttagaattgttggatttaggttaggtgtaggggtttatgtttgtaattttagtattttgggaggtagaggtaggtggattgtttgagtttaagagtttaagattagtttgggttatatagtgaaattttatttttataaaaaatagaaaaattagttgggtatggtggtacgagtttatagttttagttattcggggaggttgaggtgggaggattgtttgagttcgggaggtagaggttgtagtgaattgtgattatgtttttgtattttagtttgagtaagaatgaggtattggtttaaaaaaaaaattatatatatatatatatatatatatagaattgttggatcgaaggttgggcgtagtggtttatatttgtaattttagtattttgggaggtcgaggcgggtagattacgaggttaaaatttcgagattaatttgattaatacggtgaaattttatttttattaaaaatagaaaaattagttaggcgtggtggtgtacgtttgtaattttagttatttaggaagttgaggtaggagaattatttgaatttaggaggtagaagttgtagtaagttgagatcgcgttattgtattttaggttgggagatagagcgagattttattttaaaaaaaaaaaaaaaataattgttggatttaaagtggggtttgggatttcgttgtagaatgttttatggggtttttaatattttatttttttttaagagaatatcgttttttttattgtgcgaggattttttgtttatttttttagtttttatttcgaggttaggttggagaatgattgtttttggagttggttttttacggagtttgtttggggaagtatttttgtgtttttttagttttgtttaattttttgttgtggtatatatatggtattgggaattggggtttaggaatggatttgtaggtattaatttttaagagacggatgtgtttattagtttagttataatagatagatgtgagtgtagtttgattttggggttttttttattggaggagagtaaatttttagagtggttttaggggtttagaaaggataattttttttggattaagagaatatttttttttatttttattatttttggaaggaggagaagtggtgttttttttttttttttttttttttttgtttttgaggtggagttttttttgttatttaggttggagtgtagtggtgtaattttagtttacggtaatttttgtttttcgggattaagtgattttggttattttagttttttaaaaatgttgggattatacgtgta

SEQ ID NO: 217 - DNA, 8648 bp, Artificial Sequence
  chemically treated genomic DNA (Homo sapiens)
tgttttttttttaattttgtttttttgttcgtgatataaggtttttttgttttgatttattagtgatagagggtttttattaagaatagcgtaagggttttttgatagttatttttggaatgtagtttaaattgttaattagggaattggaatatttaaatattttaaattttaagtaataattatatatattaattatacggaaagttacgaataagttataatttttgaagtatatttgaaaatgtaattagagtatttaaattgtgatttaagaaaatgttattgttgaggatgttttttggtggataaatgttaatttagagaaatatgatattaaaattttttgtttgtagtagttatgtgtatattttttttttgtgtatatttttttttttgaaagggcgtttcgttttgttatttaggatggagtatagtggtatgattttagtttattgtagtttttattttttaggtttaagtgattattgttttttagttttttgagtagttgggattataggtgcgaattattatgttcggttaatttttgtatttttagtagagacggggttttattatgttggttaggttggtcgtgaatttttgtttttaagtgatttgtttgtttcgttttttagaagtgttgggattataggtgtgaattatcgtatttgtagtgtatattttttttgtttttttaagaggtagttattgttttaggtttttttatttttattgttttttttttttagtttacgattagttttatgtatttcgttattttatatatattaaattagtttatttttgattatgatatttaattagtataggttttttttttttttattggttgataattgttttgacgatgtttttatttattattttagtttttttttagttttttagttagttattatttgatagttaatgttttggttttattacgtggttagtttattagtagatttatgataagtttagttttgatatttgggaagtgaatgtttttatgtgagagtaatagattatattttgttatttgataatggttttttagatggttataatgtttttttttttatttttttttgttttttgagatggagttttgttgtgttatttaggttggagtgtagtgttgggattttggtttattgtaattttcgttttttgggtttaagtaatttttttgttttagttttttgagtagttaggattatagatagttgttattaaatttagttaatttttgtattttaatagagacggggttttattatattggttaggttggtttcgaatttttgattttgtgatttatttgtttcggttttttaaaagtgttgggattataggcgtgagttattgtgttcggtttagaatgtttttatttataggttatattatgttatattatagaatttaatttttgggtttaagtgatgtttcgattttagtttgtggagtagttgggattgtaggtttgtgatattgtgtttggtttttaaattttttttttttgagataggtttttatttttttttttaggttggaatgtagtggtatgattatagtttattgtagtattgattatttgggtttaggtgatttttttattttagttttttagtagttgggataataggagcgtgttattaggtttggttgattttgaaatttttttcgtagataaggggttttacgatgttgtttagtttggttttaaatatttgggttaaagtgatttattttttttagttttttaaagtgttaggattataggtattagttgtgatatttagttaaaaaaatttttttaaatatatgtgtatttgtttataaagtatagatatacgttattattattagtttaatttaattaatatatatatttagaatgaagtttaatttttaataatagtggatgtaggttgggtgtagtggtttacgtttgtaattttagtattttggggggtcgagtggggtggattatttgaggttaggagttcgagattagtttggttaatatggtgaaatttcgtttttatttaaaatataaaaattagttaggtgtatatgtttgtaattttagttatttgggaggttgaggtagaaggattgtttgaattcgggaggtgaaggttgtagtgagtcgtttgcgttattgtattttagtttgggcgataaagcgagattttattttaaataataataataataataataataataataataataataataataataatagtggatgtaaatttatattttaagtagttttgattttttttttagttaaaatttgattgaatttattagattggtattttatttttgaaaagtggttgttaaagatttgatattgggttgggtgtggtggtttatgtttgtaattttagtattttgggagatcgaggcgggtggattataaggttaggagtttgagaatagtttggttaatatggtgaaatttcgtttttattaaaaatattaaaaaaaaaaaaaaaaaaagaaaaaaaagatttgatattgaagagttagttttaatattttttttttgttttttcgtggtttatttgtaaaggatttatagagttatttgtttgttttatgagggttagtttaattaaatttagataatataattagtaagtttatttagttgaatttagaaattgtaataagaaatcgtaataagttatatgttgttaggggttgattgggtgggtttattattgttaatttttaggaatgggtaatttttatttttttttgaggatattttttatgttgttttaggttaaggtattattttatggattgagggtagagttatttattttatataaaatagtagttgatcgtaatgttttttagattaaaattaaatgtaaatatattttttaatatttttttttattgtattcgaaatagattgttttgtattatttttggagtatcgaaatttttgggatatatgggagaaattattggtttagagaataattttttatataggtaaggatgtttttattttaaaaaatttgtttattttagttgtttagttattttatagaaagtgaaatgattttgaaatgaattgtttttatagagatttataatttgtaagtaaaatttttattttatgatatgttttaagtaatagttgtgagaattttaaacgtgtattatgtttttaatagtttaattgttgttaagggaaattgaattggttttaaaattttttttggttttaattttgaatttatttttaattaaagattgaagaaaataggtttttggttgggatattgaatttttatgaagattgtataggatattgagatatggaaaatttaaggtttttgagggtaggaattagattgttggtattttatagtttatatttagtggtgatgaattttattacggtaaaagtgggtattagttatatagtggttaattatttggagttagtagggggagattgtttttatttaagagttattttttcgttttttattttagtttaaagtaggaatatttttattttttatggtataaaattatttttttatttaagagttatttttgggagtgtgtaaagaaaattttaaaattttagtgtttaataatataaataggagaaatgtaaatgtatttttcgttgttatttgtatatatggtatatatagttttatttatatatagttttattttttaatcgtatcgaaaagatgatataatgttgagggaaaaaattaggttatagatcgatatatattattaatataaagagaaaaaatattaaaaggaagtatgtaaatattgtaagtggttatttttgagttgagaaaataagaatgttaatttttttgtttttttttttaatttttaagttttgaataattggtattttgacgtttgtagttagtattaataattttttttttttttttttttttttaaaaaatgtacgtagggtgtatttaaatatattaatttaagaatattatttggaaatgtattatttggtcgtttgtatttattaagtatgtaaatatatttttaaatattttattatttgttttagatagatttaagtagttttttttattaattttttcgggtttaatttgttaattaaaatttcgaaatttttagtttggagttgggttttttcgagttttgagtagtcggttgattggcgggttattttgaatgaatagattgtaaattgtggcgatagcgtttttatttgtattaattaaacgagcgttggttttaacgttataggggtttgatatttaaaatagacgtttaaggaaaaggagatgaggtgagagaaaattcgaagaaggtttagcggagagcgattgttgggggttttaaggggtttatttatataagtagtggtatatcggtacgggcgggggattttatttttgtttacgtattatagggtttcgtttagagtgggattttttaaattttgaggggttatattagttgtagggcgggattaagttttcggggtttttcgatttttagacgattcgagtttttggaatttttcggtttaagacgatcgtcgtttaaaggtttcgtatagtacggaaagttagttcgttgattcgttagtcgtatatttttcggaattaaagagttttttttaggtttagcggttttttattttagtttgttttattgtcgggcggaagcggcggttgtatcgttcgagatcgcggttgtattcgggttttttaagtttcggtttaattttcgattttttttttttttattttttcgttttttcgtttttttgtcgttaatttttgattaggttttagtcgaatatgttgttaggggagtgaaggcggatattggttaatgaggtttcgtttttcgtttgaagtttttagtgggcgggcgtcggaggcgggcgttgttggttagaaggttcggttgcgcgtgtgttatggatttagtcgttcggtgatattgataataggagagagaaaggggtattgattgggatttatcgcgggtagcgaaaggtggttttggtagcggcggttttagtttttgcggttttttttttttattttgttttttttttttgttgtcgttgtagatttagttttttttttttttttttttttttttttacgtcgtcgtcgtcgtcgtcgggttcggggtaacgagttgaggcgtcgttcgttaggaatgtgagcgaggagttatcggcggagtcgtaacggggtcggtgtcgatttgatgggacgggttcgcgggggaggatcgtgaggtcgtcgtcgttatcggaacgttgaggttcgggttcggtcgtgaggtttagaggtttcgtcgtcgcggaatcggagggatttcgtatcggatagtcgtcgttttaggtttttcgtagttgttcggatttttttttgtacgtttcggtttcgtcgttcgttttcgttgcggttatttcgttcgtttttcgtttttttaagttatagattatttttggatttttttttagaagttttaaggtaatttagtttttttagtatcgcggttcgttcgttttttttttttttttcggtttttttggggaatttatggggtatcggttttgggaaggtttggtcgggtaggcgaggggtgcggtggggtggggtgcgggagcgggagcgttcgttttatttgtttgatttatttataaatgtttttgatgatattttttatttattttgtttttttttttttttttttttattttttgggattggaggcgtttttttgtttttttttatttattggcgggggcggggaataaagaggggtttggtgtgaggaggattttttagtagtttatcgtttttagggtttggggtgtgggttaggagtaaagggagtatgtaagtatttttatagataaattttttttttgtttttttttatttttttttattttttttggattattttgagttatggaaatgttttatgtttgttgattagaggatgataaagtttcgggagttttggtttagggcgaaatttgtttttttgggttttgtacggattcgttgttattttacgtttagttttgtagtgttttagggttgcgatttttgacgtttattttgggtttcgggtataaggggtaaatgatttttttaaaagttatttatatatcgtttgtagagatgagagataaggaataaagaagagacgaaaagagtgatggaggaagaggatttattgaaatgttgtagtgttagagttagagtgaagtttaaataatttatatattcgaatggaaaatcggtttttaaatttataacgtataaataagatgtggagtttttggttgatgtagttattttgatattttaaagtgattttaatatttatagttatttatagtttgtgattttattttgaatttattatattatattaaggttaaattaggtagatttttaaaaatttttttttttttaaagaaaattaaagaagatttttaaattttaaacgttaatattatatgtgtgtatgtgttttaaaatgtttttgttatttttatattgttaaaatttacgtaatttaggtaattttttatttttacgtgtttaggaagaaatttttttattgttttatttagaagttaaaaattatttgttttgtttattggaatgataggtgagtaattgtattttagtattttttttatatgtattttttttattcgagtttgttattagttttgtatgaagttttagtgttatggaaatgatggtatttgtttaatttggtgaatgaaattaagtttaacgtttgttatttttaggaaatagtttttattttaataattcgagagggttaaataatttaaaagtgttatttagtttcgtaagtttgatggaatgaaaattggtatttgatgatgaattttaaggtttaaattttaagggaatttaatttggttgttttagtaggttgtgaatttatgtttttagtttaattttggtgtttgatttttttatagtttttattaagcgttaataacgtaaggtggttttatttaaaaagaagatttatttgaaatattttaattatgttttttatgtgttttgtttaaagtaatttagtttgtttttatttgtagtgtggtatagtttattatagttaatatagtatattttattaaaagttatgtttagatagttttagtagtagtaaattttattttgttgtgatatattggtatagatttttgaagtatattaagggttttttaattttagaatttatttataatattaagtattttgggaaaatgtattaatggaagttttttagttatagaatagttttaaaaattatttgaagatgtgaagagttttgtagttagaaaatgggtaggtagtatagatttttttaagtttagatgagtatttttaatgtttataatggagtggtataatatattagagtttttatattgttttcgtgatatttaaattatttttattaaatttttatgtttttttgttaatatatgattttttttttttttgtttgttttttttttttttttttgagaaggagttttttttttgttgtttaggttggagtgtaatggtatgattttggtttattataatttcgtttttcgggtttaagtgatttttttgttttagtttttcgagtagttgggattataggtatgcgttattatgtttggttaatttttgtatttttttttttttattagagatggggtttttttatgttggttaggttggtttcgaatttttaatttgaagttatttgttcgttttgggattacgggtgtgtgttattgtgtttggttttttttttttttttttttgagatggatttttgttttgttgtttaggttggagtgtagtggtgttattttggtttatcgtaattttcgttttttaggtttaagcggttttttttttttagttttttgagtagttgagattataggtgtatgttattgcgtttggttaatttttgtatttttagtagatatagggttttattatgttggttaggttagtttcgaatttttgattttaagtgatttatttatttcggttttttaaagtgttgggattataggtgtgagttatcgggtttagttttttttttttttttttttaaaggacggaattttattttgttatttaggttggatggagtgtaatggcgggattttggtttattgtaatttttattttttaggtttaagcgatttttttattttagtttttcgggtagttgagattataagtatttgttattatgttcggttaatttttgtaattttgtagagattgaattttattatgttgtttaggttggttttgaatttttgattttaagtgatttatttattttagttttttaaagtgttgggattataggcgtgagttattgtatttggttaagataagattttttttaattgattttattttttttagtatatatttttatttttatgaatattgtatatgggaattttagaatttgtataatttatatgtatgtttttattttgggaatgtatgggtttatgatatttttttttttttagt

SEQ ID NO: 218 - DNA, 8648 bp, Artificial Sequence
  chemically treated genomic DNA (Homo sapiens)
attgaagagaaagaagtattataaatttatatatttttaaggtggaagtatatatgtgagttatataaattttaaaatttttatatataatatttatgaaaatgggaatatgtgttaaagaaaataaaattagttaagaaaagttttattttggttaggtgtaatggtttacgtttgtaattttagtattttgggaggttgagatgggtggattatttgaggttaggagtttaagattaatttggataatatggtgaaatttagtttttataaaattataaaaattagtcgggtatgatggtaggtgtttgtaattttagttattcgggaggttgaggtgaaagaatcgtttgaatttgggaggtggaggttgtagtgggttaggatttcgttattgtattttatttagtttgagtgatagagtgagatttcgttttttaaaaaaaaaaaaaaaaagggttgggttcggtggtttatatttgtaattttagtattttgggaggtcgaggtgggtggattatttgaggttaggagttcgagattagtttggttaatatggtgaaattttgtgtttattaaaaatataaaaattagttaggcgtagtggtatgtatttgtaattttagttatttaagaggttgagaagggagaatcgtttgaatttgggaggcggaggttgcggtgagttaagatggtattattgtattttagtttgggtaatagagtaagagtttattttaaaaaaaaaaaaaaaaaaagttaggtatagtggtatatattcgtaattttaaggcgggtagataattttaggttgggagttcgagattagtttgattaatatggagaaattttatttttaataaaaaaaaaaaaatataaaaattagttaggtatggtggcgtatgtttgtaattttagttattcgggaggttgaggtaggagaattatttgaattcgggaggcggagttgtggtgagttaagattatgttattgtattttagtttgggtagtaagaggaaaatttttttttaaaaaaaaaaaaaagaaataaataaagaaaagaaaagttatatgttaataggaaaatatgaaaatttagtgaaaataatttaagtattacggaaataatatgagaattttaatgtattgtgttattttattataagtattaaagatatttatttaggtttaaagaaatttatgttgtttgtttattttttaattgtaaagttttttatatttttaagtaatttttggagttattttgtaattggaaaatttttattgatatatttttttaagatatttaatattatgaatgggttttggagttgaaaaatttttagtgtattttaagaatttatattaatgtattatagtaaggtgaaatttattattattgaaattatttaggtataatttttaatgggatgtgttatgttagttatgataaattatattatattgtaaatgaggataggttagattattttaaataaaatatataaaaggtataattaaaatattttaaataagttttttttttgaatgaagttattttacgttattaacgtttaataaaaattatgagaaaattaagtattaaagttgaattgaaaatataaatttatagtttattgaaataattaagttgagtttttttgaggtttagattttgaagtttattattaaatattaatttttattttattaaatttacggaattgaatagtatttttgaattgtttaattttttcgagttattaaaatgaaggttattttttgaaagtaataagcgttaagtttaattttatttattaaattaaatagatgttattatttttatggtattgaggttttatgtaagattaatggtagattcggatagaaagaatgtatatgggggaaatgttgaaatgtaattatttatttgttattttaatagataagataagtggtttttaatttttaaataaaatagtaagggaatttttttttgaatacgtgagaataaaaagttatttggattacgtggattttgataatgtaaaaataataaaaatattttaaaatatatgtatatatatgatgttgacgtttggaatttggaagttttttttggttttttttaaaaaaaaaaaagtttttaaaaatttatttaatttagttttaatataatgtgatggatttaaaatagaattataaattatgaatgattatagatgttaagattattttaaaatattaaaatgattgtattagttaaaagttttatattttatttgtacgttgtaaatttaggggtcgattttttattcgggtatgtgaattatttagattttattttaattttaatattataatattttagtaaattttttttttttattatttttttcgttttttttttattttttattttttatttttatagacgatatataggtagtttttaaaaaaattatttattttttatgttcgaggtttagaataaacgttaaggatcgtaattttgaagtattgtaaaattgaacgtaaggtaatagcgggttcgtgtaaagtttagggaaataggtttcgttttgggttagggttttcgaagttttattattttttaattagtaggtatggggtatttttatggtttaggataatttaaagggggtaaggggaagtagggaaagatagggaaggggtttgtttgtggggatgtttatatattttttttgtttttaatttatattttaagttttggagacgataagttgttagagaattttttttatattaaatttttttttatttttcgttttcgttagtggataaaggggggtaagaaaacgtttttaattttagaaggtggagaaaaaggggggagggggtagagtgaatgagaggtattattagaagtatttgtaggtaaattagataagtgggacgggcgttttcgttttcgtattttattttatcgtatttttcgtttgttcggttaggtttttttaaggtcggtgttttataggttttttaggaggatcgggaggaagaagggaagcgggcgagtcgcggtgttggagggattaagttattttgaagtttttggggaagaatttaaagatgatttgtggtttggaggggcgggagacgggcgaggtggtcgtagcgggggcgggcggcgggatcgggacgtgtagggggaggttcgggtagttgcggggagtttggggcgacggttgttcggtacggggttttttcggtttcgcggcggcggagtttttaggttttacggtcggattcgaattttagcgtttcggtggcggcggcggttttacgattttttttcgcgggttcgttttattaaatcggtatcgatttcgttgcggtttcgtcggtggtttttcgtttatatttttggcgggcggcgttttagttcgttgtttcggattcggcggcggcggcgacgacgtggggagggggggaagggagggaggaagattggatttgtagcggtagtaagagaaggggatagaataaggaggaggagtcgtaggagttggagtcgtcgttgttagagttatttttcgttattcgcggtgggttttagttaatgttttttttttttttttattgttaatattatcgggcggttgagtttatggtatacgcgtaatcgaattttttggttagtagcgttcgttttcggcgttcgtttattggagattttaaacgggaagcgaggttttattggttagtattcgtttttatttttttgatagtatgttcggttgagatttgattagggattggcggtaggagggcggagaaacgggagggtgggaagagagaaggtcgaggattgggtcgaagtttgaggaattcggatgtagtcgcgatttcgggcggtgtagtcgtcgttttcgttcggtagtggggtaagttgaagtgagaagtcgttgggtttgagaggagttttttaatttcgggaggtgtgcgattagcggattagcgggttggtttttcgtgttgtgcggagtttttgggcggcggtcgttttggatcggaggattttaagggttcgggtcgtttaagggtcggggagtttcggagatttgatttcgttttgtagttagtgtggttttttagggtttggggagttttattttggacgggattttgtgatgcgtaggtaggaataagatttttcgttcgtgtcggtgtgttattgtttgtgtaaatgggttttttgaaatttttagtagtcgtttttcgttgaatttttttcgaatttttttttattttatttttttttttttaaacgtttgttttgaatattagatttttgtagcgttgaagttagcgttcgtttaattaatgtaggtgggaacgttgtcgttatagtttgtagtttatttatttagaataattcgttagttagtcgattgtttagagttcggaaagatttagttttaaattaggagtttcgagattttaattggtaagttggattcgaaagagttaatggagaagattatttaaatttatttagaataagtgatgagatatttggagatgtgtttgtatgtttggtgaatgtagacggttaaatggtatatttttagataatatttttggattaatgtatttgaatgtattttacgtatattttttgagaggaaaaaaggaagaaagaaattattaatgttaattataaacgttagagtattagttgtttaaaatttagaaattggggggggggataaaaaaattaatatttttatttttttaatttagagataattatttatagtatttgtatatttttttttagtattttttttttttatgttaataatgtgtgtcgatttgtagtttagtttttttttttagtattatattattttttcgatacggttagggaatagagttatatataaataaaattatatgtattatatgtataagtgataacgaaaaatgtatttgtattttttttgtttgtgttgttaaatattagagttttgaaattttttttgtatatttttagaaatggtttttgagtggaaaaataattttgtgttatgaaagataaaaatatttttgttttgaattgaaatggaaaacgaaaagatgatttttagatggaagtagtttttttttattgattttagatgattggttattgtatggttagtgtttatttttgtcgtgataaagtttattattattaagtatgaattatagaatattagtagtttagtttttatttttaagaattttaaattttttatattttaatattttgtatagtttttatgaaagtttagtgttttagttaaggatttgttttttttaatttttgattgagggtaaatttagaattaaaattaaggaagattttgaagttaatttaattttttttggtaatagttgaattgttaaaagtatagtgtacgtttgaaatttttatagttgttgtttagaatatgttatagagtggggattttgtttgtaaattatggatttttataaagataatttattttaaagttattttattttttataaaatggttgagtaattgaaatgagtaggttttttaaaatggaaatatttttgtttatgtgagaaattgttttttggattagtaattttttttatgtattttagggatttcggtattttaagaatagtgtaagataatttatttcggatgtagtaaaagaaagtattaggaaatatatttatatttaattttaatttaaaaggtattacggttaattattattttatatagagtgaatggttttgtttttagtttatggaatggtgttttggtttagaatagtataggagatgtttttagggaaaagtgggagttatttatttttaggggttggtagtggtgggtttatttaattagtttttgataatatatgatttattgcggttttttattgtagtttttggatttaattaagtggatttattgattatattatttaagtttaattaaattaatttttataaaatagataaatgattttatgagttttttgtaaataaattacgggagaataagaagaaaatgttagaattgattttttagtattaaattttttttttttttttttttttttttttttggtatttttagtagagacggggttttattatgttggttaggttgtttttaaatttttgattttgtgatttattcgtttcggttttttaaagtgttgggattataggtatgagttattatatttagtttagtattaaatttttgatagttattttttaaaagtaaaatattaatttaataaatttaattaaattttgattagaaaaaaaattaaggttatttgaaatgtaaatttatatttattgttgttgttgttgttgttgttgttgttgttgttgttgttgttgttgttgtttgagatggagtttcgttttgtcgtttaggttggagtatagtggcgtaaacgatttattgtaatttttatttttcgggtttaagtaatttttttgttttagttttttaagtagttgggattataggtatgtatatttggttaatttttgtattttaagtagagacggggttttattatgttggttaggttggtttcgaatttttgattttaaatgatttattttattcgattttttaaagtgttgggattataggcgtgagttattgtatttagtttatatttattgttattaagaattgaattttattttaagtgtatatgttgattgagttaagttaatgatggtagcgtatgtttatattttatggataaatatatatatatttggaagaatttttttggttggatgttatagttaatgtttgtaattttagtattttgggaggttgaggagggtggattattttagtttaggtgtttgaaattagattgggtaatatcgtgaaattttttatttacgaaaaaaattttaaaattagttaggtttggtggtacgtttttgttgttttagttattgggaggttgaggtgggaagattatttgagtttaggtggttaatgttgtagtgagttatgattatgttattgtattttagtttgggagagaaagtgaaaatttgttttaaaaaaaagaagtttggaagttaggtataatgttataggtttgtagttttaattattttataggttgaggtcggagtattatttgagtttaggagttggattttgtagtgtgatatgatgtagtttgtgaataaaaatattttaggtcgggtatagtggtttacgtttgtaattttagtatttttgagaggtcgaggtaggtggattataaggttaggagttcgagattagtttggttaatatggtgaaatttcgtttttattaaaatataaaaattagttgggtttggtagtagttgtttataattttagttatttaggaggttgaggtaggagaattgtttgaatttaggaggcggaggttgtagtgagttaagattttaatattgtattttagtttgggtgatatagtaagattttattttaaaaaataaaaaaaaatgaaaagaaaaatattatagttatttgagaggttattattaagtgataaaatgtagtttattgtttttatatgaaagtatttattttttagatattaaagttgagtttattatgaatttattagtgagttagttacgtgataagattaagatattgattattaaatgatggttggttggggaattaaaggagaattaaaataataagtagaagtatcgttagaataattgttaattagtagaggaggaaaagatttatgttgattagatattatgattagaggtagattagtttggtgtgtgtggagtggcggggtatatgaagttggtcgtggattgagaggaaagaatagtgagggtgagaaagtttgaggtagtagttgttttttaggaaaatagaaagagtatatattgtaggtgcggtggtttatatttgtaattttaatatttttgggaggcgaggtaggtagattatttgagaataggagtttacggttagtttggttaatatggtgaaatttcgtttttattaaaaatataaaaattagtcgggtatggtggttcgtatttgtagttttagttatttaggaggttgaggggtaataattatttgaatttgggaagtggaggttatagtgagttgagattatgttattgtattttattttgggtgatagagcgagacgtttttttaaagaaaagagtatatataagaaaaaagtatatatatggttattgtagataagggattttggtgttatatttttttgagttaatatttatttattaggaaatatttttagtagtgatatttttttgggttatagtttaaatattttagttatatttttagatgtgttttaaagattgtggtttattcgtagtttttcgtgtgattaatatgtataattattgtttgagatttaaagtgtttaggtgttttagttttttagttagtagtttaagttgtattttagagatgattattagaggatttttgcgttgtttttagtgagagttttttgttattgatggattaagatagaaagattttatattacggatagggaagtagagttggaaaaaaaata

SEQ ID NO: 219 - DNA, 19576 bp, Artificial Sequence
  chemically treated genomic DNA (Homo sapiens)
  unsure (5370)
ttgagtaaattgggttttgttttagaataaggtatgtaggtatgtttgtgttttggttttttttatttttttttgtttgttttattgtgtttatttaattatattttgttttgtgttaatttttatttttatgtttttttgttttgttttattataaggatttattaaacgtgaggaagtttttggaaatcgggtatcgttgttttagttttttttttttttttgttatttatgatttttttgtgttttttttcggtttttaattttattttttttaattatagtttttgtttttagatgttttgatgtttattatggtaggggagtttaatagatttttaggtaatttttttaaatttaatattatatgttagaatttggtatttttttaggggtttttaagggttaaattagtatatttatggggaggggggtattttaaggtggagtggtgtgaagatatgaattattgttttaaagtcgtgtatttatttagataaatattaaattatttgttgggtattatgatttttagattaagggtttagattagtatttttagagtttgtttatttacgaaaatgatttgttttagttatgatagaataagtttttaattgataaaggggagttaatatttagtttttgggatatttttagaatagaaatggttatttttttttttattttttgagttagttttttttttttttattttttgagttttagttgagggatggtttaggaagataaggaatgagtgggagaattggaaagattttttatatggagtatttatattatgtgtatagatttagataattgtggggaaggtgggtaatattattttggttttttttgatttttcgagtgagatgtttttttttttttttttatgtattggatgtataagtttgaggtagtggtttttaatggataaaggggatgtattatcggtatttagtgggtagaggttagggatgtttttaatagtatagttattattgttatttgtttagttgttgttgtaaatttttagagttagttgaattattttaggttaaatatattgtttttgtaaagtattttttattaataaattatataatgtatagggtagtttttttttaattttaataaagaattattagtttaagatattaagagtgttaaagttgaataaatgtataagaaaaggtattttatattagattttagagattaaataaaggtagtttaattgaagtgaaggtaatattttaagaaaagttggagaaataaaaaaaaagtaaggtatagcgttttatatttgtaattttagtattttgggaggttaagatgggaggatgatttgagtttagtagttcgagattagtttgggtaatatagtgagatttcgtttttattttttttaaaaagaaaagttgcgtgaggttttggtatggtggttttaggagtatagttattataaagggagtatacgtttgttatatattgttatatattagggagttttttttttgtaggtgtgtgtatagtggatgagagattatagtggagggaggtagaggtatggtaatatttatgagattgttttatttgtttaggttggaggtatgagatttgattttgatgtatattaagaattttaagaaatggaattaaaagtatagtttgatttatttttttttttgtatgtatgtttttggaggagtagggaattgggttatatagttaggtatggttttttgggaaggagaatggttttttgaagatgtttagtttttgggttttttttttttttttaggaattttaaggagtgtttagtagtttttggttatgtgtgataggggtgaaattttttaaggggttaagtatataggaaggattttgaattattagagttttttttatcgttttagaatagataatttttgggtattttggttagagattaattagtatattgggattagatttttgattattttagggtgtaatttttaattaatttatattgttatattattagaaagaagtaagggtttttaggttttttatatttagttttggagtgattttttttatttatttttttatttttttattgtttattttgtgtatttattatttagtagtttttatgtatttttgaggttagtttggaatttagattttgttttagggtttcgaatttttggttttcgaagagtagatatgtttttagatgatgattggaggtaaagtagttatgttttttattttggatataggagaatagtgggagaggggtttttgtttgttttattagatgtttttagaagagagtagattagggttagagttttgtagtatagttaatggtaaaggttatttttttttttttttggagttatatttttttttgtaaaattgtattgtgggtcgggcgcggtggtttatatttgtaattttagtattttgggaggttgaggcgggtggattacgaggttaggagattgagattattttggttaatatggtgaaatttcgtttttattaaaatataaaaaattagttaggcgtgacggtgcgtgtttgtagttttaattattcggaaggttgaggtaggagaattgtttgaattcgggaggtagaggttgtagtgagtcgagatcgtattattgtattttagtttggtaatagagtgagattttattttaaaaaataaaataaaataataataaaataaattattgtggtagcgttggtattttgtattattgttatggttgtgttatttttattttaatatagaattggtgggtttttttaagggtgttaggaatttttaaaaagatgtgattttttgggaggggatatttgaaattttaatttttattttttttagtaaaaggaagtagttgttgtttaagggttttatttgagttattttaaagatgaatttatggtattattttggatattagttattttttaggattttaaggttatattttatttttggatgttttatgtttttatttttatttgagtttttattttttgttttttattatatttttaatttttattttttgttttatttatttatttttattatttgattttttgttttttttgttttttatttttggggggatatgtagttttgtggttatggttttgatgatattattagggtagtttttttgtttaggtattatggtttgttagtattttttgtgttttttaaattttaggtttagaatgcggagttgttaatataatatttatttttttgaatagatggagttaggtatattaatatagttttttgtttttaataatatagttattattgttatttgtttagtcgttaatgtaaatttttagagttagttgaattattttaggttaaatatattgtttttgtaaagtattttttattaataaatttataagatagttttatttaattttttgttatttttttttttgtatgtttttgttttttttgtattggggttggaagtttggataaatatatgaagtggtttttgattgagtggaagtgaggagttagagacgagttgaaggatatataattaaggtgggaattaatgggttttaaaatagggtgttttttttttttagtattgttgttaggatgttttttattttttttttgatagagtatttagtatttagtatattatatatttttttttttttttttttaggaagattttttggggatttaagttttttttatagatttatttttgattaatgtattttaggtgttttttttttattttataagtttgtgacgtgttttttgttttttttttttttttttttcgtgggggtttttttttttttttttttttgtggtgttatggtttttttatgttagaaagatttatttttatttgtgttttattttcgagatttttttttttaaaaaatagtttgtgggttttttttttggaaaaaatttattgttgggtttttttttttttttttttttggggttttaggatagaaattgatataaagaagaggtagaaaggtattttttggattttcggattattatttatttattattatgtattatgaatagattttgagtatatgtattattgagtaggaggatgggtaggaattggttgttttattttatttggattttgtattattaagatatatagagtttagtggatatgttggtttttgtttatgatttaatatattttttggtgtcgtggatatatttatttaataatttttgatgaatagttagtttttgtttttttatttttttttttatgagtgttagttatcgtggtttttataaaggttttataagttatttgggtttagattttgtgtatgtgtagaaataaggaattaatttttaattttttatttatttttttgttttttaggaggaggttgtattttttttaggtgaattttttagattttttgtatattttttggtgttattttttttattttttttatttgttttgataaattatggcgtttaaattgttttagttgtagttttattttgtgtttttagatttttgataattttagattttaaatataaaggttagaatttttttttaaattttattttggatggttttttttttattttagaatttataatgttttttttattttttggttttttattaattttttagtatttagatttggtagttaaatcgttatatatttttttattagtaggagattttgaggtttaattacgtttttttagtttattgggaatgttatgagagcgggtgtgttttttcgtagtcgttcgatcgtagtatttttttattttttattttgtatgtaaagaattttaatttgattttttggtttcgttttgttttttttttagttttagtaattttgtttaagtttttagagtttatttcgtttttattttcgtacgcgtagtgtatgtcggttttagtttttttgtagggaaagagggttcgttatgtttttcggcggcgtcgtcgtttggttttggtagtcgtcgttttcgtttttaatttcgttcggtttagagtttagtcgagtttcgggtttagtatggtcgtttcggagtcggttcgggttgtatcgtttttattttcgttttcgtcgttttttttcggggttgatcgcgtcgttaaaggtgagaggtggacgaaattttgggggtttggtttgaagagttagttgtgtgtgagggcgggcgggagatcgttttttcgggagtgggttcggaagggcgggcgagtgattggttgttttttttggggagtggtttttgggcgggtttttgttgggtagggttgatttgtgttttcggnttcgcggttttttttggggggttaggttttttcggaggttttgttttcgtggttttttattttaaagggtgaggtttttcgttgtattgagttcgttttttttttattcggtttgttaaagcggcgtaggggtcgcgattagttttttgtttcgcgatagttgtatttttggtttgtcggggcgaatcgaggggttcggagatttttagttacgcgaggttcgttagtgagtagttagaaattatttcggttttggtttacgtttgtttttcggtgatagtcgttcgttttattcgcgtttagttggcgataatcgtaggggtttatttttggtcgttaggtgttattcggagtagaaattaggggaattttgtgggattggattacggtgaagggtcggggtaggaattggaaggttagtttttatagtgtagaaagggagaaaaagtagtataaacgaaaaaaaaaatttttgtggatagtaagtatttatttagaaaattattaatattttggttaaaaggagttattttttttttataaatatatatttatatatttattttagacgaaaaagttaaatgttttttagttagggtagaatttatggatgtttatttataataggttagtagattaatttaaaatagagaaattgagggttaattgagagttgtttaagattttaagttttttgggagagtttattaattttaaatattgttgtggaggtgaaaaataattgaaatgattttttttattatgtagtttgattgataaattgaaatcgtagaatgaatttttttttatttgtattgtatttatttttaaaatataggtatttttgtttttatttagttttttaaatatattggtatagtatttaaatatcgttagtttattttttgaaatttgatttatatgtttttattaaaatatttaaaaataaggaaatttttttttttttttttttttaattaaaaatttttaatttgagtttttttcggtttttaaaagaataatattaatttggtttggcgtggtggtttatatttgtaattttagtattttcggatgttgaggtaggcggatcgtttgaatttaggagttggagattagtttgggtaatatggcgaaattttttttttattaaaaatataaaaaataaaaattagtcgggtatggtggcgcgtttttgtagttttagcggatcgggaggttgaggtacgagaattattggagttcgagaggtagaagttgtagtgagtcgagatttgcgttagtgtgttttaatttggacgatagagttagattttgtttttaaaaataaaaataaaaataaaaataaaatattgatttgtatttaggtttaagttagtagtatatttagttgggttaggtattggaatgagttgaataacgagtttatggaatttttaatatagagaaattttaaaaaaaaaatagtaatgtagatatttattttattaagaaattttggagttttgtgggggtgggaacgggatattggttatttttttattttttgattgtatttttgtgttgtgtgtttatttttttgggtattttttattagattgttagatggggtaattaattatatttttgaataatgagtttatgttatttttacgtttgtgaatttttttattttttgttatatatatggtaatgttttttttgtattgttttaatgtagtgaaaataagattttaaatataaggtagattttttaggggtgagttgtgagtttaaggtagttatatttgtaggttattggtgtggaataaaagttatttgatttagataaataggaaaggagtttgttaatatagaaaattatagttaaataaagtttatggttattatatttttggtgttttattgtgttttttttatagagataatttttatttttttatggaatttgttaattagttggaatttttgtatggattatatgttttaaaatggtgtgtaatagattaatttgtattgtttatggagttttttgtatttattgggaaatttattttttttatagatttagaaatttatttttaaattttatttttaggatttttttttgttttttatttagtaattatattataatgtgatatttgatattagagaatattggttgtttgatgataaatgatgtgagtttagtttaagtttaatttgttaaaatttaaattttttttaagtttataatgtggtggtagttttgtatcgatatatttttatagtagtgatattatggagattgtttgttggtattgaatgtaagtagttttttttttttttggaattttttttttttttttgagacggagttttatttttgttgtttaagtggagtgtagtggcgcgatttttatttattgtaatttttgttttttgggtttaagcgatttttttgttttagtttttcgagtagttgggattataggtgcgcgttattatgttcggttaattttttgtattttttagtagagacggggttttattatgttggttaggttggttttaaatttttgattttatgatttttttatcgtggttttttaaagtgttgggattataggcgtgagttatcgcgttcggtttgtttttttggaattttttagtgttaaaattttatattttatgtttgtagttataaggtttatattttatggttatgtaggtttttaagggtgtataggtttttttgtgtttaagattagatatttgaaatttattttttgtgaagtttgggagtttggaatattgtaggtgatttatgagtaaatgtgatgagtttgttattaaaattattagtggtaattttatgttattgattatgggttattaggtttttggttgattaaatttagttttgagtttattttagttgttggtttaagttaaattttttttttgtttgaaagttgatttaatttatttgattaagtaagatggtatatatttttttaattatattttattaagtattttttagttatgtaggaaataagaaagtggaaaaaaattaggaaaaatatttaatcgtatttgtatgtgtgtttttttattatattagtaaagttggtataggtaattgaagtataaaattttgaatttatatatattgtttttttttttttttataaagtttatttgatttgaattgtttagatatttttttttttttttagatatttaaaaaatgtacgttttgttttgtatattaggttttagatttgtaaagttggattgttttttgagattattaagattgttagtattaataaaaaatttatttttttatttagagagtattgttagtattgggtatatgtttattttagtatttataatgtgagttatttttttaatattattttattttatgggttatagtaattttaaattattagatttttagattgaattaaaatgttgaatttatgtgttttaattttttttaagttaaagtatttttgattgataacgttagaatttatttggattttgttgttagttgttttgtttataaatttgaagttatttggttaaagtgttttttagtagtttttttttaggaggattattttttgtttatttatttatttatttatttatttatttttgagatggagtttcgttttttttgtttagattggagtgtaatggcgtaatttcggtttattgtaatttttatttttcgggtttaaacgatttttttgttttaattttttaagtagttgggattataggtatgtgttattacgttcggttaattttgtatttttagtagagacgatatttttttatgttggttaggttggtttcgattttttgattttaggtgatttatttattttggttttttaaaatgttgggattataggtatgagttatcgtgtttagttagattatttatttttagataatttatatagttttggtgtgatatagttattttagtgttttttgttagttttattttattatattttaaagtagtttgaattttaatttttgtttataaagtttattttgtggatttatttgtgtaaaaagaattagaaattattttttttttattttttatttttattattgttaattatattaaaataaatttttaggttaggcgtagtagtggtttatgtttgtaattttagtattttgggaggtcgaggcggggggattatttgaggttaggagtttgagattagtttggttaatatggtgaaattttatttttattaaaaatataaaaatttggttgggtatagtggtttacgtttgtaattttagtattttgggaggttgaggtaggtggattacgagattaggagttcgagattagtttgattaatatggtgaaatttcgtttttattaaaaatataaaaattagtttggtgtggtggtatacgtttgtaattttagttattcgggaggttgaggtaggagaatcgtttgaatttgcgaggcggagattgtagtgagtcgagtttatgttattgtattttagtttgggcgatagagtaagattgttaaaaaaaaaaaaaaaaaaaaaaaaaaaattttttaaaaataaataaataaaaattagtagggtgtggtggtacgtatttgtaattttaattatttgggaggttgaggtaggagaattatttgaatttgagaagtggaggttgtagtgagtcgagattgtgttattgtattttgtttgggtgatagagcgatatttcgttttaaataaataaaaataaataaataaaataaatttttagtattatgtgttttagtgaaagtaaaggaatagaaagagagagagaaaaagagtgtgaggggatggggtgagagggagagggagagggaatattaggtaataaggggatcgagttcgaattcgaaatatagtttatagtttttttattttttttttgattttttaattttgttatattaaataagttttttttaatttagttaatatttgtttaggttttttttatttgttatattttttttgttttttttaggaagttttttatgatattttaagtttgatttaaatattttttttattatgtttttataggattaaatttttaatatattataattggttgtttatttattcgttttttattgtagattgtaagttttataaaagtagggattatatttaatttattattgtagttttagtatttagtataatatttagaatatatttaataagtatttatttatttgtttatttttgtgttaggaattttgtatagaattaataagtatttatttaaaagaatgaattaatgaatgatatagaagttagaagaaaggaagttaatttttttaggaaaagaataatttgttattaaatgaattgaaagtatatgagaataaatgttaggtaggagagtttattttttttaaaaaagaatggtagtttgattagaattgtttaggaatttatgaacgataaattgaatgaaatttattataaattcggttgggtttttttgtttgttttgttttgtttttgagatagagttttgttttgttatttaggttggagtgtagtggtttaattttagtttattgtaatttttgttattcggatttaagcgatttttttgttttagtttttcgagtagttaggattataagtattttttattatgtttggttaatttttatatttttgttatgttggttaggttggtttcgaatttttgattttaggtgatttattatttttggttttttaaagtgttgggattataggtatgagttattacgtttggtttcggttgatttttaaaaattggaaaaatgagtattttttaggagggaaattgaatttgaagggttggtagaagatagatttggtttttattatatatgtttttatatttttttatttttgtattatgtatttaaaatttgtttttatattttttttgaattgatttagtggataatttttaatgtattggtattttgtattttgatttttattgtgatgaatatttaatttgggtaaggaagtgaaattttttaaaggtatgattatttataaatttagttattgatattatttaagtttgttgatttttaatggtttgggtttttttgttttttttatttatatattattgtattagtattatatgaaaatttttaagaaggttttttttttttttttgttgatatatatgtattattttagattgaaaatatattgaattttatttaattatatattgggggtgagaggaaaaagtaaattaatattttattttatttttttttttttttttttgattagtgtagtgggttttgatttaattagtagtttttgttttttagattttttttaaggttttatgattttttttattttaggaaattttataatacgtacggttttttagaattgttatatggaatggatatttttttgggttttagttgaatgtttgtaaataaaataatgattgcgtgtttttatttttgttgagtatatagggtttttttttatattataatttttattttttttttgtttttttatttgtattgtatttttgtttagtaaggaggagggtgttttgaatagatggattttgattttatttataaaattgtgggaagaaatcggagttttttttttttttgagataacggtgttattgagattgcgtgagatgcgacgtaaattttttgtattgtattgtttattttttttatattttttgttgaggtttcggtaaggtgtagtttttaaatatatagatatatataggtagatatataatattagatttatggtttttttatagatagtatttttagggtatgggaaagagtaggggaagatttagtagtaatagatatttgaattagatgtattggtaagatagtggttatgtaataattttttttaatttaaaagaagtttaattatagattttatttttttttgatagttttatattattatgtttttgttttattattatttttgttatatttttttataattttttttttaatatattattttaggtttagtattttagtatttgaggttgttatttgagaagtacgtattgttttggttttatggagattatgttttatttttgttgttgaagtttttgagagattaggattatgggttgagtgtaattttttttttatgttatttgtagagtttgaagaggaaaatataaatataagttgaggttatttttttttttagggtttaatttttaagtttagtagtataaatttaggagttgttgttttatttaataataaatatgtatttttgaatttaacggaggaatatgtttttggaatttagaagtaagaggggttgggcgcggtggtttatatttgtaattttagtattttgggaggttaatacgggtagattacgaggttaggagatcgagattattttggttaatatggtaaaattttgtttttattaaaaatataaaaaattagtcgggcgtggtggtaggtatttgtaattttagttattcgggaggttgaggtaggagaatggcgtgaattcgggaggcgtagtttgtagtgagcggagattacgttattgtattttagttcgggtgatagagcgagatttcgttttaaaaaaaaaaagaaataagaattttagaatatagatagtttattgagtgtttttattttgttttattttatttttgtaaatataattagtttttgttagatttaggtttaagatttatagatagaggaaagtatttaatatagtgagttttgttttttaatatagtgattttttaaagtatttgtggtgataaaggaaattatttttagtttagtttagaatagaaatgattataataattatttattaaatttttttattttatataataggaaaatgagttttagggtttgagagttttgtagtttaattaggattaaaattaaatttttttgatttttagtatagtttttttattattttatttggtgattttttttattttgagagtaggagttttttaggaatgttttatatatgtaatgtttttttttttttagttttttttaaattatttaaatttttaaataattattaaatgtttatttttttttaaaatttttttagattgtttagttgttttaaattggattggtgatttttaaggggttatttttaatttaattaattaagttttttattttaaaattgtatatgtttttgatttatatttgatatatatgtttatggttaatttatgttttgatttgatgatttgattttaatatatatatatatatttggttgaagttgattttatttatgtaagtattgtaagattagttatttttagtatttttgggtatttaaatgtagtgtttttaatattattttagatttatttgggaatttttaaaaatatagttttttggatgttattatagagttgaattagaaggtttgtggttggtgtttgggaatttttatttttgaaaggtttttaaaaagtttaagaaaatatttttgaatattattgggggaaatgggaaatgttatagtttttttaaaaaataatttggtaatttttaataaaataaaaaatatatttattttgttgtttaacgattttaattttgagaagaagaagaaaaaaatattagtttataataatatatatatgagaatattttttattgatataatttatagtagttaagaattagaaataaagtaatgtttatttatagaagaataaatatattatggtttaatattagatattgtttagttatttaaaaagattgaattgagttaaattagatgatttgaagaaattttaatgaaatattgttgtattaaaaggaaaaaaatttgtaaaatgatagataagtatttgtttatgtatatgtaggtttatataggattgtataaatagaaaatatagtgtatgtatattagataattatttggggaagtagggattggttgtgagagaagagataggaaaattgtttataataaaaatagtatgtgtgttatgtttttatttttataaaattatttttgtatttatgtgttttttggggttttttgagttattttttagatgattataggtagttaggtttaaggattatagttaaggttgggtgcggtggtttacgtttgtagttttagtattttgggaggttaaggtcggtggattacgaggttaggagttcgagattagtttgtttaatatggtgaaaattttatttttattaaaaatataaaaattagttaggcgtggtggcggtcgtttgtaattttagttatttaggaggttgaggtaggagaatcgtttgaattcgggaggtagaggttgtagtgagttaatattacgttattgaattttaatttgggtaatagagatttcgtcgtaaaaaaaaaaaaaaaaaaaaaaaaaattatagttatggttggtcgtggtagtttatgtttgtaattttagtattttgggagattgaggtagtaggattatttgagtttaggaatttaagattagtttaggtaatatagtgagattttatttttaaaaaaagagaaaaaaagtattaaaaaaattagttaggtatggtggtgtatatttgtattcggaaggttgaggtaggagggttacgtgaatttggaaggtggaagttgtagtgagtcgtgattgtgttatcgtattttagtttgggtgatagagtaagattttgttttaaaaaaaagaaaaaagatttatagagtaatgtttagaattgggtgtttttttaattaagttaaatgtgatttttggataagaaggtagttattggaattttttgaagggagtagaatttgatttttttaaaagaaggtagggtgcgatggtttatgtttgtaattttaatattttgggaggcgaggcgggtggataatttgaggttaggagtttaagattattttggttaatatggcgaaattttgtttttattaaaaatatagaaattagttgggtgcggtggtgtgcgtttgtagttttagttattcgggaggttgaggtaggagaattatttaaatatgggaggtagaggttgtaatgagttgatattgtattattgtattttagattgggcgatagagtgagaatttagaaaaaaaaaaaaaaaaagaatttaagtagaggtagaggtggttatttgtaagggaatttttagatttaatagaagaaagggttaagatgatgtttatttttttattaatagaaagattattagatattatgtattcgttgatatgatgtaagaaatataaagaattttttattaaatatttttatttttaaaatttgtatttgattttaattgagtttttagttttaagtattaagttataggaaaaatgtgggttagaagaatatgtttttttttttttttgagatagagtttttttttgttgtttaggttggagtgtagtggtgtgattttagtttattataatttttattttttaggtttaagggatttttttgttttagttttcgagtagttgggattataggcgtacgttattatgttcggttaatttttgtatttttagtagagacggggttttattatgttggttaggttggattcgaatttttaatttcgtgattcgtttgtttcggttttttaaagtgttgggattataggcgtgagttattacgtttagttaattttttgtagttttagtagagatggggttttattatgttggttagattggtttttttttttttttttttttttttttgagacggagttttgtttttgttgtttaggttggcgtgcgatggtgtaattttagtttatcgtaacgtttgttttttaggtttaagtgatttttttgttttagttttttaagtagttgggattataggtatgtattattacgtttggttaattttgtatttttagtagagattgggtttttttatgttggttaggttggttttgaatttttgattttaggtgatttatttattttagttttttaaagtgttgggattataggcgtgagttatcgtatttggttaaattatatttttttatatgtgaattttaattggtatttttttttatttattttttaattaattttatttgattatttttttattttatgttatattattttttttttttttgagatagggttttgttttgttgtttaggttggagcgtagtagtatgattatagttcgtcgtagttttaattttttagttttagttgatttttttgttttagttttttaagtagttggattattgattcgtattattatatttagttaatttttttagtttttgtagagatggggattttattgtgttgtttagttggttttgaatttttgggtttaagtgatttttatattttggttttttaaagtgttggtattataggtgtgagttattgtatttagtttgttatgttattttttaaggatttagtttttaaattaaggattttaataaaaataaagattagtttgattttattttttttttttaagagatagggttttattgtgttgtttaggttggaggagagtggttgtttataggtatgtgtttatagtatattatagtttgaagtttttggttttaagtgatttttttgttttagttttttaagtagttggggttataggtatgagttattatgtttcgtttgatttgataaatatattgagaatagattgattattagatagatttttaaaaatttgtttttttatattattagataaaaaaattaatggttagtaagtatttttttatattgtttttagaagtatagttttttttaaagttaattggttagtatgtattaatattttttttaagtttataatatttaaattagttaggtatggtagtgtatgtttgtagttttaattatttaaggggttgaggtgggaggattttttgagttaagaaggttaaggttatagtgagttgtgattatgttattgtattttagttaagataataatatgagattttgttttaaaaatgaaaaaaaaaaagtttataatatttaattagttattagttttttaaaaggttattttaaggagtttatgagaaacgtgattatttaagtgtaaagatatttaatatagtattatgttattaaaaattataagtaagttaggagcggtggtttattttatagttattttttattttatagttttagtattttgggaggttgacgtaggcggattatttgaggttaggagttcgagattagtttggttaatatggtgaaattttttttttattaaaaatataaaaaattagttaggtttggtggtatacgtttatggttttagttattcgggaggttgaggtagaagaattgtttgaattcgggaggcggaggttgtagtgagttaaggttgtgtaattgtattttagtttggatgatagagcgagattgttttaaaaaaaaaaaaaaaattgtaagtaatttaaatatttaataatagtaggatggttgaagaaataaattatagtatatttatatgaaatattttataattattaaaggtagtttttatagtaaatgtttatagatataatatgagaaagttatgatattaaattgtatatatatagtgtaaaggatattgttttttgtaaaaataaaattatatagtatatgtgtataaaaatgaaaattaaaggtaagtttatgaaaatattaagagtgagattattagtgatttttgatattttatgtatttttaaattatttgtaatgaaaaatgttgttattttgggtaatataaatttttttttgtttttggttttgagatagagttttggtttgtcgtttaggttagaatgtagtggtataattttagtttattgtaaaaattcgtttttgggttaaagtaatttttttgttaatagttttttaaatagttggggatttaggtgttcgttattatgtcggttcgatgttcgaatttgtatgattatgtaatttttttttgggtatgatggtttatgtttgtaattttagttattttggaggttgaggtaggagaattttttgaattcgggaggcgaaggttgtagtgagtcgagtttacgttattgtattttagtttgggcgatagaataagattttattttaaaaaaaaaaaaaaaaaaaagattatagggataatttgtagtggtaatattttatatatatgtaaaaagtgttgtattttaaatagtttaggtggaaatgagtatgatttgtttttagaatgtgtgttaggtgatttagaaagtgattttaatgataaggaatgtattggtttcgaatatatgtataaagattttgaatgaaggtgttttgtgaaacgttaagtaaggtaggagaaaaattagtattttgaaattatgatttattattttaagttttttaaattaatttgtattttagaagtaaatatttggtgtttggtttatatttttaaaagtgtatagttaagttggttagaaaatattgtttttatgtttttattagaaaggaatatggtaaattattttgtatttgggttttttttttagttaggtttatttggtattaaagtgttgtggggttttttttgagatggtgtttcgttgtgttgtttaggttggtttttaatttttggttttaagtgatttttttgttttagtttacgaagtagtcgtgattatagatatgttttattatttttagtattaaattatatttattgtattttatttaaggtaaagaatatttaatattataatataatattttgagagttttgtttaaaaatgttttggtttaaataaaaaagttttggttattttgaaagaatttaattttgtgagataatttatttttttaataatttttaataaagaatatgttagtataaatagttttaaaagtggtataatttgtttattatttagaaaaatatttttatttaataaatgaagaagaaagaaaaatttttgttttatagtttttagttttatttagatttaattattagtttttaagttaatgtatttttggtgatttattttttattaattaaaaatatttgtagt

SEQ ID NO: 220 - DNA, 19576 bp, Artificial Sequence
  chemically treated genomic DNA (Homo sapiens)
  unsure (14207)
gttgtaaatgtttttaattaataaaagataagttattaaaaatatattaatttaaaaattaataattggatttagataagattaaaaattgtaaagtagggattttttttttttttttatttattgggtagaagtgtttttttaaatagtaagtaaattatattatttttaaagttatttatattaatatgttttttgttgagaattattagagaaatgagttgttttataaaattaagtttttttaggataattaaaatttttttgtttaagttaaaatatttttaggtagaatttttaaaatattgtattatagtattagatattttttattttaaatgaagtataataaatataatttaatgttgggagtagtgaagtatgtttgtaattacgattatttcgtaggttggggtaggaggattatttgaggttagaaattggagattagtttgggtaatatagcgagatattattttaaaaaaaattttataatattttaatattaaataagtttaattagaaagaaaatttaaatataaggtgatttattatgtttttttttaataagaatataaaaataatgttttttgattaatttgattatatatttttagagatatagattaaatattagatgtttatttttgaaatgtaaattaatttaggaggtttaaaataataaattataattttaaaatattgattttttttttattttatttaacgttttataaaatatttttatttaaaatttttatgtatatattcgaaattagtgtattttttattattgaagttattttttgagttatttaatatatattttgaaagtaaattatatttatttttatttaaattgtttgagatatagtattttttgtatatgtgtaaaatgttattattgtaaattatttttgtaattttttttttttttttttttttgagatggagttttgttttgtcgtttaggttggaatgtagtggcgtgaattcggtttattgtaattttcgtttttcgggtttaagggatttttttgttttagtttttaaagtagttgggattataggtataaattattatgtttaggagagggttgtatgattatataaattcgagtatcggatcggtatggtggcgggtatttgaatttttagttatttggggggttgttggtaggagaattgttttaatttaggagcgggtttttgtagtgaattgagattgtgttattgtattttaatttgggcgatagattaagattttattttaaaattaaaaataaaaaaaaatttgtattatttaaaatagtaatattttttattgtaggtagtttgaaaatatataaagtattaaaaattattgataattttatttttaatgtttttataagtttatttttggtttttatttttatatatatgtattatatagttttgtttttgtaaaaagtagtattttttatattatatgtatatagtttagtattatgatttttttatgttatatttgtgagtatttgttgtaaaaattatttttaatggttataaagtgttttatatgaatgtattgtaatttatttttttaattattttattattgttgaatatttaggttatttataattttttttttttttttgaggtagtttcgttttgttatttaggttggagtatagttgtataattttggtttattgtaattttcgtttttcgggtttaagtaatttttttgttttagtttttcgagtagttggaattataggcgtgtgttattaagtttggttaattttttgtatttttagtagagaaggggttttattatgttggttaggttggtttcgaatttttggttttaagtaattcgtttgcgttagttttttaaagtgttgggattataaagtgagaagtgattataaggtgagttatcgtttttggtttatttgtaatttttaataatatagtattgtgttgaatatttttgtatttaagtggttacgttttttatgagttttttagaataattttttagaagattaataattagttgaatgttataaatttttttttttttatttttgagatagggttttatgttgttgttttggttggagtgtagtgatatgattatagtttattgtagttttgatttttttggtttaagagatttttttattttagttttttgagtagttgggattataggtatgtattattatatttgattaatttgaatgttataaatttaaaaaaaatattgatatatattggttagttagttttgaagaagattatatttttgaaaatagtatgaaagagtatttattgattattaatttttttgtttagtagtgtaaagaaataaatttttaaaaatttatttagtagttaatttatttttaatatatttattaaattaagcggagtatgatgatttatgtttgtaattttagttatttgggagattgaggtaggaaaattatttgaggttaggagttttaggttgtagtgtgttatgagtatatgtttgtgaatagttatttttttttagtttgggtaatatagtgagattttattttttaaaaaaaaaaagtaaaattaaattagtttttatttttgttagagtttttggtttaaaaattgagtttttaagaagtgatatgataggttgggtgtagtggtttatatttgtaatattagtattttgagaagttaaggtgtgaggattatttgagtttaggagtttaagattagttgggtaatatagtaagatttttatttttataaagattgagaaaattagttgggtgtggtggtgcgggttagtagtttagttatttgggaggttgaagtaggaggattaattgagattgggaggttgaggttgcggcgagttgtggttatgttattgcgttttagtttgagtaatagaataagattttgttttaaaaaaaagaggagtgatatgatatagaataaagaagtgattagatagaattaattgggaagtagatgaaggaaaatgttaattaggatttatatatgaaaaaatataatttggttaggtgcggtggtttacgtttgtaattttagtattttgggaggttgaggtgggtggattatttgaggttaggagtttaagattagtttgattaatatggagaaatttagtttttattaaaaatataaaattagttaggcgtggtggtgtatgtttgtaattttagttatttgggaggttgaggtaggagaattatttgaatttgggaggtagacgttgcggtgagttgagattgtattatcgtacgttagtttgggtaataagagtaaaatttcgttttagaagaaaaaaaaaaaaaaaaaaaaaattagtttggttaatatagtgaaattttatttttattaaaattataaaaaattggttgggcgtggtggtttacgtttgtaattttagtattttggaaggtcgaggtaggcggattacgaggttaagggttcgagtttagtttggttaatatggtgaaatttcgtttttattaaaaatataaagattagtcgggtatggtggcgtgcgtttgtagttttagttattcggaggttgaggtaggagaattttttgaatttgggaggtggaggttgtggtgagttgagattatattattatattttagtttgggtaatagagggagattttgttttaaaaaaaaaaaaaaatatgtttttttagtttatattttttttgtaatttagtatttagagttagaggtttaattaaaattagatataaattttaaaaataggaatatttaataggaagttttttgtattttttatattatattagcgaatatataatgtttggtagtttttttattgatgagagggtagatattattttaatttttttttttattgaatttagaaatttttttataaatggttatttttatttttgtttaaattttttttttttttttttttttggatttttattttatcgtttagtttggagtgtagtggtataatattagtttattgtaatttttgttttttatgtttaagtgatttttttgttttagtttttcgagtagttgggattataggcgtatattatcgtatttagttgatttttgtatttttaatagagatagggtttcgttatgttggttagggtggttttgaatttttgattttaggttatttattcgtttcgttttttaaagtgttgggattataggtatgagttatcgtattttgtttttttttaaaggaattagattttattttttttaggaggttttagtggttatttttttgtttaggagttatatttggtttgattagaggaatatttaattttaaatattattttgtaaatttttttttttttttttgagataaagttttattttgttatttaggttggagtacggtggtataattacggtttattgtagtttttattttttaggtttacgtgatttttttgttttagtttttcgagtgtaggtgtgtattattatatttggttaatttttttaatgttttttttttttttttttagagatggggttttattatgttgtttaggttggttttgaatttttaggtttaagtgattttattgttttagttttttaaagtgttaggattataggtatgagttattacggttagttatagttgtaattttttttttttttttttttttttttgcgacggagtttttgttgtttaggttggagtttagtggcgtgatgttgatttattgtagtttttgtttttcgggtttaagcgatttttttgttttagttttttgagtagttgggattataggcggtcgttattacgtttggttaatttttgtatttttagtagagatggggtttttattatgttggataggttggtttcgaatttttgatttcgtgatttatcggttttggttttttaaagtgttgggattataggcgtaagttatcgtatttagttttagttgtaatttttaaatttggttatttatagttatttgaggagtggtttagaaaattttaaaaaatatataaatatagaaataattttatagaaataagaatataatatatatgttgtttttattatagataatttttttgtttttttttttatagttagtttttatttttttaggtaattatttagtgtgtatatattgtattttttgtttatataattttatgtagatttatatatatataaataaatgtttgtttattattttatagatttttttttttttaatgtaataatgttttattaaaatttttttaaattatttagtttaatttagtttaatttttttaagtggttggataatatttggtattaaattataatgtatttatttttttataggtgggtattattttatttttagtttttggttattataaattatgttagtagaaaatatttttatatatatgttgttatgaattggtatttttttttttttttttttaggattagaatcgttgggtaataggataaatatattttttattttattggagattattaggttgttttttaggaagattgtaatattttttattttttttaataatgtttaaggatatttttttagattttttgggaattttttaaaaatgaaaatttttaggtattaattataaattttttgatttagttttgtggtaatatttaggaagttatatttttaaaagtttttagatgaatttgaggtggtattgaaagtattgtatttaagtatttaggaatattgaaaataattggttttataatatttatatgaataaaattagttttagttagatatatatatatatattagaattaaattattaaattaagatatgaattggttatggatatatgtattaaatgtaggttaggggtatatatagttttggaatggaaaatttaattagttggattggggatagttttttgggagttattaatttagtttagagtaattgaataatttagaaagattttgaaaagaggtaagtatttagtggttgtttagaaatttaaatgatttgagagaagttaaggggaaaagagtattatatatgtaaaatatttttgaggagtttttgtttttagagtaaaagaggttattaggtgagatggtaagagggttgtattgaaaattaagaggatttaattttaattttggttaaattataaaatttttagattttggaatttatttttttgttatataaaatgaggaggtttgatagatgattattatgattatttttattttgaattagattggagataattttttttgttattatagatattttagaaaattattgtgttagaaaataaaatttattgtgttagatatttttttttgtttataagttttgagtttaagtttgatagaagttgattatgtttataaaaatgaaatgaagtaagatggggatatttagtaaattatttatattttaaaatttttgtttttttttttttttgagacggagtttcgttttgttattcgggttggagtgtagtggcgtgattttcgtttattgtaagttacgtttttcgggtttacgttatttttttgttttagtttttcgagtagttgggattataggtgtttgttattacgttcggttaattttttgtatttttagtagagatagggttttattatgttagttagggtggtttcgattttttgatttcgtgatttgttcgtgttggttttttaaagtgttgggattataggtgtgagttatcgcgtttagttttttttgtttttaaattttaggagtatgttttttcgttgaatttaaggatgtatatttattattaaatgaaataatagtttttgagtttgtgttgttaggtttagaggttaggttttaggggaagagatggttttaatttgtatttgtgtttttttttttaggttttgtagatggtatggggaggaggttgtatttagtttatgattttggttttttaaagattttaatagtagaaatggagtatggtttttatgaagttagaatagtgcgtattttttaggtagtagttttaggtgttaaggtgttgggtttggggtggtgtgttggggaaggaattatggagagatgtgatagggatgatgataaggtagaggtatggtgatatggggttattagaagaaaataaggtttatgattgggttttttttgaattagaggagattgttatatggttattattttattaatatatttaatttaggtgtttattattattgagtttttttttatttttttttatattttgaggatattgtttgtgggaaaattataagtttggtattatgtgtttgtttgtatgtgtttgtgtgtttgaaggttatattttgtcgaggttttagtagggagtgtggggaggatgagtagtatagtgtagagaatttacgtcgtattttacgtagttttagtggtatcgttgttttagagagggaggaagtttcggtttttttttatagttttgtaagtagaattagggtttatttatttagagtatttttttttttgttaagtaaaaatatagtgtaggtgaagaagtagggagaaagtgaaggttgtaatgtgaggaaaggttttgtgtatttagtaaaaataaggatacgtagttattattttatttataaatatttagttggagtttagaggaatgtttattttatgtagtagttttgaaaggtcgtgcgtgttgtagggttttttggggtgagaagagttataaagttttgagaggaatttgagaagtaaaggttgttgattgggttagaatttattgtattaattaaagaaagaaggaaagaaatgggatggagtattggtttgttttttttttttatttttagtatgtgattgaatagaatttagtgtgtttttaatttaaagtgatgtatgtgtattagtaagaagaggaaaaaagtttttttgagaatttttatatggtattagtgtagtaatgtgtaagtagaagaggtaggaaagtttaagttattagagattaataaatttaaataatattagtggttaggtttgtaggtaattatatttttggagaattttatttttttgtttaagttgagtgtttattatagtagaggttagggtataaagtattagtgtattgaaggttgtttattaggttagtttaggaaaaatgtaaaaatagattttaaatatatggtataaaaataaaaaggtataaaagtatatatggtgaaaattaagtttgttttttattagttttttagatttagttttttttttaagaggtatttatttttttaatttttaaaaattagtcgaggttaggcgtggtggtttatgtttgtaattttagtattttgggaggttaaggatggtggattatttgaggttaggagttcgagattagtttggttaatatggtaaaaatataaaaattagttaggtatggtggggggtgtttgtagttttagttattcgggaggttgaggtaggagaatcgtttgaattcgggtggtagaggttgtagtgagttgagattgagttattgtattttagtttgggtaatagagtaagattttgttttaaaaataaaataaaataaataaaaaaatttagtcgaatttatagtaagttttatttaatttatcgtttataaatttttaagtaattttgattaggttgttatttttttttggaaaaggtggatttttttgtttagtatttgtttttatgtatttttaatttatttaatggtaaattgttttttttttaggagagttggtttttttttttttgatttttgtattatttattgatttatttttttaaataaatgtttattgattttgtataagatttttagtataaaaataaataaataaataagtgtttattgagtgtgttttaggtattgtgttaggtgttggagttataatggtgagttagatatagtttttgtttttatggagtttatagtttatagtgagggacggataaataaataattagttataatgtgttaaggatttgattttatgggaatataatagaagggatatttaaattaggtttgaggtattatggaaggttttttggaggaagtaaaaagaatatagtaagtaaaagggatttgagtaaatattaattgaattaaaagaagtttatttagtatggtaggattagaaagttaaaaagggggtgggaaagttataaattgtatttcgaattcgagttcggtttttttgttatttagtgtttttttttttttttttttttattttatttttttatattttttttttttttttttttttgtttttttgtttttattaggatatatggtattgaagatttattttatttatttatttttatttatttgagacggaatatcgttttgttatttaggtagggtgtagtggtataatttcggtttattgtagtttttattttttaggtttaagtgatttttttgttttagttttttaagtagttaggattataggtgcgtgttattatattttgttaatttttgtttgtttgtttttaaagggttttttttttttttttttttttttttttgatagttttgttttgtcgtttaggttggagtgtagtggtatgaattcggtttattgtaattttcgtttcgtaggtttaagcgatttttttgttttagtttttcgagtagttgggattataggcgtgtattattatattaggttaatttttgtatttttagtagagacggggttttattatgttggttaggttggtttcgaatttttgatttcgtgatttatttgttttagttttttaaagtgttgggattataggcgtgagttattgtgtttagttaaatttttgtatttttagtagagatggggttttattatgttggttaggttagttttaaatttttgattttaagtgattttttcgtttcggttttttaaagtgttgggattataggtatgaattattgttgcgtttggtttgaagatttattttagtatggttaatagtaatgagagtggaaagtaaaagaaaaataatttttagttttttttatatagataagtttataaaatagattttgtaaataaaaattaaaatttaagttgttttaaaatataatgaaatagaattagtaagaaatattgaagtagttatgttatattaaggttatatgggttatttgaaaataagtaatttggttaggtacggtggtttatgtttataattttagtattttgggaggttagggtgggtggattatttgaggttaggagatcgagattagtttgattaatatggagaaatgtcgtttttattaaaaatataaaattagtcgggcgtggtggtatatgtttgtaattttagttatttgggaggttgaggtaggagaatcgtttgaattcgggaggtggaggttgtagtgagtcgagattgcgttattgtattttagtttaggtaagaagagcgaaattttattttaaaaataaataaataaataaataaataaataaataaaaagtaatttttttaaaggaaagttattagaaaatattttagttaaatgattttagatttataagtagggtaattggtaatagaatttaaatgaattttaacgttgttaattagaaatattttagtttaaaaaaaattaaaatatataaatttagtattttggtttaatttgaaagtttgataatttgaggttattataatttatgaaataaaataatgttaagaaaatgatttatattgtaggtgttaaaatgaatatatgtttaatattgataatgttttttaagtaaaaaggtgaattttttattaatattaatagttttgataattttaagagataatttagttttataaatttagaatttggtatataaagtaaaacgtatattttttaagtatttggggaaaaaaggaggtatttgggtaatttaggttaagtaaattttgtggggaggagggaaagtaatatatataaatttaggattttgtgttttaattatttatattagttttgttgatgtggtaagaaagtatatatgtagatacggttagatattttttttaatttttttttatttttttattttttatatagttaaagaatgtttaatagaatataattaaaagggtatatattattttgtttaattaggtgggttagattaatttttaaataggggaagaatttgatttgagttagtagttggagtaggtttagaattgaatttaattaattaaaaatttaatgatttataattaatgatatggaattattattaataattttagtgataagtttattatatttatttatgaattatttatagtattttaagtttttaaattttataaaaagtgaattttaggtatttgattttaaatatagaaagatttatatatttttaaaaatttatatgattataaaatgtaggttttatgattataagtatggagtataaaattttgatattaagaagttttagggaggtaggtcgggcgcggtggtttacgtttgtaattttaatattttgggaggttacggtgggaggattatgaggttaggagtttgagattagtttggttaatatggtgaaatttcgtttttgttaaaaaatataaaaaattaatcgggtatggtggcgcgtatttataattttagttattcgggaggttgaggtaggagaatcgtttgaatttaggaggtagaggttgtagtgagtagagatcgcgttattgtattttatttgggtaataagagtgaaatttcgttttaaaaaaaaaaaaaaaattttaggggagaaaaagattatttgtatttaatgttaatagatagtttttataatattattattatgaaaatgtatcgatataaaattattattatattgtggatttaaaagaaatttggattttaataagttaaatttaagttgaatttatattatttattattaggtaattagtattttttaatattaggtattatattatagtataattattgaataaaagataaggaagaattttgaagatgaaatttaaaagtgaatttttggatttgtaagaaaggtgaattttttagtaaatgtaggagattttatgagtagtgtaaattagtttgttatatattattttaaaatatataatttatataggaattttaattggttaataaattttataaagaaatgaaagttgtttttatgaagagggtataatgaagtattagaaatatgataattataagttttatttaattataattttttatattaataagttttttttttatttatttaaattaaatggtttttattttatattaataatttgtaaatatgattgttttggatttataatttatttttaaggaatttgttttatgtttggaattttatttttattgtattaaagtagtatagaaaaaatattattatatatatgataaggaataagaagatttataaacgtaaggatagtataaatttattgtttaggaatgtgattggttattttatttaatagtttggtgaaaagtgtttagggaaatgaatatataatatagaaatatagttagaaaatgaagaggtagttaatgtttcgtttttatttttataaaattttaggattttttgatagaatgaatgtttgtattattattttttttttaagatttttttgtattaaggattttataaattcgttatttagtttattttaatgtttggtttaattggatatattattaatttaagtttaggtgtaaattagtgttttgtttttgtttttgtttttgtttttggagatagggtttggttttgtcgtttaggttggagtatattggcgtaaatttcggtttattgtaatttttgtttttcgggttttagtgattttcgtgttttagtttttcgattcgttgggattataggggcgcgttattatgttcggttaatttttattttttgtatttttggtagagaaaaggtttcgttatgttgtttaggttggtttttaatttttgagtttaagcgattcgtttgttttagtattcgaaagtgttgggattatagatgtgagttattacgttaggttaaattagtattatttttttaagaatcgaagaaggtttaggttgaaaatttttaattaaaaaaaaaaaagaaaaaaggtttttttgtttttaaatattttaatggaaatatatgagttagattttaaaaagtaggttaacggtgtttaaatattgtgttagtgtatttgagaagttgaatgaaaataaaagtatttatattttaaaaataaatataatataaataaggaaaagtttattttacgattttaatttattaattaagttatatggtaaagagaattattttaattgttttttatttttatagtagtgtttgaggttggtaggtttttttaggaagtttggaattttaagtaatttttaattagtttttaatttttttattttaaattaatttgttgatttgttgtgggtaaatatttataaattttgttttggttgagaaatatttaattttttcgtttaggatgaatgtgtgggtgtgtgtttgtaagggaggggtaattttttttgattaaagtgttgatggttttttaagtaaatatttgttatttataagaattttttttttcgtttatgttgttttttttttttttttgtattataaaggttggttttttaatttttgtttcgattttttatcgtgatttaattttataaggtttttttaatttttgtttcgggtggtatttgacggttaaaagtgaatttttgcggttgtcgttagttagacgcggatagggcggacgattgttatcggggagtaggcgtgggttaaagtcgaggtgatttttgattgtttattggcgggtttcgcgtggttgaaggttttcgagtttttcggttcgtttcggtaagttagaagtgtagttgtcgcggggtaggaagttaatcgcggtttttgcgtcgttttgataggtcgagtgaagagaaaacgggtttaatgtagcggggagttttattttttgggataggaagttacggaagtaaaattttcgaaaaggtttgattttttaaaaaaaatcgcggantcgaaaatataaattagttttgtttagtaggggttcgtttaggggttattttttaagggaggtagttagttattcgttcgttttttcgggtttattttcgaggggacggtttttcgttcgtttttatatatagttagttttttaggttaggtttttagggtttcgtttattttttatttttgacgacgcggttagtttcgggagggggcggcgggggcgggggtgggggcggtgtagttcgggtcggtttcggggcggttatgttgggttcggggttcggttaggttttgggtcgggcggggttgggggcgggggcggcggttattagagttaagcggcggcgtcgtcggggaatatggcggattttttttttttatagaggggttaagatcggtatgtattgcgcgtgcgggggtgggggcggggtaggttttagggatttgggtaaaattattgaagttaggagagaaataggacgaggttaagggattaggttaaaattttttgtatgtagaatgaagaatgaggaggtgttgcgatcgaacgattgcgaggaaatatattcgtttttatggtatttttagtaaattgagaagacgtgattaaattttaggattttttattaatagagaaatgtataacgatttagttattagatttgaatattgaagggttggtaggggattagagaatagaggaagtattgtaggttttagagtggagaagggattatttaaaatggagtttgaaagagaattttggtttttgtgtttagagtttggaattgttaagagtttgaaagtatagaataagattgtagttagagtaatttaggcgttatagtttgttaaaataggtaaggggaataaaggggatgatattaagagatgtgtaaagaatttgaagaatttatttgaaaaggatataatttttttttggaaggtagaggagtaaatagggaattggaaattaattttttatttttgtatatgtatagaatttgggtttaggtgatttatggaatttttatagagattacggtgattgatatttatgggaaagggggtagaggggtaagaattgattgtttattaaaaattattagatgagtgtgtttacgatattaggagatatgttgaattatggatagggattagtatatttattaagttttatatattttgatggtgtaggatttaagtgggatggaataattaatttttgtttatttttttgtttaataatatatgtgtttagaatttgtttataatgtatggtggtaagtaagtagtagttcgaaggtttaaggagtatttttttattttttttttgtgttaatttttattttgagattttaggaaaagaggaagggaaagatttaataatggattttttttaaaaagggaatttataagttattttttagagggaagagtttcgggagtgaggtataggtgaaaatggatttttttggtatggaagggttataatattataggggaagggaaagggagaggtttttacggaaggagaggaaggaagggataggaggtacgttataaatttataagatagagggaaggtatttggagtatattgattaggagtgagtttgtaagaagagtttgaatttttagaaaatttttttaaggaggggaggaaggaagtgtataatgtattgagtattgaatgttttgttaggaaagggatgggaaatattttagtagtaatattagaaaggaaaggtattttattttaggatttattgatttttattttgattgtatattttttaattcgtttttggttttttatttttatttagttaaaagttattttatatatttatttagatttttagttttaatataaagaaagtaagagtatataaagggaagaatgataaggaattaaatagaattgttttatagatttattaatgaaaaatattttataaaaatagtatgtttggtttaaaatagtttagttgattttgagggtttatattgacgattgagtaagtggtaataatggttgtgttattgaggatagaaggttgtgttagtgtgtttgattttatttgtttaaaagggtgaatgttatgttggtagtttcgtattttaggtttaaggtttggagggtatagggaatgttgataggttataatatttgggtaggggggttgttttgatgatgttattagaattatgattatagggttatatgtttttttaaggatgggagatagggaagataaagggttaggtaatagggataggtggataaaataaagagtagaagttgggagtatagtagggaatagaggatgagggtttaggtggaggtggggatataaagtatttaggaataaaatgtgattttaaaattttaaggaatggttagtatttagagtaatattatggatttatttttaaagtggtttagataaaatttttaaatagtagttgtttttttttgttagggggaatggaagttggaattttaaatatttttttttaaagaattatatttttttagaggtttttgatatttttaggagaatttattaattttatgttgagatgagaatagtataattatggtagtgatgtagggtattaacgttgttatagtagtttattttgttgttgttttgttttgttttttgagatggagttttattttattgttaagttggagtgtagtggtgcgatttcggtttattgtaatttttgtttttcgggtttaagtaatttttttgttttagtttttcgagtagttgggattataggtacgtatcgttacgtttggttaattttttgtattttggtagagacggggttttattatgttggttaggatggttttaattttttgatttcgtgatttattcgttttagttttttaaagtgttgggattataggtgtgagttatcgcgttcggtttatagtatagttttataaagaaaggtgtagttttaggaaaggaaaggaataatttttattattgattgtgttgtaggattttagttttgatttgtttttttttgggagtatttgatagaataaatagaaattttttttttattgtttttttgtgtttagagtgggaggtataattgttttgtttttagttattatttgggggtatatttatttttcgaggattaggggttcgggattttggaataggatttgaattttaagttgattttaggggtatatgaagattgttagatggtgggtatataggatgaataatgggagggtgggagggtgaatggaaaagattattttaggattgagtgtgaggaatttgaaggtttttgtttttttttggtagtgtggtagtgtaggttagttgaggattgtattttggagtagttaggaatttggttttaatatgttggttggtttttgattagggtgtttaggagttgtttgttttggagcgatgggggaggttttggtagtttaaagttttttttgtgtatttggttttttgggaagttttatttttgttatatatagttagaaattgttggatattttttgaagtttttggggaaagaaaagaaatttaaagattgagtatttttagaaaattatttttttttttagagagttatgtttagttgtgtagtttaattttttatttttttaagagtatatatataagggaaagaatgaattaagttgtgtttttgattttattttttaaaatttttaatatatattaaaattaaattttatatttttaatttgggtaaatgaaatagttttatggatgttgttatatttttatttttttttattataattttttatttattatatatatatttataaaagaagggttttttaatatatagtaatatatggtaaacgtatattttttttgtgatgattatatttttagagttattatattaaaattttacgtagtttttttttttaaaaaaaatagagacgggattttattgtgttgtttaggttggtttcgaattgttggatttaagttatttttttattttggttttttaaagtgttggaattataggtgtgagacgttgtgttttgttttttttttgtttttttaattttttttaaaatgttatttttattttagttaagttgtttttgtttgatttttgagatttaatgtggaatgtttttttttatatatttatttaattttggtatttttggtattttgggttgataattttttgttggggttggggagagattgttttgtgtattgtgtgatttattaatgaaaaatattttgtaaaaatagtatgtttggtttaaaatagtttagttgattttgagggtttataataataattgagtaagtgataataatggttgtgttgttgaggatatttttggtttttatttattagatatcggtggtatattttttttatttattgagaattattgttttaagtttgtatatttagtgtatgaggggaaaaaagagaatattttattcggaaggttaaagaaagttaaaatgatattgtttattttttttataattgtttgggtttgtatatatggtgtgggtattttatgtaaagggtttttttaatttttttatttattttttatttttttagattattttttagttgagatttagaggatagaaggggagaaaattagtttagaggatagaaggagagatgattatttttgttttggggatgttttaaagattgggtattaatttttttttgttagttaaaagtttattttgttatgattgaagtaggttattttcgtaagtagatagattttaggggtgttggtttaaatttttggtttaagaattatggtgtttaataaatgatttaatatttatttagataaatgtacgattttgaagtagtaatttatatttttatattattttattttgggatatttttttttttataggtatattgatttgatttttggaggtttttgaaaaggtattaaattttggtatataatattagatttgggggagttatttgggagtttattgggtttttttgttatggtgggtattaggatatttggggataggaattgtggttggggaaggtagagttggggatcgaggagaaatatagaagggttatggatgatagggagggaagaggagttggaataacggtgttcggtttttaaaggtttttttacgtttgatgaatttttataatgagataagataaaaaaatatagagatgaggattaatataaagtaggatgtagttgggtaaatatagtgaggtaagtaaagggaaatggagggaattagagtataaatatgtttatatgttttgttttggaataggatttaatttatttag

SEQ ID NO: 221 - DNA, 6065 bp, Artificial Sequence
  chemically treated genomic DNA (Homo sapiens)
gatttaatgtttttgattttttgtttttagtttatggttttttttgtgattttttataaatatatattgagtattaaggtttatgttttatattagtaatattaaattaaattagatttgttttttttttgtgtagttaatagggtagttaagaaatatataagtaaatagatatgataattagtatagtgattgtagttatagaggtgggtttagggttttttgtgatttttggaaggtgggggaggagatagttacggaatgttttttggagaaatgttcgtttggtgtttaagtatttattatgtgtttagaggaaaagatttggtttcgttttttagtaatttattatgtagttttttttttttttttttttgatacgtggttttattttgtcgtttaggttggagtgtagtggtatgattttggtttattgtaatatttattttttggatttaagcgatttttttgttttagttttttaagtagttggaattataggtatatgttattaagtttagtttatttttatatttttagtagagataggtttttattatgttgattaggttggtttcggatttttgattttaagtgatttatttgttttggtttatgatagtttgtattaaggtgttatttgtttgttcgagatggggtagttgttaagttttatgataagagataatatgtagttggttgtgttgaggtttattattgtgtggtgaatatttgatatattataggtttttgataagtaattgtggaaggagggtaggttgtagaagatagtagtaggaattagaggatttttggtttggttatgttattatttagttatgagagagttatttaatatttttgagtttcggttgagttagttgtaagaattaattttttaggattattattaggtgtaaagaagagcgtgtatataaaagttacgttgtaaattgtataatattatagatatatgaaggatgatttttatttattatatatataatattatatgatttgataattaaaataagtttatggtattggtgaatcgttgtgattaatttatagaaaagtaaagtatagttttaaggggtttaatggtttttttgaggttgaaggataagttatagaatgagtaagtatttaagttgggatatgtatttaagttagatgatgtttaagtttgattttttttttagttaggaatattattatagaagttagagttaagttaggtagtatttttatggttagggagagaaggagatttattcgtgatttaattatgtattaatttttagatattaagaatttgtataaattttttttaggttttgagcgaggtaagtattgagtttatgtatatttaaaatgaatatttagtatttttgtttattttaaatttttgtttatgatattttttgtaatatagtgtaagataaaattgagagataggagatgatattttattgtttgtttttagttttattgttgttagagttattaagtttttgtaaggtagggataggaattattgttttgtggatttggaaggaatttttattatgttataattttagaatttgagatatatttgaaaaagaggttaatatgattaggtttttttatattttttgttattgaaaggtgtttgttttttttataacgcgtgatgatttgtatttttaaattatattggttttttttattgttatttcgtttttttgttgtggggattatttgaatgggagtaggggtatttaatttagttaaggttttttttgttgttttaaataaatttgatatttagtaggagaaggtttaggattgtaagtagtaggatgatggtttaatttttagttttgggtttttttattttttacgtttgttatttttgttttttaattagaatcgggttttggatggggttagttgggaaagtgggaaatgtgtcgacgttatcgttgttgttgttgttaaatttaaattttatagtttttttagaattgagaatgtaaaagtgaattattttttttatttttgaggtttttgtttttatttttttttgtgagtatttttgatagttatgataggtaagtaggttaggaggttttattaggagtttttaatttacgtgtttttagttgaaatgtaatagtagttggattaagaggtaagaaatttttattgtaaagaggagtgagaattaagagatttgggttttaattaaataattataagataagagtggggggtgtagttaaggttggggtttttttttttattgtatttttattagatataatatttggttgttattttattattttttgattttgtttatttatttagaataaaaatagttaatatttattgggtatattatatgtgttaagtattgagttattttatatatattagtttatttaatttttaaaattttagtaagtagatatagtatttttatgtaatagatgtattttcggaggtattataaggttaatttgttatatggtttatagtagaggtgtttaggtttgaattagggtatgtgtttttaattttgtgttaaattgaaaattttaagaatatttagtttttggggttttaagggtgaaatgtatttatattttttacgtgtatttttatatatagtagtattggataagagataataattattgtagtaattttttggtttgtgttttttcggaattataggaaagtattatttaatttattttgttgttattgtatgggttggggaagtaatgttgttgtttattgtataatgaggttatagtatatgattgttttaagaaaatttgggaggttaggaagtattgtaattaaaatattaatataatataaggaaaggggtaagttataatgaagtttttaatagtatatttttttttaagaaatgttgatattttttaaggagaaagggattggttttggtaagtagtaagcgaagagttgttgatttgaagttttgtttggggaaggaaggatgggaggagatatatgaattttaaagaagttattttagtatttttttttgtttattttggggttaggttagaaaattagaattatttttaattaaaagatttttaacgttttagtgagtttattgttgtagagtgtaattttaggtattatggtatttatttgatttttatagtaatttttttgagggaatttaaatagtaattttattttatagatgaggaaattgaaggttaaagaaattaatgatttatttaatttatatagttacgagaggttttgaagagtgtttttttttattgttttgtgtttgggagtagtttattaggtaagttgggaataatgttatagagagtgacgagtatgtgatatttttgtttttgtgttttttttattttattatatttttgggtatagcgggtttttttgaagcgtttaattaattattttttaatttttaaaaatatttgtttaaattttaatatataatattgtataatatttgttttataatgttttattttattggtaaataaaaatggtatatatttagtatgtatatgttttgaaatatattgattgtggaatggttataagttaagttaattaataaatatattgtatacgaatttttttgtgtgtgtggtgagaagtaaataaattttaattattgaaagatagaataatattaaagaatgagataatattaaaggaaggaaggaaggagggaaggaagggcgggagagaaggaagagaggtagagataatcgttttattatttaattttttgttagttttttttttttttttttgtgggggagggtggggaggttagtttttgaatacgttgtataggtattatgtttttaatttttttttattattttttttatttttatattatatttattttttttttaatatgtgattttatattggtttcgttttttataatttttttgtcgtttacgtattttattttttgtgggtagaatattgtttttttttttacgttttttttattttttttttgtatagttgtattatatttcggtattatatgtttatataagcgcgtggtaaaattatatatttatataagtatgtgttaaaaaatattcgagtaaatatcgtgattgagattttttggaaaattgtgggtaaattagttaaaattgagagttttggcggagagggttttttttatttataggataaaataattgggaattatagaataagtagaggaggataatttaagagagtatagagttgcgtgtattttttttgtgtcgcgatttgtatttaaaagttttagacgagatttgaggagttttttagaggtttttttgttattgtttttttggttagggtttttttcgtagttttttttttcgattttttttttttatagtttttcgttttcgatatgcgaggttcgtttttttttttagtttgatttttaagtttttttattttttaggatcgggttttagttttattttttatttttatttttttcggttttttttagaaagggttttttgtttttttcggtattttcgtttatttttttcgtagtatttgtcgttttcgttttttattcggatttcgcgtatttggcgtagtttttttcgtattttcgtttagcgtttcgcgttttcggttttcgttgtcgttgtttcgggtttcgtcgtaggagttttttattttcgggagcgggcgtttcgcgttttttttttcggtttcgtttcgttcgtcgttcgttcgttgttttttatttgggttcgaagcgtttagcgttttttttcgggatttcgcgttcgtttcgcgtttttcgcggttcggggttcgttttttcgttcgtagggttcgttgtattgtgggtaggcggcggcggcggcggttacgcggagcggtaggcggtggagcgaggtcgcgcgcgtcgaagatggttgagaagtagaagtacgacgggcgggtgaagatcggatattacgtgttgggcgatacgttgggcgtcggtattttcggtaaagtgaagagttgagtacgcgtttcggatcgttgtgcggggttgtttgatttgcgggaggtcgaggggagaggcgggagtttcgggttttcggcgggcgcggggttcggcggtaggtggagcggtttcgggtcgcgcggagttggggtttcgggagggtggcgcgtatcgtttcgtttggtatcggcgttcgggttttatagggtttagggaagagggcgggggtgtgagttgaggatgggcgttttgggttttaggtttcgcgtttatttgtttttttggaggtcggagtaaggtatttttgtgttttttggattttagtgtttttttttgtaaaatcgggagaattggattcgttttgcgaggcgttttttagttttgagtttgtaggtttagggcggggattatttacgttattgaggattgaggcgtcgtttcgtgtcgggtgttttgttaggtgttttatatggaattttattgaatttttatagtgatttggttaatatgttgtttttattttaaaggtgagaaaattaggatttttagagatgtagtaataagtttaaggttatatagaaatggttagtattagagtgaagtttaagatgttttttaattttggttttgttgggaggtttttgttatttttagatttttttacgttttaggattttcggttgttgggggtgattgtttgggggatgttttaggggttagaggttgtgagtttttttttttggggtgttgtttaacgttggaatgtagttggattgggttagaggttaattaaaatagagaggtttgaaggtgtttgtgtttgtaaaatggttatgggaagatttttagggtaagggagagaaaaagtttttttggtgtttggaggatttgaggttgaggaggttaggattgttaaggtatattttgttaaggtttgtttttatggagataggatttttttttgaatgtagaaaaataggttgtttttgaaatgttatattttattcgagttaagtaa

SEQ ID NO: 222 - DNA, 6065 bp, Artificial Sequence
  chemically treated genomic DNA (Homo sapiens)
ttatttaattcgaataaagtataatattttaaaagtagtttgtttttttatatttaaaaggggattttatttttatgaagatagattttagtagaatatgttttagtagttttgatttttttagttttaaattttttaaatattaaggaaatttttttttttttttattttagaagtttttttatagttattttataaatataaatatttttagatttttttgttttaattaatttttgatttaatttagttgtattttagcgttaaataatattttaggaagaaagatttataatttttggtttttggagtattttttaaatagttatttttaataatcgagagttttggaacgtgaaggaatttggggatggtagggattttttagtaagattagaattggaggatattttagattttattttggtattgattatttttgtgtgattttgggtttgttattatatttttaggggttttagtttttttatttttagggtgaggataatatgttgattaagttattgtgaggatttaatgagattttatgtaaagtatttaatagggtattcggtacgaaacggcgttttagtttttagtagcgtggatgattttcgttttaagtttataggtttagagttggaaggcgtttcgtagaacgagtttagttttttcgattttgtagaggaggatattgaggtttagagaatatagaagtgttttgtttcgatttttagaaaggtagatgggcgcggaatttggaatttaggacgtttatttttagtttatattttcgtttttttttttggattttgtggggttcgggcgtcggtgttaggcgaggcggtgcgcgttattttttcggggttttagtttcgcgcgattcgggatcgttttatttgtcgtcgagtttcgcgttcgtcggaggttcggggttttcgttttttttttcggtttttcgtaagttaggtagtttcgtatagcggttcggagcgcgtatttaattttttattttgtcgaaggtgtcgacgtttagcgtgtcgtttagtacgtagtgttcgatttttattcgttcgtcgtgtttttgttttttagttattttcggcgcgcgcggtttcgttttatcgtttgtcgtttcgcgtagtcgtcgtcgtcgtcgtttatttatagtgtagcgggttttgcgggcgagggggcggatttcgagtcgcgaggggcgcggggcgggcgcggggtttcgggagagggcgttgggcgtttcgggtttaggtgggaagtaacgggcgagcggcgggcggggcggggtcgagggagggagcgcgaggcgttcgttttcgggagtgagaggtttttgcggcggaattcgaagtagcgatagcgggggtcggggacgcggggcgttgggcgggagtgcgggaggggttgcgttagatgcgcggggttcgagtgaggggcggaggcgataggtgttgcgaggggggtaggcgagggtgtcgagggaggtaggaggttttttttgaggaaaatcgaagggggtgaaaatagggggtgagattggggttcgattttagggaatggaaagatttggaagttaaattggaagaagagacgggtttcgtatgtcgggagcgaggggttgtaaaagggaagaatcgggaggggagattgcgggaagggttttggttaaaggggtagtggtaggagagtttttaggaagttttttaagtttcgtttgaggtttttggatataggtcgcggtatagggagaatgtacgtagttttgtgtttttttgaattgtttttttttatttattttgtaatttttaattattttgttttatagatggaagagatttttttcgttagagtttttaattttaattaatttgtttatagttttttaaaaaattttagttacggtatttgttcgagtgttttttagtatatgtttatataaatatgtagttttattacgcgtttatataaatatatagtatcgaaatgtgatatagttgtataagaaggaaatgggaaagacgtggaaagggaaataatgttttgtttatagaaagtaaaatacgtaagcgatagaggaattgtgaagggcgaggttagtataaggttatatattaaaggaagaataaatgtgatatagaagtgaaaagagtggtaagaggaaattagaagtatgatgtttatgtagcgtgtttaaagattgatttttttatttttttttataaaaaaaaagaaaaaagattggtaaagaattaggtaataaagcgattatttttgttttttttttttttttttcgttttttttttttttttttttttttttttttaatgttgttttattttttaatgttgttttgttttttagtgattaaagtttatttgttttttattatatatataaaaagattcgtatataatatgtttgttaattagtttgatttatagttattttataattaatatattttaaaatatatatatattaaatatatattatttttatttgttaatgaaataaaatattgtaaaataaatattgtatagtattatgtattgaggtttgaataggtgtttttgaaagttggaggatagttaattgaacgttttaaaggagttcgttatatttaagagtgtggtgagataagaaaagtatagggataggaatgttatatgttcgttattttttgtggtattatttttagtttgtttagtgggttgtttttagatatagggtagtggaaagagatattttttagagtttttcgtagttatgtgaattaggtggattattgatttttttaatttttagtttttttatttgtaaaatgagattgttgtttggatttttttaagaggattgttgtaagaattaaatgaatgttataatgtttggaattgtattttgtagtagtgggtttattggaacgttgagagttttttagttgggaatggttttggttttttgatttggttttaggatgggtaaaggaaaatgttaaagtagtttttttagagtttatgtgtttttttttatttttttttttttaagtagagttttagattagtagtttttcgtttgttgtttgttaaggttaatttttttttttttaagggatgttagtattttttagaaaaaaatgtgttattgagagttttattgtggtttgtttttttttttgtgttatgttgatattttaattataatgttttttgattttttaggtttttttgaagtagttatgtgttgtggttttattatataatgagtaatagtattgtttttttaatttatataatggtagtaaaatggattagatagtgtttttttatagtttcggagaaatataagttaagaaattattgtaataattgttattttttgtttagtgttattgtgtatggggatatacgtgaaaaatgtggatgtattttatttttgaaattttaagagttagatatttttagggtttttagtttagtatagggttaaaagtatatgttttggtttagatttgagtatttttgttgtggattatgtggtaaattaattttatggtgttttcggaaatatatttgttatatagagatattatgtttatttattaaggttttgagaattaaatgagttaatgtatataaagtaatttagtgtttggtatatatggtatgtttagtaaatgttaattatttttattttaaatgagtaaatagagttaaaaaatggtgaagtgatagttagatgttatatttggtaaaaatatagtaaggaaaggaattttagttttagttatattttttatttttattttatagttatttaattagaatttaggttttttgatttttatttttttttgtaataggaattttttattttttggtttaattgttgttgtattttagttggagatacgtgaattgggggtttttaatgaagttttttagtttgtttatttgttataattattaagggtatttatagaaaaaggtaaaagtaaagattttagaggtggaggggataatttatttttgtatttttagttttggaaaagttatagagtttaaatttaataataataataacgatgacgtcgatatattttttatttttttagttggttttatttagaattcggttttgattagagggtaagagtgatagacgtggagggtggaggggtttagagttggaaattgaattattattttgttgtttgtagttttgagtttttttttgttgaatgttaggtttgtttaaaatagtaagagaggttttgattgagttggatgtttttgtttttatttagatggtttttataataaaggaacggaatggtagtggaggagattagtgtggtttagagatgtaaattattacgcgttatggagaaagtagatattttttaatggtaggagatatggaaaaatttagttatgttgattttttttttagatgtattttagattttggaattatagtataataggaattttttttaaatttataaagtaatggtttttatttttgttttgtaaaggtttaatgattttagtagtagtaagattaggagtaaatagtaaaatattattttttattttttagttttgttttgtattgtattataaagagtattatgggtaaagatttaaaatgggtagaaatgttaagtatttattttaaatatatatgggtttagtgtttgtttcgtttagaatttaaaaggggtttatatagatttttaatatttaggaattgatgtatggttgagttacggatgaatttttttttttttttagttataaaaatgttatttaatttgattttgatttttgtaataatatttttaattagagaaaaagttaaatttaggtattatttgatttaggtatatgttttaatttgagtgtttatttattttgtgatttgttttttaattttagaagagttattgggttttttggagttatattttgtttttttataaattggttataacggtttattaatgttataggtttgttttggttgttaaattatgtgatattgtgtgtgtgataagtgagaattattttttatatgtttgtagtgttgtatagtttatagcgtggtttttatgtgtacgtttttttttgtatttggtagtaattttgggaggttgatttttatagttaatttaatcggggtttaaggatattaagtgatttttttataattaagtagtggtatggttagattaggagttttttgatttttattgttgttttttgtagtttattttttttttataattatttattaagggtttatgatgtgttaggtgtttattatatagtagtgaattttagtataattagttgtatgttgttttttgttatgaaatttagtagttattttatttcgagtaggtaaataatattttaatataaattgttataggttaaggtaggtggattatttgaggttaggagttcgagattagtttggttaatatggtgaaaatttgtttttattaaaagtataaaaataagttgggtttggtggtatgtgtttgtaattttagttatttgggagattgaggtaggagaatcgtttgaatttagggggtggatattgtagtgagttaagattatgttattgtattttagtttgggcgataggatgagattacgtattaaaaagaaaaaaaaaaaaagttatataataggttgttggaagacggggttaggtttttttttttgggtatatggtaggtatttaaatattaggcggatatttttttaggaagtatttcgtagttgtttttttttttattttttaaaggttatagagaattttgggtttatttttgtggttgtagttattgtgttgattgttatgtttgtttatttgtatattttttggttattttgttagttgtataggggagagatagatttgatttgatttggtattgttagtgtgagatatagattttggtgtttaatatatgtttgtgaaaaattatagaagaggttataaattgggggtagaaaattaaaagtattaggtt

SEQ ID NO: 223 - DNA, 15224 bp, Artificial Sequence
  chemically treated genomic DNA (Homo sapiens)
agttttttgggaggttgaggtgagaggatcgtttgagtttaggagtttgagattagtttgggtaatatggagaaattttgtttttataaaaaataattggttagatatgttggtatatatcgttgttttagttatttgggaggttgaagtaggaggattgtttgagtttaggagtttaaggatgtagtgagttatgatggcgttattgtattttagtttgggtaatagagggaggttagattttgtgtaaaaaaaaaaaaagtttaggcgtaatggtttatatttgtaattttaatattttgggaggtcgaggtgggtagattatttgaagttaggagtttaagattagtttggttaatatggtgaaatttcgtttgtattaaaaatataaaaaaaaggttgggcgtagtggtttatatttgtaattttaatattttaggagtttaagacgggtggattatttgaggttaggagttcgagattagtttggttaatatggcgaaattttatttttattaaaaatataaaaattagtcgggtatggtggtgggtatttgtaattttagttattcgggaggttgaggtaggagaatcgtttgaattcgtgaggcggaggttgtagtgagtcgagatcgtattattgtattttagtttgggtaatagagtaaaattttattaaaaaaaaatattaaaaaaaaaaaaaagttagtcgggtgtggtggtgtgtgtttgtagttttagttgtttgggatgttgaggtagaattgtttgaattcgagaggtagaagtaaaaaaaagaaaattgagggtagagagtatattttttgtttagtaaatatatgatgtttgggaatttttgtattaatgatatcgaggtatggttgtggtattgttaaggtttaggatgtgttttttttaggtcgacgtttttaatttattttttattttagagattgatgtcgtgggtgtgattgtggtttttattatttgtatttattatggataggagtttattcgagtgggttattacgttaataacgagtattttaattttgagttgcgtgagaattcgtttatgaagttagattttttttaggtggggtttgtttttattttttgttttttataaggtcgttttttatatttggggggagtttagttatttaaattgagagttaaggttattttttaaggtttttaagtaatatttagtttttatagtattgtgttagaagaggagaaaaagatttttgttttttaaaggtatgttttagagaattaagattaggttagtttgggtaatatagtgagattttggtttttaattttcgtaaaaaaaaaaaaaaaaaaaaatgagttagatatgggtggtgtgttttattttggaggttgaggtgggaggatcgtttgagtttaggagtttgaggttgtagtgagtttagatcgtgttattgtattttagtttgattaatagagtgagattgttttttaaaaaaaaaaagttttgggttaggtatagtggtttacgcgttgtaattttagtattttgggaggtcgaggttgtaggattatttgaggttaggagtttgagattagtttggttaatatggtgaaagttcgtttttattaaaaatacgaaaatgagttaggtatggtgttttgtatttgtagttttagttatataggaggttgaggtaagagaatcgtttgaattcggaaggtagaggttgtagtgagacgagattatagtattgtattttagtttgggtaataaaagtaaaatttcgttttaaaaaataaataaataaataaataaataaggttttggttataggtgttttttggagttttatatgtaggttgtttttgttgggtttgagatgggtgattgggggtgttttggttttatgggattaaggagagggcgtatttataagggttgacgtttttttttttgttttagttttagcggaatattttggtttcgaattttcgggtgattcgtttttatattaattgggataataatatggataggttggaggttatagagatttaggatttttttttgggttgcggttttttatttaattgtatttttattaagggtttggggttttttggttgtatttttggttttttttttgagaattttatggattgtatttaattgtaggaatttagagtgttttagtacgtcgggaggggtaattaggttttttagcgagttttgtagggtttatttagaggattttgggggttattagttgtaatttaggtttgttaaatttagtttttaggaaagaataggttttgggttttttttagttttggttagaaggatgatttcgttttttttttataggtttataagaagtaggtattttagttttaaattttgatttgtgtttttttcgtttttataaattttaattaaggttattgtgttattgtgtatttttgagtattattgatttaaagtttttttatagatttttttggtttatttagaggtttttttggttagtgtttgttaaggttttagttttgttgagttaaaggttttgttatttttttttttttttgtatatttgagtagatttattttagttttttggtgttataggcgggaatgttagttagtaggtagatttagattttatttttgttttgtttttaggaagatttttaggttttttttaatttagtagttttttttagaggtgtgattagtaggatgttgaggaattatgttgttttttttgttaattatagttatttttttgttattttttaaatggatttggttttttttggaggttgttatggttggaagatggtattagagggtttgtttgggtagtttgttttcgggttagggttagggattttttgtttttggtagttttaatttgttttttgttaggattagggtgattttaagttagggaagtaattgggattttgaaaattgtttttttttagttcgttttttttttttgtgttttggtttttttgttgttatgtggatgttgttgtgattgttgtttgtatattattaaaatgtttttatattaaaaatgtttggtttgaaaattaaaagtattttatttagaatgattgtttgtgtttttgtttttggtggattgaagtaattttgtttatttttttttagaagtggttttttgttttgtttagtgggttggttgttttacgttttttttttagttttttattttagttttaattggttttatagttgtattttagattgaggttttaggaggggtttttttttgttaaaatttaaattagttgttttgtagatagattataatgagtgattttttagattttgtttttgatttataggaaattaatatcgtgattttaatatataaatagtaatgtttttattaaattttattaaattttattatgtatttatttatttagaggcggagtggttagttatttttttatagtttatagaaaggttttgattttttttttttggaattgtggttgatttgggaatatgggggtagatagtagttggagaaggtggaggttatttaagtcgaagtagtagatcggtttgtagttaagtttagttagttttttcgagtcggggtgatttggtttttttttttttttgatttttttttaagtgttttttaattaggagtagttcggtttcgtaagagtatatttattaatgttaggagatagcggttgttatagttagtaggaagatagaggaggggttattggtatttagtgggtagaggcgggggatgttgtttaatatttagtggtgtataagatattttttagtagaaaatgatttagttttatcgttagtagtgtcgtagttgggaaatttcgattgttttttgttaagtgtgtattgaaagaggattttgaaggaaggggtaggtttttttcgtattgtttagataggaaatatagacggggaataggagtagggaatttgtttggttgtattttagattttttatttgtgtaatgggagtgatgatggtagtatttacgcgatgggagtgtggtgcgaaggagcgttaagtgggtgttagtttttattattggtaggagtttagggttagggtttagtaaaggggtggatattgagcgtttttttttagttattttttgcgtcgggttcggtatttttttgagtgcggttgggaaaatttaggaggtttcgcggtttggtttttaagtaggtttggtttcggtcgtttagcgttaggttttatgaatgacgtcggcggcggtcgggcgatttttgattcgcgcgtcggtcgcgtttttttttcgttggtaggtggatagcggttgcgtcgggtaggtcgcggcgttaatttcggttggtcgatagtcgttgtcgtattgagcgggggcgggggattgcggcgcgcgcggggtcggtcgggcgttcgtcggggtcgttttttgagtttcggagcgttgcgcggtcgttagttagttttcgtcgtttcgtttcgtcggttcgggttcgtagattgcgttttcgtttcgtttttttattttcggattgatattgagcgttttgttggggggtttggcggattcggtattttcgttaatcggcggtttcgtagggcggatttcgggtttagtttagcgtttcggttaatcggacgcgtttgttcgtttagttgcggtttcgcgagcgagtgaatggtcgagagttcgcggtgcgtgtttcgaggttgagagtttatagtggcgcgggaaggtcgcgggagggttaatgggaggcggcgttgagtcgttagttagggcggtttaggttaatgagcggcgggttgcgggggcgttatagatagcggtagagattttgggttgaggttttcgggcgggcgggcgcggagagacgcgggaagtaggggttgggcgggggtcgcggcgtcgtagttagcgtagttagttcgagggtcgtcgtcgtcgtcgtttagcgcgtttcggggtcgtcggtcgtagttagtattcgtcgcgtcgtagtttcgggatcggtttcggtcgtcgtcgtcgcgatgggtaacgtcgtcgtcgttaagaagggtagcgagtaggagagcggtgagtgttcgggttgtgatttcgattttggttttgcgttgttagttttggttttgtttattatcgtttggtttttttttttacggggttttttattttttttgtttattttttagcgttttttgtttcggtttgtttaaggttggggttcgcgggttcgtagagtattttttgtaggggttttttttttttagggtcgttttatgttgtaaagatcgtgtttttttttagttgttattgttaattatggtacgtatgatcgttggggttttatatgggtttttgttattagtttattttttttttttttggtttttttttttagattttaatttttttatttttttatttattttttttatttatgggattttttgtttgatttcgatttaggtttttattagtttgggaatgcgatgaggtttgtttgtttttatcgcgtagggattttggttatttgttgattatattttttttttttttagttttcgttattttttttttgttttttttttttttattttagtatagtttttttttttaaatttattttgttttttgaatattttttagagttatttttagtattattttttttttttgtgttatttggtatgggggataggatttttttgggtttttttgttttttttattttgttattttgttattttgttgttttgtttgtgtttcgttttttaagtaagcgtttgtttttggttggggtagtagattgtttatgaacgtagagaattgttttagtgtttttaaagttaagtttgagttggttttgttgggatttattgtatttttttttttgcgttggggtaagggggtggtggtagagtttttttttattttttgttttgtagtgagttttaggttttatggagggttttttaataaatggtcgttttataattgaggtttcgttatttatttagtttttggggttttttttattatttttggtttgggatgaaaagtgtttgggtttagcgaggtttattcggttttaattgagatggttagaaagagtattggggaggaggaggtagttaaagagagtaatgggtgacgtttagtgatttgttttgacgtttagtgattttgattatttttagggtttagttagagagagatttgttttatttatttgtttatatattaggttggttttttttagttagttagagaaagagattttttatttggaaatattattagaaatggttttgaattttatttttaatttttatagtttttaaattgttgttattttagtttgaaagttggaaggtagttgggattttttgtttatttatttagaaatagtcggaattattggtcgaaaaggaaggttagtttttggttttaaattttagtatttgagttttttgaatgtttttttttagaaaggtatgaaagttagggaattttatttttatacggatttaaatagtagaatttagagttatagagcgattatgaagaggtttgatatgttattaatgggtgggggttggggagggaaatgtttgtagttgagtgtttgatgatagaggagtaggtgggtagtgtttaaaaaaggtttgggtatgagtttggaggggatttggtcggggggggaggagtttaggtttttagtaggtgaggttagttgggaggtggaaggtagaggtaggtagttatatattgcggtagtttagttgaaagttggggagatgatagttttggaaaatttttaaggttattagatatatgtggtggggggtggaaagttatataagaaaaaggattttaagaaaaagattagaggttttggaaggaattattgatttttttagagtataggttagatatttaggaatgaatgattatggtaaaatagagttattatttattgggtatttaggttgtgttataggttaaatggttaggcggatagagatatttattttggtgatttttataacgggttgttatttaaattttttaaaggagttttttggtagaaatgatatttatgatatagatgatgttatagaggtaggatttatatttagatttatttattagtaaattttttggattttagaatttttcgattttgatattttttagtagttttttagatttttattttattatatttttttaatttaaaataataaaagttttatttatttgtgtttagatgtaaatttggagtttattttaaataataatataaatgaaattatgggattgttatgttagttatattttttttgatacgtattaaatatagtgtaattagataaatgaaatatttcgaaaattatgttatgttttgttaatgggattatgttatacgttgagaaacgttcgaagttgtatttttttttagaggtttttagagaaggaaataagatgaggaaggaagtttttttttgttttgaggcgttttgattttgagaggatggagttagataaaatttgtttttttagaagggtggggtaggggtaggggtagtagttaggttagtttgtagggggtatttggattttatttgttagacgtcggttcgattggggttaggaaaatgtttaggttttgggaggtattagttaagtattttgtagttttttgtggtattatttttgtgttagggtaggatagagttcgtttttttttaagaggttagggatttagaatgaattttggagtggagttgggggaatttatatttaaagatggtaaagttattgggagagttgagagggttaagaaaaaagattaaggtttaggttttggttaagttggaagaatggagagggagtagcggttttagggggtaggcgtttaggttagatagttaagtggggtttaggtcgtggttggtattggttgaagatatttttgggagttggtttataggggaaggggtagagttagtaaaagggagttttcgatttttaggatataagtagattttggtaaagagagaaaagtattttttaagaagattttagatgggaagaattagtgtcgtgtaatattttatggatgtttaagacggttaaatattttttgtgttttggtagttgtatgggtgtttaagaggttttattaaggtagttttttttttagcgtaatcgcgtttatagaaattcggagggttttatttgttttttttttatatttagtggtttttgggttgggtttttttttttgtttttattttacggttttttagttttttttgtaggtagggttttggggatagatagtcgaatagatacggtaggttttatgagtttttttagttatcgtagtgtcggtgttttgagaataggattgagtgatggtttttaattttagcgatggtgaggttgagttttgttattatagtaattttttaggtatattttgttttttaagttagggaggggttgtagcggggtttggggtataggcgaagagaagaaggatgtgaatttttggttggttttggaaacgttttttgtatagtttcgggttgtgcggtttggggaagagagaggggatcggtggtttagtttagataagggaggatggtttattcggtagggggttagtttagagaggggtggtggagtggtttattttagtgttggggtttagtttagattgtaggatgagttattttagtgttggggtttagtttagaatgggggtcgttttagttagtgttggggtttagtttagagttgtgttatttaggtaagtttagagtagggaatttaggttttattggaggaattagttagtttcgagtagggggtttagtttaggttgggtatttttgttttagaatttttaggatagttagattttaaaagggtagaaggtttgagattgttgttcggaggaagggggttttgtggttgggtttttttcgagagagattttaagttttttgtttaaattgatattttgttgttgtaattttttatttttagggcgagtttttagatttttgttttttgttgtggttttggttttttaaggggtgttaaggagttttttttatgaatttaaatggaatttggattagagtgagagttggtatttttcgtgtgggagatgtgggtagcggcggtaggttgtataggttagtagttggttgggttattattttttgttattttttgttgttagtaggggttttggatgtcgggtatatttaaagaggttgttattgattttttgttttttttgggatttggaaagaaggaggaagatggttaaggttgttttttttttttttatttttgggtttagtcgttcgttttcggtttggatttttatggtcgagagtagagttaagtatagggtaaggtttgagagaggttaaggatatttcgggatgttttttttttttttattttcgtataggagtaaaataaaagagttagatatatttatttttttttttaggatagtaggatttgggggttttatattgaaagggagtttaggggaggaggtagggtggtttttgtcgtttttcgttttaagtttttttttttagttgtttttttagcgaattaagggagttttggggtttttttagtttttaaggagtttttggttgttgtttgattttgaattttaatttttttttttttgtttagtgggtattgttttgggtatattaggcgttgttttttgtatagtttagtgtttattgaggaaggtagggtttggcgttttgggagtagtgaagttcgtggaaagggaagttagttttatcgtttcgttttggggtacgtaggttagttagagggatattttcgggagaatttttttattgttttttgttaagggagttttttgtaaattttggttagtttggagtaggtatttttaaaagtttttgtggtaattagttttttttttttggttttttgaggttattttaaggaagttgatttagaggttttgcgtttttttggttttttagtaaaaggaagattttaggggagagtttaagggggttggggattgatttgggattaggtagtagttagggtggggatttggagattattttttagttgtggttgtagttgtttttttgggtttatttggttgtacgttttttgggttatttgtatcgtatttttcgggggtttaaagttatagttagtattttgagtttttttggttagggggtagaaggtcgttagattattttattttatttattttttattttatttttttttggaagagataggaagtagaggtgagtgtggggttttttgattgaggttatttgttttttttttttattatttttttttttgtttgttttttttggtattggttttttttatgttttatttttaaatttgataagttaatagggttagtggtattagaggggatagagtttgggcgttttggttttttgagaggttagagaagggttatgttaatagtaaggtattttgtggagcgattttgtggggtattagcggatagttaggggttgggagtttagcgagtcggggaggtgtaggatttagtaatttttttttttttgttaagagtaaagggaaaacggattagattttttggattttttttaagtttggtatttttttgtttttttgtgtgggtgaaggtagaattttaagagggtattttttattttttttatttattgttgaattttgtgtggattatttggaggtttttaaggaagatgttttttgttataaaggttttatgattgaagttaggtatagtggtttatgttcgtaattttagtattttgggagattaaggtgggggaatttattgaggttagaagttggagattagtttgggtaatatagtaagattttattttaaaataaaataaaatatttaaataaaggttttgttagtgaaagtgttggatttggtgtgatttttaggtttaggtttttgggttagttggtggtttagttaggtatttatttaggatttttggttatttattgtttatttttttttcgtttggttatttattgtggggtttttttggttacggtttttttttatttgttatttattatttttttttttttttttttgagatagagttttatttttgttgtttaggttggagtgtaatggcgcgattttagtttattgtaatttttgtttttcgggtttaagtaatttttttgttttagttttttgagtagttgggattataggtatgtgttattacgtttagttaattttgtatttttagtagagatagggtttttttatgttggttaggttggttttaaatttttaattttaggtgatttgtttgttttagttttttaaagtgttgggattataggcgtgagttattgtatttagttattatttattattttttagttttatgagggtttttttttttgaatgttgagggaaagttttggagataggtagtgggggtggttttttataaggttatgtgggattattggtaggtagataattagtaatgttaaagggtaagtgtatagggtttttcggtggtagtaaatttaggaatattagggggttgaaggtagttttgtttatattggttattttggtgtattggatttagtattgaaattaatggttgagttggtagtgaagtagttaattttatgggatgtgggggtaggtaagtgattttagatttgattagtttttttttttgtatagtgggaataatagtagtttttattttatagggtgagaacgaagtatagaaaatatttagtaaggggttggttttttgtagttttaggtggtggttaaaaggataagtttataatgtaagaatttgttaggttgcgtatttaagatttgagtatttagtgtattttttatatttgtttttggggtttttttattattatttttttttttgagatagggttttattttgttatttagtttgtagtgtaatggtttagttacggtttattgtaggttttatgtttcgggtttgaataatttttttatttttgttttttgagtagttgggattataggtgtatattattatatttggttaatgtttttattttttgtagagggttttgatgttgtttaggttggtttcgaatttttgtatttaagtaatttttttaattcggttttttagagtattattatttttttgagaaagagttttatttttgtttaggttggagtgtagtggtgtgattatagtttattgtaattttaattttttgggttttaagtaatttttttgttttagttttttgtttagttgaaattgcgggtatgggttattatgtttagttaattttttaattgttttattttttgtagagattgggttttgttatgttgttaaggttggtttttaattttaggttttaagcgattttttaatttcggttttttaaagtattgggattataggtatgagttatcgttttcggttttttttatgtgtgtgtgtgtgtgtgtgtatatatatatatatatatatatatatatatatatttttttttttttttttttttttttttttgagatagagttttattttgtcgtttaggttggagtgtagtggtatgattttagtttattgtaatttttgttttttaagtttaagagatttttttgttttagttttttaaatagttgggattataggtatgcgttatcgtgtttagttaatttttgtatttttagtagagacggggttttattatgttggttaggttggttttaaatttttgattttaagtgatttgtttgtttcggttttttaaagtgttgggattatagacgtgagttattatgttcgatcgttttttatattttttttttttttttttttttttttttttagacgagttttgttttgttatttaggttggagtgtagtggtgtaatttcggtttattgtaattttagtttttcggatttaagtaatttttttgttttagttttttaggtagttaggattataggtatatattattattacgtttggttaatttttttgttttgttttggagatagagtttcgtttcgtcgtttaggttggagtgtaatggtatgattttagtttattgtaatttttgtttttcgggtcgaagcgatttttttgttattatgttcggttgatttttttgtatttttagtagaaacggggttttattatgttgattacgttggttttgaatttttgattttaagtgatttattcgttttggttttttaaagtgttgggattataggtgtgatttatcgtgtttggttttatttttttatttttagtagagatggggtttcgttatgttggttaggttggtttcgaatttttgattttgtgatttatttattttggttttttagagtgttgggattatagacgttagttattttatttagtttttttttttatattttatattttaatttagaaaataataggttgggtacggtggtttatgtttgtaattttagtattttgggaggttaaggtgggtagattatttgaggttaggagttcgagattagtttagttaatatggtaaaattttgtttttattaaatatattaaaattagttgggcgtggtggtaggtgtttgtaattttagttatttaggaggttgaggtaggagaattatttgaatttgggaggcggaggttgtagtgagttgagattgtgttattgtattttagtttgggtaataaagtgggattttattttaaaaaaaaaaataataataattaaaaaaaataaattggtcgggtatggtggtttacgtttgtaattttagtattttgggaggtcgaggcgggtggattacgaggttaggagatcgagattattttggttaatacggtgaaatttcgtttttattaaaaaaaatataaaaaattttttgggcgtggtggtaggcgtttgtagttttagttatttaggaggttgaggtaggagaatggcgtgagtacgggaggcggagtttgtagtgagcggagattgcgttattgtattttagtttgggcgatagagggagatttcgttttaattaattaattaattaattagttaatagatagataaataaaaaataataatagttgatatttatttggtattattattatacggggttattgtttaattttttttgttaagatgaatttatttattttttaaaattattttattttatagatgaggaaaattgaggtttagagaggtgagattagttatttaaagttatagagtttattagagattaggttgggttttgaattggattttgattttaagttttggtttttagttattttgttgggttgtgttttagtagagacgagaatgattgtttttaagtttgttttttgggttgttaagtggagataatggatataaggtaggttgtcgagtgagttagatgagatagtgtagatagtagtcggtatagggtttgtcggggaagttttaatattagttaggcggtgatgtttattttgggatattatggggtcgaggagtgggtatcgggcgagattttttttgaattagttttggagtaatgtttttgcgattgttacggagaggaatagggttagttgggggttaaggtgatagttgagttttttaagggtatttgttattcgagttttcgaggtttttattttaggttcggtttttttagagaaggggttagaggaatagttaaattttaaggttataaatatttcggttggcgtcggttttggttatggaatgtcggttagaattggggcgagtgggggtgggttggtttgtttgggtattttttttcgtttttttgcgagtgatttttgagattttttgtattttattttggatggagtggtagttggattttatttttttgtagtaagggaggtttaggttacggtttagttaaggttttagaggtattagaaaaaggttaggttttgggttggaattgtattttattttttattaagtatttttttagaaattatttgaatttatttcggtgagacgggcgtttttgtataattttttttttttttttttttagt

SEQ ID NO: 224 - DNA, 15224 bp, Artificial Sequence
  chemically treated genomic DNA (Homo sapiens)
attgaaagggagagaggggagagttatatagagacgttcgttttatcggggtgggtttaggtgatttttggggagatatttggtggaaagtggggtgtagttttaatttagagtttgatttttttttggtgtttttggggttttggttgggtcgtggtttgggttttttttgttatagagaggtgggatttagttgttattttatttaaagtggggtatagagagttttaggggttattcgtaggggaacggagggaggtgtttaggtagattagtttatttttattcgttttagttttgatcgatattttatggttagggtcgacgttagtcgaggtatttatagttttgggatttggttgtttttttggttttttttttggggaggtcgggtttgggatggaggtttcgggggttcgggtagtaggtgtttttggggggtttagttgttattttggtttttagttggttttgttttttttcgtggtaatcgtaagggtattgttttagagttggtttaagggaagtttcgttcgatgtttatttttcggttttatggtattttaaggtgaatattatcgtttggttaatgttgaaattttttcggtagattttgtgtcggttgttgtttatattgttttatttgatttattcggtaatttgttttgtatttattgtttttatttaataatttaggaaataggtttgaaaatagttattttcgtttttgttgagatatagtttagtaaagtggttaagggttaggatttggggttaagatttagtttagagtttagtttggtttttgatgaattttgtgattttgggtaattgattttatttttttaggttttagttttttttatttgtaaagtggggtggttttgaggaatgaatgagtttattttgataaagggagttgaatagtggtttcgtgtgatgatagtgttagataaatgttagttattattattttttatttatttatttattgattgattgattgattgattgattgagacggagtttttttttgtcgtttaggttggaatgtagtggcgtaattttcgtttattgtaagtttcgtttttcgtgtttacgttatttttttgttttagttttttgagtagttgggattatagacgtttgttattacgtttagagaattttttgtattttttttagtggagacggggttttatcgtgttagttaggatggtttcgattttttgatttcgtgatttattcgtttcggttttttaaagtgttgggattataggcgtgagttattatgttcggttaatttattttttttaattattattatttttttttttgagatggagttttattttgttgtttaggttggagtgtagtggtataattttagtttattgtaattttcgttttttaggtttagatgatttttttgttttagttttttgagtagttgggattatagatatttgttattacgtttagttaattttggtatgtttagtagagatagggttttgttatgttggttaggttggtttcgaatttttgattttaggtgatttgtttattttggttttttaaagtgttgggattataggtatgagttatcgtgtttagtttattattttttaaattgaggtataaaatatggggagagaggttgggtgaggtggttgacgtttgtaattttagtattttgggaggttaaggtgggtggattataaggttaggagttcgagattagtttggttaatatggcgaaattttatttttattaaaaataaaaaaatgaggttaggtacggtgggttatatttataattttagtattttgggaggttaaggcgggtagattatttgaggttaggagtttaagattagcgtggttaatatggtaaaatttcgtttttattaaaagtataaaaaaattagtcgggtatggtggtaggagaatcgtttcgattcgggaggtagaagttgtagtgagttgagattatgttattgtattttagtttaggcgacggggcgagattttgtttttaaaataaaataaaaaaattagttaggcgtggtggtgatgtgtgtttgtaattttagttatttgggaggttgaggtaggagaattgtttgaattcgggagattgaggttgtagtgagtcgagattgtattattgtattttagtttgggtgatagagtaagattcgtttaagaaaaaaaaaagaaaaaagaaaagaaaatatggggagcgatcgggtatggtggtttacgtttataattttagtattttgggaggtcgaggtaggtagattatttgaggttaggagtttgaaattagtttggttaatatggtgaaatttcgtttttattaaaaatataaaaattagttgggtacggtggcgtatgtttgtaattttagttatttgggaggttggggtaggaaaattttttgaatttgggaggtagaggttatagtgagttgagattatgttattgtattttagtttaggcgatagagtgagattttgttttaaaaaaaaaaaaaaaaaaaaaaaaaaaaatatatatatatatatatatatatatatatatatatatatatatatatatatatatagggagagtcgggaacggtggtttatgtttgtaattttagtgttttagaaggtcgaggttggaggatcgtttgaggtttggaattagagattagttttggtaatatagtaagatttaatttttataaaaaataaaataattaaaaaattagttgagtatagtggtttatgttcgtagttttagttaagtaggaggttgaggtaggaagattgtttaaagtttaggagattgaggttgtagtgagttatgattatattattatattttagtttgagtaagagtgagatttttttttaaaaaaataataatattttgggaggtcgagttggggggattgtttgaatataggaattcgagattagtttggataatattaaaattttttataaaaaataaaaatattagttaggtgtggtggtatgtatttgtagttttagttatttaggaggtagaggtgggaggattgtttaagttcgggatatagagtttgtagtgagtcgtgattgagttattatattgtaggttgggtgatagagtgaggttttgttttaaaaaaaaaagtaataataaaaaaattttaaaaataaatataggagatatattgagtgtttaaattttaaatgcgtagtttgatagatttttgtattatggatttgtttttttaattattatttagggttataagggattagttttttgttgagtattttttatgtttcgtttttattttgtggggtgggagttgttgttatttttattgtatagaggagaagattgattaggtttgaggttatttgtttgtttttatattttatgagattaattattttattgttaatttagttattggttttagtgttgagtttagtgtattagggtggttaatgtggatagagttgtttttaattttttgatgtttttgggtttgttgttatcgaggggttttgtatatttgttttttggtattgttggttatttgtttgttagtaattttatatggttttgtggggagttatttttattatttgtttttagagtttttttttagtatttagagagaagagtttttatggagttagaaagtggtagatggtggttgggtgtagtggtttacgtttgtaattttagtattttgggaggttgagataggtagattatttgaggttgggagtttgagattagtttgattaatatggagaaattttgtttttattaaaaatataaaattagttgggcgtggtggtatatgtttgtaattttagttatttaggaggttgaggtaggagaattgtttgaattcgggaggtagaggttgtagtgagttgagatcgcgttattgtattttagtttggataataagagtgaaattttgttttaaaaaaaaaaaaaagaaagtggtagatggtagatggagagagatcgtggttaagaaggttttataataaatgattaggcggagaggggataggtaatgaatggttaggagttttagatgggtgtttggttgggttattaattagtttaggggtttgagtttgggggttatattaaatttaatatttttattagtagaatttttgtttgagtgttttattttgttttgagatggggttttgttatgttgtttaggttggtttttaatttttggttttaatggatttttttattttagttttttaaagtgttgggattacgggtatgagttattgtgtttggttttagttatagaatttttgtgatagaaaatattttttttggaaatttttaaataatttatatagaatttagtagtgggtggggagggtggagggtgtttttttgggattttatttttatttatataagaaggtagagaggtgttaggtttgaagggaatttaaaaggtttggttcgttttttttttgtttttagtaaaaaggaaagaattgttgaattttgtattttttcgattcgttgagtttttagtttttggttgttcgttggtgttttatagagtcgttttatagggtgttttgttgttagtatggtttttttttggttttttaaaggattagagcgtttaggttttgttttttttggtgttattagttttgttagtttgttagatttggggatggggtatgggggaggttagtgttaggaggagtaggtagagagagggatgatgggggggaggggtaggtaattttaattaagaggttttatatttatttttgttttttgttttttttaggaaagggtagaataaagggtgggtgggatggggtgatttggcggttttttgttttttggttagggaggtttagggtgttggttgtggttttaggttttcggaaggtgcggtgtaggtagtttaggaaacgtatagttaggtgggtttagaggagtagttgtagttatagttggaaggtggtttttaagtttttattttggttgttgtttgattttagattaatttttagtttttttgggtttttttttggaattttttttttgttgagaaattaggaaaacgtagagtttttaagttagtttttttgggatggttttaggggattagggaggaggagttggttgttatagaagtttttaaaggtatttgttttaagttagttaaggtttgtagagggtttttttggtaggaggtaatgggaagattttttcgagggtgtttttttggttggtttgcgtgttttagggcggggcgataaaattaatttttttttttacggattttattgtttttaggacgttaggttttgttttttttagtgggtattggattgtgtagaggatagcgtttgatgtgtttagagtagtgtttattgggtagaggggaaagagttaaggtttaggattaggtaatagttagagattttttaggggttaaagaggttttagagtttttttaattcgttgaaagaatagttggagagaaaggtttggggcggggggcgataagagttattttgtttttttttttgaatttttttttaatgtggaatttttaaattttgttattttgagagagaaaatgggtatatttgatttttttgttttgtttttatgcgggggtggagaggggaaaggtatttcgggatgtttttggttttttttaaattttgttttgtgtttggttttattttcggttatgaaagtttaaatcggaaacgagcggttaaatttaggggtgggggagggggaggtagttttgattatttttttttttttttttagattttaaaagaagtagagggttagtggtagtttttttgagtgtgttcggtatttaggatttttgttagtaataggaagtggtagaggatggtaatttagttagttgttggtttgtatagtttgtcgtcgttgtttatattttttatacggggggtgttagtttttattttggtttagattttatttgggtttatagggaaaattttttgatattttttgaaaagttaggattatagtagaaagtagaaatttagaaattcgttttgggaatggggaattgtaatagtagaatattaatttgggtaaggggtttggggtttttttcggaaggagtttagttatagaatttttttttttcggataataattttagattttttgtttttttgaaatttggttgttttgggaattttggggtaggaatgtttagtttgggttgggttttttattcgaggttggttgatttttttagtggagtttggattttttgttttgggtttatttaaatgatataattttgagttggattttaatattggttggaacgatttttattttgagttggattttaatattgggatggtttattttatagtttgagttgaattttaatattgggatggattattttattatttttttttgagttggttttttgtcgggtggattatttttttttgtttgaattgggttatcgatttttttttttttttttaggtcgtatagttcggggttgtataggaggcgtttttagggttagttaggggtttatatttttttttttttcgtttgtgttttagatttcgttgtagtttttttttgatttaaggggtagagtgtgtttaggaagttgttatagtaataggatttagttttattatcgttggagttggaagttattatttagttttgtttttagggtatcggtattacggtggttgggaaggtttatgagatttgtcgtgtttgttcggttgtttgtttttagaattttgtttgtagggggagttagggagtcgtggggtgggagtaggaagagaaatttaatttagaggttattgggtgtggaggagggatagatagggtttttcgagtttttgtagacgcggttgcgttaaggggagagttgttttgataagattttttgggtatttatataattgttaaggtatagaaggtgtttggtcgttttaggtatttataggatgttatacggtattagttttttttatttagggtttttttggggggtgtttttttttttttgttaggatttgtttgtgttttggggatcgggggtttttttttattagttttgtttttttttttgtgggttagtttttaggggtatttttagttagtgttagttacgatttgagttttatttggttgtttgatttgggcgtttgttttttggggtcgttgttttttttttatttttttaatttggttagagtttgggttttagtttttttttttggtttttttagtttttttaatggttttgttatttttgggtgtagatttttttaattttattttagggtttattttggatttttggttttttgggaggaggcggattttgttttgttttggtatagagatggtattataggggattgtaggatgtttaattggtgttttttaaggtttgggtatttttttgattttagtcgggtcggcgtttggtagatgaaatttaggtgttttttgtaggttggtttggttattgtttttgtttttgttttatttttttaagagggtaaattttgtttaattttatttttttagaattagagcgttttaaagtaaagagggatttttttttttattttatttttttttttgggagtttttgggaggaagtatagtttcgggcgttttttaacgtgtgatatagttttattggtagaatatgatatgattttcgggatgttttatttatttagttatattgtatttaatgcgtattagagaaaatataattggtatggtaattttatgattttatttatattattgtttagaatgagttttaagtttatatttgaatataagtgagtaaaatttttattattttaaattaagaaaatatgatagagtaaaaatttgggaggttgttgaaaaatgttaaagtcggggaattttggggtttaagaagtttgttggtagatggatttggatgtgaattttgtttttgtgatattatttatgttatggatgttatttttattagagggtttttttggaaaatttggataatagttcgttatgaaagttattagagtaggtatttttattcgtttggttatttagtttgtggtatagtttagatgtttaataaatagtagttttattttattatgattatttatttttgggtgtttgatttgtgttttgagagaattagtggttttttttagagtttttgattttttttttgggatttttttttttgtgtggttttttattttttattatatgtgtttgatagttttgaaggttttttaggattgttatttttttaatttttaattgagttatcgtaatatatagttgtttgtttttattttttattttttagttggttttatttgttgggggtttgagttttttttttttcggttaagttttttttaagtttatgtttagattttttttggatattatttatttgtttttttgttattaggtatttagttataggtatttttttttttagtttttatttattggtgatatgttaggtttttttatgatcgttttgtgattttgagttttgttatttgaattcgtatgggaataaagttttttggtttttatatttttttgggagggggtatttaggaaatttagatgttggggtttgagattaaaaattggttttttttttcgattaatagtttcgattatttttgggtaagtggataggggattttagttgttttttagtttttagattggagtgataataatttaagagttgtaaaaattgggaatggggtttaagattatttttgatggtatttttagatagagaatttttttttttggttggttggaaaagattaatttaatgtgtgggtaagtgggtgaaataggtttttttttggttgagttttgggaatgattagaattattagacgttaaagtaaattattagacgttatttattattttttttgattgtttttttttttttagtgttttttttgattattttagttagaatcgaatgaatttcgttaaatttagatattttttattttaagttaggagtggtggaagaagttttagggattgggtgaatgacggagttttagttgtgaaacgattatttattgaggggttttttatggagtttagagtttattgtaagataggaaatgagagggggttttgttattatttttttattttaacgtaggaaagaggatgtaatgaattttaataagattagtttaaatttggttttggaagtattgaagtaattttttacgtttataaatagtttgttattttagttagggatagacgtttgtttggaggacggagtataagtagagtagtagaatgatagagtgataggatgagagaggtagagggatttagaaagattttgttttttatgttaagtgatatagaagaaaaaaataatgttggaggtggttttgggaaatgtttagggggtaggatgggtttggaagggggggttgtgttaaggtgaagagggaaagggtaggagaaagatggcgggggttggaggggggaggggtgtggttagtaagtggttaaggtttttgcgcggtggaggtagatagattttatcgtatttttaaattggtagaaatttgggtcggggttaggtagaggattttataggtgagagaggtgagtgaggaagtggggggattagaatttgggaagaggggttaggaaaggagggggtaggttggtgataggggtttatgtggggttttagcggttatacgtgttatggttggtagtgatagttgggggggagtacggtttttgtagtatggggcggttttaggggaaggggatttttatagggggtattttgcgggttcgcgggttttagttttggataggtcggggtaaggggcgttggggggtaggtagagaggatgaggggtttcgtagggggaggggttaggcgatgatggataaggttagggttggtagcgtagggttaagatcggggttatagttcgggtatttatcgtttttttgttcgttgttttttttggcggcggcggcgttgtttatcgcggcggcggcggtcggggtcggtttcggagttgcggcgcggcgggtgttggttgcggtcggcggtttcggagcgcgttgggcggcggcggcggcggttttcgggttggttgcgttagttgcggcgtcgcgattttcgtttagtttttgtttttcgcgttttttcgcgttcgttcgttcgggaattttagtttaagatttttgtcgttgtttgtgacgttttcgtagttcgtcgtttattggtttaggtcgttttgattgacggtttagcgtcgttttttattggttttttcgcgattttttcgcgttattataggtttttagtttcgggatacgtatcgcggattttcggttatttattcgttcgcgaggtcgtagttgggcgggtagacgcgttcgattggtcgagacgttggattgggttcggggttcgttttgcgaggtcgtcgattggcggaggtgtcgggttcgttaagttttttagtagaacgtttagtgttaattcgggggtgagagggcggggcggagacgtagtttgcgggttcgggtcggcggggcggggcggcggaggttggttggcggtcgcgtagcgtttcgaggtttaggaggcggtttcggcgggcgttcggtcggtttcgcgcgcgtcgtagtttttcgttttcgtttagtgcggtagcggttgtcggttagtcggagttggcgtcgcggtttgttcggcgtagtcgttgtttatttgttagcgggggaggggcgcggtcggcgcgcgggttagaggtcgttcggtcgtcgtcggcgttatttataaggtttggcgttgggcggtcgaggttaggtttgtttgggggttaggtcgcggggttttttgggtttttttagtcgtatttaggaggatgtcgggttcggcgtaaggggtggttgggaaggggcgtttagtgtttatttttttgttgggttttagttttgggtttttgttagtagtaagagttggtatttatttaacgttttttcgtattatatttttatcgcgtaggtgttattattattatttttattgtatagatgaggaatttggggtatagttaggtagattttttgtttttgtttttcgtttgtattttttgtttgggtaatgcgaagggaatttgtttttttttttaggatttttttttagtatatatttagtagaggatagtcggggttttttaattgcgatattattgacggtgaggttggattattttttgttggggggtgttttgtgtattattgggtgttgagtaatatttttcgtttttatttattggatgttagtagttttttttttatttttttgttggttgtggtaatcgttgttttttgatattggtgaatgtgtttttgcggggtcgaattgtttttgattgagaagtatttaagagagggttaggggaggggagaagttaggttatttcgattcggaagggttagttgggtttaattataagtcgatttgttgtttcgatttgaatagtttttattttttttagttgttgtttgtttttatgtttttagattaattatagttttagggagggagagttagagtttttttgtgaattatggggaaatggttgattatttcgtttttggatggatagatatatggtaaggtttagtaaaatttaataaaagtattgttgtttgtgtgttgggattacgatgttaattttttgtgggttaagggtaaagtttgaaaaattatttattataatttatttgtaggatagttggtttaagttttgataaagaaaaattttttttggaattttagtttggaatataattgtagaattaattaagattggagtaggaagttggaaagaagacgtgggatagttaatttattggatagggtaagaggttatttttgggggagagtggataaagttgttttagtttattagagataaaagtataaataattattttaaatgaagtgtttttaatttttagattaaatatttttaatataaaaatattttgataatatataaatagtaattataatagtatttatatggtagtaaggggattagggtatagagagggggagcgggttggggagggatagtttttagggttttagttgtttttttggtttgaaattattttggttttagtagaggataggttaaggttgttagaggtagagggtttttgattttggttcggagatagattgtttaggtaggttttttgatattattttttaattatggtagtttttaggaaaagttagatttatttaggagataataggaaggtggttgtgattgataggaaaggtaatatggttttttagtattttgttgattatatttttgggaggggttgttggattgaagaggatttaagaatttttttgggagtaggatagaaatgggatttaagtttatttattaattaatattttcgtttgtgatattagaaagttggagtgggtttgtttagatgtataggaagagaaaggaatgataaagtttttggtttagtaggattggagttttgataggtattgattaagaaagtttttaggtgggttagggaggtttgtgggaaagttttggattaatggtatttaagggtgtatagtggtatagtggttttagttagaatttatgaagacgaaaagaatataagttagaatttagaattgaagtatttgttttttataggtttgtagaggaaaagcgagattatttttttggttaggattaggggagatttaaggtttgtttttttttaggggttgagtttgatagatttggattgtagttgatggtttttaaagttttttagatgggttttgtaggattcgttgggaggtttggttgtttttttcggcgtgttgggatattttgggtttttgtagttagatgtagtttatggagtttttagggaggaggttagggatgtagttagggagttttaagtttttgataggagtgtagttgagtgggaggtcgtagtttagggaggggttttgggtttttatggtttttagtttgtttatgttgttgttttagttgatatggaagcgggttattcgggggttcgaggttaagatgtttcgttggagttggggtaggaagaggaacgttaatttttgtaggtacgttttttttttggttttatagagttaggatatttttaattatttattttaagtttagtaagagtaatttatatatggaattttagaaaatatttgtggttaggattttatttatttatttatttatttattttttgagacggagttttgtttttgttgtttaggttggagtgtaatgttgtgatttcgttttattgtaatttttgtttttcgggtttaagcgatttttttgttttagttttttgtgtagttgggattataggtgtaaggtattatatttggtttattttcgtatttttagtagagacgggtttttattatgttggttaggttggttttaaatttttgattttaggtgattttatagtttcggttttttaaagtgttgggattataacgcgtgagttattgtgtttggtttaggattttttttttttaagggatagttttattttgttggttaggttggaatgtagtggtacgatttgagtttattgtagttttaaatttttgggtttaagcgatttttttattttagtttttagagtagagtatattatttatgtttggtttatttttttttttttttttttttgcgggggttagggattagggttttattatgttgtttaggttggtttaattttaattttttaagatatgtttttgagagataaaggtttttttttttttttttaatatagtattgtaagaattgaatattatttgaaaattttaagaagtgattttgatttttaatttgaatggttgaattttttttaagtataaagaacggttttgtgggaagtaggaagtggaaataggttttatttgggagaaatttggttttatgggcgggtttttacgtagtttagggttgaggtattcgttgttgacgtagtagtttattcggatgaatttttgtttatggtaggtgtaggtgatgaggattatagttatatttacggtattagtttttgggatgagggatgggttgggggcgtcggtttaggggagatatattttaggttttagtagtgttatagttatgtttcgatgttattagtataaagatttttaagtattatgtatttattgagtaaaaagtatgttttttgtttttagtttttttttttttatttttgtttttcgggtttaaataattttgttttagtattttaggtagttgggattataggtatatattattatattcggttaatttttttttttttttggtatttttttttaatggagttttgttttgttgtttaggttgaagtgtaatggtgcgatttcggtttattgtaattttcgttttacgggtttaagcgatttttttgttttagtttttcgagtagttgggattataggtgtttattattatgttcggttaatttttgtatttttagtagagatggggtttcgttatgttggttaggttggtttcgaatttttgattttaggtgatttattcgttttggatttttaaagtgttgggattataggtgtgagttattgcgtttagttttttttttgtatttttagtatagacgggattttattatgttggttaggttggttttaaatttttgattttaggtgatttgtttatttcggttttttaaagtgttgggattataggtgtgagttattgcgtttggattttttttttttttatatagggtttggtttttttttgttatttaggttggagtgtaatggcgttattatggtttattgtatttttgaatttttgggtttaagtaatttttttgttttagttttttaaatagttgggataacggtgtgtgttaatatgtttagttaattattttttgtagagatagggtttttttatgttgtttaggttggttttaaatttttgggtttaagcgatttttttattttagttttttaaagggtt

SEQ ID NO: 225 - DNA, 6013 bp, Artificial Sequence
  chemically treated genomic DNA (Homo sapiens)
cgtatatttttttgtttttagaaaagagggtttagaagtaataatattttagtagatgaatgtatttatttgttagattttgatttttaagattattttttagtaaaaggaattaaggttttttggagaaatggatgattttaaaagggttggggtaggaaatatataaagtgagtatggggtattttgtagtgttagaaagtaaggatgtgtttaaatatatatataggtgtatatatatgtatatatatatagtgatggaggtatattaaagggatataggaggaagttgatggagttttttatggttaaaatggaataatttgattaataaaataaataatgtaatgttgtataaatgttataggtattaaaagagtaatgtgtatattagaaataattttattatataaagttgataatttagttgaaatagattattttttgaaagatgtaaattattaatatttattcgagatgaaattgataatttagtaatattttgtttattgaagatattgtattagtatttgtaatttttaaaaaaaattaaaaataaaaacgaaaaataaaatattgttttagatagttttgggaaattttataaaatatttaaagaagaaatgatattaatttttatagttttttttggaaaaatataagatagaatattttttaatttattttgtgaagttaattttaatttgttattaaaattatgtaaagatggtatatgaaaataaaattattaagtaatgtatttttatgaatataaatagaaaaatttttagtaaaatattagtaagttgaatttagtaatatatataaggaatattatattaagattaaaaggggtttattttgataatttaaagttggtttaatatttgaaaattaatttgtgtaatttattatattagtagattaaaaggtaaaaattatatgattttattaataaatgttgaaaatatattaggtaaaatttagtatttttttaagataattttttattaatttaggaaaaaaaaaggaaattttgttattttaataaggggtatttataaaatagtgtttatagttaatattttagtagttaatgatgaaaaattgaatgttttttttttaagatttggaataaggtaagaatgtttattgttattattttgtttaatattgtattgtaatttttgattaatgtaataaggtaagataaataaataaaaggtatatagattagaaataaatagtttttgttgaaagacgatatgattgtttatatagaaaattgtaagaaatttataaaaagaaagttttttaaaattgagtttagtaataataatatataaaaataatatatagtagtaatgtataatgtattagtttggtataaaagtaatagaggtttttgttattgaaagtaatggtgaaaattataattattgtgtatttatttaataaaatatttttaaagaattgtttataatagttttaatttttaaaatatttaggtataaatttaataaaattatgtgtaagatttgtgtgttgaaaattgtaaaatattgatgaaagaaatttaaaagatttaagtaaatgaagagatatgttatgattatggattgaaagatttaatatggttaagatgttattttttttaataagtataatttaaataaaattttagtaagattatatttgtagatatagataaattgattttaaaatttatatggaaaggtgaagaaattgtagtagttaaaataatttcgaaaaaaaggaaaaagggtcgggtattgtggtttacgtttgtaattttaatattttgggaggttgaggtgggcggattacgaggttaggagattgagattattttggttaatacggtgaaattttgtttttattaaaaataattaaaaaattagttgggtgtggtggtatgtatttgtagttttagttatttgggaggttgaggtaggagaatagtttgaatttaggaggcggaggttgtagtgagtcgaaatgatattattgtattttagtttgggcgatagattgagatttcgttttaagaaaaaaaggaaaaaaaaatagaagatttatattattagattttagatttattagaaagttatggtaattaagatagtatagtattggtgaaagaattgatatatatataggttagtgaaagagaatagagagtttagaaatagatttatataaatatggttaattgatttttgataaaggtgtaaatgtaatttaatagtaaatggatatataaattgtggtaattttatataatagaatttagttatataaatgagtgaatattaagatatataatatagataaattataattgttatattatattaaatgaaagaagttaatttgaaaatgttgtatagtttataagtttatttatatataatattttggaaaaagtaatattattattttaaaatttttatttgaatagtaggagttatagttatgttatttgttttttatatggagtatatatattatttatatattaaatatgtttttatgttttttttttatttaatttttaaattttaaagtatatagttttgtttggttttaagatgattgtaagaaatatggataatgaaattttatggttataggtgatcgttttaattaaaatttttttatagtagatttttagatttgggataatatatttaagaatgaattttatttattattatttttttattttaatttttttatttttatttggaaaataattgtatttaaaaataaaatgtttattttatgtggtaattagtgttttgtagtataagaaattttgatttaggagtttgaagatttaggtgattttgggtaagttatttaatgtttatttttttgtattttaaaataaggataataatatttgtgttgtttattttatttgtaaggattttaggtgtattatagtaattttataatggttttatagagtaaattattttatatgtggtaaagtgtttggtaaatgtgttattattattattaaataaaagaaattaatattttgtggtattttgtggtaattaaagttggtttaattttgaaaatttttataattttaaaaattaatgtagaatgaaggaggaataaaattaattttatgaagttgattattttttagttttaaaattttatttaattataagataagttattttggtaaattttcggtgtatggcgagatatttagtgcgaattaaagttgtggaaatatcgttaggaagaataataagtaatatattttttaaagttaattgtagttatgaaggaatttatagttttagttaaaattgtagttgtttttttttagtagtagatgttagtagagtttttttttttatttttattttttaattaaaaattaaatattcgaagtatttttatagtaatagttttttggttatattattatatatagaaatattgttttaaatattaaatattttattttttggaaggatttgataataaattgaaataattttatttttaaaatagtgtagatttaaaatacggtgtttttaagatatttatttagtgaagtttattttttttgttttagtaattttgttttaaagtttatgtattgttttaaataaagtaattttagtgttttagttaggaatttgtaatttttgtatttgagtaatattgaatataaataaaaaatttggttagatgtgttaaaaatgaatacggtttagttgaaatgttacgattagtttgtgtatttggtaatggaatattatgagtgtaatattttggggaggttaatatgttagagaggtgaatgattaaagggggtaattggaagcggggaaaataagaagttaagaagtttatattggtattgagtaaaaatgtaatttaaagaatgaataaaatttagtaataaatagaaaaaaggagaagtttaatgataatagttttattatttttgtttttatatatgagtaatttggtgttttttggattatttataaatatggttttattataaataaaatttaaatatttttaagtattcggtgattttatttagatttttaaattgttaaaaatgagtgaatattttttttttttaatatgtttattgagtatgtaatatatgtattttatttatgaatttaagtaatttataatttagggttatataaatttataaatagtattttttaatataatattatgaggttagtgaaaataaagtagtaaagtttgtttttttaggaagtatgtggtagattttattgaagaggtgatatttgaattaagttttgaagatgattagaattttttttagtagagtaaattaagggaatttagtaattttatttatttttttttttatagaattagtttatgttttgtagatatttgttgaagattatagatatttaataagtgtttgttttgtgtaaggtattattagatgttaagaaataaattattgttatgtatatataatatttatatataaagttataaatttaagaattttgttatatagatgttgttgtatatttgtttagattgataaaaattttattatataaaataaagtatatagaaatgagttgttatatggtaaaatttattggttagtgttttgttaattgttatttatatataatatttatatataaagttataaatttaagtttattttatagatattgttatatatttgtttagattgatatgaattttattatataaagtatatataaatgaattgttaaatggtaaaatttattaattagtgtttttttattggttttttatgtagttttaatttgattatattattgtttttatttattttatttattagtattgtttttattttttatgtttgttaaatagttggtagtaaatttgaagtaagatttttttagatagattgttttagatagatttttttttttttttttttttttttttttttttttttttttttttgtttttaaagagaattacggaaattttttattttttagtgttaaaaaaataagtatttaaaatttttgttaaatgttataggttatttttttttttgaaaattgataaggtaagttttatttatttttaattaaaagagatgttttggttaggcgcggtggtttatatttgtaattttagtattttgggaggttaaggcgggcgtatcgtttgaggttaggagtttgagataatttttggtttggttaatatggagaaattttatttttattgaaaatataaaaattagtcgggtatggtggtgcgcgtttataattttagttattcggatgtttgaggggcgagaatcgtttgaatttaggagcggaggtcgtagtgagtagaggtcgtattattgtattttaatttgggagatagagtgaaataacgtttaaaaaaaaatagagaggtgtttttaagtgagattattaaattaggggtttaggtaagtagtagtttttagtggtaaggttttaaaattaatatgttttagttaattagaaggaattttttttttttaattgaaattttttgttatggtggattttatataatttaaattttgtattttgttttttttaaattttagaatgttttaaaatgtatttttggtaatagatatatgttagtagattataagtttgataagtaatattgatatattaagtgtatgtagtttttgtatgtattaggtttaaattaatgaattagaaatatttaattttttaaagtgttattttatattgttttatttatacgtgttataaatttgttttgtaagagtttttttatatttattttatattagtttttttttatgaaaagttagttgtttataaggatttataaaatttgtatattagttgattttttagaaaaaatataatttgtttttagtatgttgtgtttggaggatagtttggtttttagttgtttgtatagatttgtt

SEQ ID NO: 226 - DNA, 6013 bp, Artificial Sequence
  chemically treated genomic DNA (Homo sapiens)
gataagtttatgtaaataattgaaggttaagttgttttttaaatataatatgttaaagataggttgtattttttttaggaaattaattaatatatagattttatgaatttttataagtagttaattttttataaaaaaaaattagtatgaaatgggtatgaaaaaatttttgtaaaataaatttataatacgtataaataaaataatgtgaaatagtattttaaaaaattgaatgtttttaatttattgatttaggtttaatatatataggaattatatatatttagtatgttagtattgtttattaaatttataatttgttgatatatgtttattattaggggtatattttaaaatattttaaaatttgaaaagaataaaatataagatttaaattatataaaatttattatagtaagaaattttaattgagagaaaaaagttttttttagttggttgagatatgttaattttaaaattttattattgaagattattatttatttaaatttttgatttagtgattttatttagaaatatttttttatttttttttaaacgttgttttattttgttttttagattggagtgtagtggtgcgatttttgtttattgcgattttcgtttttaggtttaagcgattttcgttttttagatattcgagtagttgggattataggcgcgtattattatgttcggttaatttttgtatttttagtagagatggggtttttttatgttggttaggttaggagttgttttaaatttttggttttaagcgatacgttcgttttggttttttaaagtgttgggattataagtgtgagttatcgcgtttggttaaaatattttttttgattaaaagtaagtaaaatttgttttgttaatttttaggaaagaaagtaatttgtggtatttaataaaaattttgagtatttgtttttttgatattaaaggataagaaattttcgtggttttttttggaagtagaggggaggggagggaagggaaggaaaggaaagaaagaaaaaggtttatttaaaataatttatttaaaaaaattttattttagatttattgttaattgtttgataaatataaaaaatagaaataatattgataagtaaaataaataggaataataatgtaattaaattaggattatataaaaggttaataagaaaatattgattagtgaattttgttatttaatagtttatttgtgtatattttgtgtaatggaatttatattaatttaaataagtatgtaatagtatttataagataaatttaaatttatagttttatgtataaatattatgtgtgaataatagttaataaaatattgattaatgaattttgttatgtaatagtttatttttgtatattttgttttgtgtaataaaatttttattaatttaaataaatatgtaatagtatttatatgataaaatttttaaatttgtagttttatgtataaatattatgtgtgtataataataatttgttttttaatatttggtagtgttttatataaaatagatatttattaaatgtttgtagtttttaataaatatttatagagtatggattgattttgtaagggaagaagtggataaaattattgaatttttttgatttgttttattgaaggaaattttaattatttttaaggtttagtttaaatgttatttttttagtgaagtttgttatatattttttaggaaaataaattttgttgttttgtttttattgattttataatattatgttaaaaggtattgtttatgaatttatatgattttaaattgtgagttatttgaatttataaatgaaatgtatgtattatatatttaataaatatgttaaaagaaaaaagtatttatttatttttaataatttaaaggtttaagtagaattatcgaatatttgaaaatgtttgaattttatttatgatgggattatatttatagataatttaagaagtattaagttgtttatatatagagataagagtaatagaattgttattattgaatttttttttttttttatttgttattaaattttatttattttttgaattatatttttatttagtgttaatgtggattttttaattttttgtttttttcgtttttaattattttttttaattatttatttttttgatatattaatttttttaaagtattatatttatggtattttattgttaaatatataaattaatcgtaatattttagttggatcgtatttatttttaatatatttagttagattttttatttatatttaatgttgtttaagtatagaagttgtagatttttaattagaatattaagattattttatttaaaataatgtataagttttaaaataaaattattaaagtaaaaagagtaaattttattagatgagtattttgaaaatatcgtattttaaatttgtattgttttaaaaataaaattgttttaatttgttattaagtttttttagaaaatagaatatttaatatttaaagtaatgtttttatatgtggtaatgtgattaggaagttattgttatagaagtatttcggatatttgatttttgattaagaaataaaaataaaaagaagaattttattggtatttattgttagaaagaaataattgtagttttaattaaaattatgaatttttttataattgtaattaattttaagaagtatattgtttgttattttttttagcggtgtttttataattttaattcgtattaaatgtttcgttatgtatcgagaatttattagaatagtttattttgtagttaaataagattttaaaattagagagtaattaattttatgaggttgattttattttttttttattttgtattaatttttaaaattatagaaatttttagagttgaattagttttaattgttataaaatattataaaatattggttttttttatttaataatagtgatgatatatttattaagtattttattatatataaagtgatttattttgtaaaattattgtgaaattattgtaatgtatttgagatttttataaataaagtaagtagtataggtattattatttttattttaagatgtaaaaaaataaatattaagtgatttgtttaaagttatttaggtttttaaatttttagattagggttttttgtattgtaagatattgattattatatgaagtaaatattttatttttaaatgtagttattttttaaataagagtgaagaagttggggtgaaaaaatagtggtgggtaagatttatttttggatatattgttttaggtttgaaaatttgttatgagaaggttttaattaagacggttatttatagttataaaattttattgtttatgttttttataattattttggggttaagtagaattatgtattttagagtttaaaggttaaataaaagaaaaatatgaaaatatatttaatgtgtaaatgatgtatgtgttttatgtagaggataaatgatatgattataatttttgttatttaaataaaggttttagggtaatagtgttgttttttttagaatgttatatataagtggatttatagattatgtaatatttttagattggttttttttatttagtatagtatggtaattgtgatttatttatgttgtgtattttaatatttatttatttatatggttaaattttattgtatggaattattataatttatatatttatttattgttgaattgtatttgtatttttgttaaaaattaattgattatatttgtgtgagtttatttttggattttttatttttttttattgatttatatatgtgttaatttttttattaatattatattgttttgattattatagttttttagtaagtttgaaatttgatagtgtaaattttttatttttttttttttttttttttgagacggagttttagtttgtcgtttaggttggagtgtagtggtgttatttcgatttattgtaattttcgttttttgggtttaagttatttttttgttttagttttttaagtagttgggattatagatgtatgttattatatttaattaattttttaattatttttagtagagataaagttttatcgtgttagttaggatggttttaattttttgatttcgtgattcgtttattttagttttttaaagtgttgggattataggcgtaagttatagtgttcggtttttttttttttttttcgaagttgttttggttattatagtttttttatttttttatataaattttaagattagtttatttatgtttataaatataattttgttgggattttatttggattatgtttattggaagaaatgatattttaattatattgagttttttaatttataattatagtatgtttttttatttatttgggttttttgaattttttttattagtgttttatagtttttaatatatagattttgtatataattttgttagatttatatttaagtattttaaaaattggagttattgtaaatagttttttaaaaatgttttattagatgggtatatagtaattgtggtttttattattatttttaatggtaaaaatttttattatttttgtattaaattaatatattgtgtattgttattatatattatttttatatattattgttgttaaatttagttttaggagattttttttttatagattttttgtaattttttatgtaggtagttatgtcgttttttaataggaattatttatttttaatttgtatgttttttatttatttgttttgttttattgtattggttaagaattatagtgtaatgttgaataaggtggtgataatgaatatttttgttttattttaagttttaggaagaaagtatttagttttttattattaattattaaaatgttagttgtagatattgttttgtagatgttttttattgagataataaagtttttttttttttttttgggttagtgaagagttattttaggaggatgttgaattttatttaatgtgtttttagtatttgttgataaaattatgtggtttttattttttagtttattaatatggtgggttgtatagattaatttttaaatattgaattagttttgaattattagaatgaattttttttggttttggtgtaatattttttgtatatattgttggatttaatttattaatattttattgaggatttttttgtttgtgtttataaagatatattgtttggtagttttatttttatgtgttatttttgtatgattttggtagtaggttaagattggttttataaaataagttgagaagtattttgttttatatttttttagaagaaattgtgagaattggtattattttttttttaaatgttttgtagaattttttagaattatttgggatagtgttttgtttttcgtttttgtttttgattttttttgaagattataaatattaatataatgtttttaataaatagagtattattgagttattaattttatttcgaatgaatattagtagtttgtattttttaagaaatggtttattttaattaagttgttaattttgtgtaataaagttgtttttaatgtatatattatttttttaatgtttgtagtatttatataatattatattatttattttgttggttaaattattttattttgattatgggaagttttattaatttttttttatgtttttttgatatatttttattattgtgtatgtgtgtatgtgtgtatatttgtgtatgtgtttgagtatatttttattttttagtattgtaagatgttttatgtttattttgtgtattttttgttttagtttttttagaattatttatttttttaaggagttttagttttttttattggagaatggttttagaaattaagatttggtaagtgggtatatttatttattggggtgttgttgtttttaggtttttttttttgagagtaaggaaatatacg

SEQ ID NO: 227 - DNA, 6487 bp, Artificial Sequence
  chemically treated genomic DNA (Homo sapiens)
tgtttaagttattgattttgtttttttggtagttatatataagtaagttgatgggtttgtttaattttttggtgtgaaaataaatttgatagtattttttttattttaatgttgagtttttagagtttatttgttattgtttttagtttgattttttgagaaattggtgtaaattgttttgtaaatttataattaaagaattagtattagtgatgtttttttaaggaatatgagatatatagtttttataagttattgtttaaaaggtttaaaatgaaatattttgaaaatgaaagtaaaagaaattataaaatattattaaaaaggttatgtggtagtgaataaaagttagaatatgatttgagaagtgaatatttgttttgagaataatgttaatgtaatgggaatattaggattaagttttatttttttaggttatggttattgatttaagaattgatgtaaatgaaaattattaaagagttgtttgtaaagatgttttaagtttaataagttttgttttagtattatattattgtaaattttttaggatgaaaaagattatataggttatttaatttaattacgtattttatgtttgaaattattgttatatttttaaagaaatgagaattatataattttggtattgtggttgatgatagagagttatttattatgttttatataataaatttataagaagaaataaatgaatttggaaatataaaatggtattaataagatatggtttttaataatgtttggaaaagtagtgttttttttaattttgttatttttagggaaaaggtattagatattgtggtagagattgataattatttttagattttttttttttttttttttttttgagataaggttttattttattatttaggtcggagtatagtggtataattatagtttattgtagttttgatttttttgggtttaggcgtttattttattttagtttttcgaatagttacgattatatgtatattattaagtttggttaatttttgtatttttttatagagatggagtttttttatgttgtttaggttggtttcgaatttttgggtttaagcgatttattttttttggttttttaaagtgttgggattataggagtgagttattgtgttcgtttagatttggttttttttaatttttaaatgtttatttggtacgtgattgtttaaaataaatattatatttttaaatttttttaatagttattggttttagttgttattgttgtgtaatagattattttaaaatttagaggtttataataatttttttattatgtttatagattttgtggaataaggttttagttagggtatttagtatagggttggttttttttattatgttgatttgatttttataatgttttattggttaaagaaattataagtatatttagatttaaggggaggggaaataagattttaatttattagtgagtagtggttacgttatattgtaggagatattgttgtagtcgtttttggaaaatgtaatttgttatattaaaggtgtggttatgttgattaagttttagttaagaggatagaagaggaattgtgtttaattttttagaaggaagggaggggaggggagtttttttttttttttttattttttttttagttaaaatatgattggttttggagtagttattttggattatagataggattatagagtaatgagttggagggagtttgggtttttgatgattatggagtattatattgtgttcggaattggtgggtttttggttttattgattttaagaatgaagtcgtagattttcgcggtgagtgttacggtttttaaaagtggcgtgtttagagtttgttttttttgatgttcggatgtgttcggagttttttttttttggtgggttcgtggttttattggtttaggagtgaagttgcggattttcgcggtgagtgttatagtttttaaggcggcgtatttggagtttttttcggtgggttcgtggtttcgttggttttaggagtgaagttgtagatttttatggtgagtgttatagtttataaaggtagtgtggacgtaaagagtgagtagtagtaagatttattgtaaagagtaaaagaataaagtttttatattgtggaaggggattcgagttggttgttattattggtttaggtagtttttttttatttttttatttggttttatatatattttgttgattggtagagtttagtggtttgttttgatagggtattgattggtgtgtttataatttttgagttagatataaaggttttttatgttttattagattagttagatatagagggtttatataaaggatttttacgtttttattagaatagttagatatagagtggcgattagtgtatttataaattttgagttagatatagggtgttgattggtgtgtttataaattttgagttagatatatagtgtcgattggtgtatttataattttttagttagatataaaggttttttacgtttttattagatttaggagtttagttggttttatttagtggatttcgtattggggttgtaggtggagttgtttgttagtttcgcgttgtgcgtttgcgttttttagtttttgggtggtcgatgggattgggcgtcgtgaagtagggggcggcggtcgtcggggaggttcgggtcgtataggagtttacggagtgggggggaggtttaggtatggcgggttgtaggtttcgagttttgtttcgcgggaaggtagttaaggtttgcgagaaattgagtatagtagttgttagtttaggtgttaagtttttgattgttcggggtcggtgggttcggtcggtcgtttcgagtgcggggtttgtcgagtttacgtttattcggaattcgcgttggtttataagtattacgcgtagttttagttttcgttcgcgtttttttttttatattttttcgtaagttgagggagttggtttaggttttggttagtttagaaaggggtttttatagtgtagcggtaggttgaagggttttttaagcgttgttaaagtgggagtttaggtagaggaggcgttaagagcgagtgcgggttgtgaggattgttagtacgttattattttttaatattaattttgaattgtttatatttagattttagagaaataaattttaagttattgtatttcgtattttttgttatatgtgagtagtgtttattataattaatataaatattattataaatttagataggtgatatatatgtattttagattattagattcgtaaaaataataatgtttatacggtagagagtagtattaatattgtgttttaatcggtgatatgtgaggtttattatattttataaaagtttaattttttttttttttttttgagacgaagttttatttttgttttttagtttggagtgtaacggtattgtacgatttcggttgattgtaattttcgttttttggatttaagcgatttttttgtttaagttttttgagtagttgggattataggtgtttgttattatgttcgttaatttttgtatttttagtagagatggggttttattatgttggttaggttggttttgaatttttgattttaggtgattcgtttatttcggttttttaaagtgttgggattataggtatgagtgagttattgcgttcggttaaaagtttaatttttaaaatgttcgatataattagaagtatttaattattgtatatttaaagtaacgtaatattattattataaagttgttaagaaatgaaaatagagaaatatattggtttatggagttaatataggatgtattattaataaagggttaatattaagatttatttttataagagggattagttcgttatatttttgatttttagatttggagtttttttagttatgtgtttattttttcgtgggtgggaagataaattagaataattaagtgagtttgtttttgaaatattttatttataatgatatgataattgtagaaaatgaagtatgcgtatttaaatagaatttaattgataaaagataattttttttattttaaaattgtaaatatttgtaaagtaagttttattttaaagttaaagttttttattttaaaagtatatattagtaattttatttttttttatattgaagtattttaatttttggatatataagttaaaaattatttaaagtataaaggaaagttttaaaataataagcgttttattttgtattattttatttaaaagagattaattaattttgataggtgttttttaataaatggtgtttttgttttaataaatagtaaatgcgtggagtgtataacggaatagtattagtaagacgaaatataataaataggatggatcgggaaaggttggataaaatgtggggaagaaaaagaaagacgttataaagatggggtagtatttttttgtttaaaagagaattagtattattataagattttaaataaaggatattagtaatatttattatgtaattagattttagaaggaaaataaaatgttattattaaggtggaggttgaagttttaagataaattttttggtattatttttgcgggggtttattatggcgaatgacgtttgggaagcggggcgagtggttagttcgtttttggacgcgcggataggtggatacgaaggcggtttcgttgggttttttttcgtttttttcggttcgggcgcgtagttttgcggtggtttgataggcgggtgcgcggcgttagttagcggaggttgttatggttttcgggggttacgtgggcgcgtttttttgcgttttttttcgcgtatcgcggcggggcgggggcggggcgttcgggcgggggagaggcgcggtcgcggttggagcgggaggagtaggagatgttgttagttttttcggggtcgcgttcgtttagtcgtcgttattatacggagtagacgcgcgtcgggagtcgcgggtcgggttagtcgggtcgtcggggtttagtgcgtcgcgttcgtagtcggtagcgcgttagcgtcgtaggcgttcgttcggtagtcgcggggttttaggtcgtgtcggggagggggcgagggcggcgtttaggcgtttgtcgtttcggaggtaggatgagtatcgagatttcggcgggattgacggagttgttgtagggttttacggtggaggtgttgaggtattagttcgcggatttgttggagttcgcgttgtagtattttattcgtttgtagtaggagaacgagcgtaaaggtatcgcgcgtttcggttatgagggtaggatttggggggatttgggcgtcgttgtcgggggcggtatttttagtaagggggttaatttcgtcgaggagtttatgtagttcgatttcgaggacggggaggaggaggaggcggcgttcgcggacgtaggggcgtttaatggtgaggattagattttttatttcgcgttttcggattttttcgttgttttttatcgtttttcgttgtgttttcggattttgtcgttttgcgtatttattttttttcgtattttttatttttttttatttttttatttcgtttatttttttagtatttatttttgttttttttattcgtttatttttttatttcgttttttgttatatttttttttttttttttagaggtgggagagttgggatgttacgttttttttttattttttgttttttttgtttgggtcggttggggtgggtatttgttagaaagataattttcgttgtggttggaggtatttcgtttagaggatattattgtgtataaagaaattggttcgtttggcgtttttttttagtttttgtatttattaatggaatgtcgaaagagaaaaggagaatcgtgtttaatatgattggttttattgttgttaggacggtagattcgttaaaagaagtatgaaattggatttattggggtagaataaaatttatggttagtagttttgatatttttggaaataagagttatttattattttttaatttattaatatcgtgttgtgttatttttggatacgtaataaaggattttatttagtttgaaatttacgggggtttttggaacgaggaaatgggttaatggtttgttttttatataaaagatatattgaatgatttggtgttttatttttttaaaagtgtatgagaaaaatattgtaggaagttttgaaagtttgttggttgtttttagaatgaaaagttagtgagtaattgtaaggattgtgttagatagtagagttagaaagaatgaatgggaaagaaaaaggaatttttttaaatagttgtttttggtaagttttattttttttgtttataattttttttttttaatatatttagatatatatttttatttatagttttttgtattatataatatgtttaaattttatttttatggtaattt

SEQ ID NO: 228 - DNA, 6487 bp, Artificial Sequence
  chemically treated genomic DNA (Homo sapiens)
gggttgttataaaaatgagatttgggtatgttgtgtaatataaggggttgtaaatgagggtgtgtgtttgggtgtgttagggaaagagggttgtaagtagaaggggtgggatttgttaggagtagttatttgagaaaattttttttttttttttatttattttttttagttttattgtttggtataatttttataattatttattggttttttattttaaagataattaataagtttttagaattttttatagtgttttttttatatatttttaaaaaaataaagtattaaattatttaatatgttttttatataaaaagtaaattattaatttattttttcgttttaaagattttcgtgggttttagattaaatagaattttttgttacgtgtttaaaaataatataatacggtattggtaaattggaaaataatagataatttttatttttaagaatgttagagttattggttataaattttgttttgttttagtgagtttaattttatgttttttttagcgaatttatcgttttaataatagtaaagttaattatattaaatacggttttttttttttttttcgatattttattaataaatataagggttgaaagaagacgttaagcgggttagtttttttatgtataatggtattttttaagcgaaatatttttaattatagcgaaagttgtttttttagtagatgtttattttaatcggtttaggtagagggggtaaagggtaagagggaagcgtaatattttagtttttttatttttagaggaagggaagagggtatgatagagagcggagtaggaaggtgggcgagtgggagagatagaaatggatgttgagggggtgggcgagatgggaaggtagggaaaggtggagaatgcggggagaggtgggtgcgtaaagcggtaagattcgagagtatagcggggagcggtggggggtagcgaggggattcgggggcgcgaagtggggggtttggtttttattattgaacgtttttgcgttcgcgggcgtcgtttttttttttttttcgttttcggagtcggattgtatgggtttttcggcgaagttgatttttttgttgggggtgtcgttttcggtagcggcgtttaggtttttttaggttttgtttttatggtcgaagcgcgcggtgtttttgcgttcgtttttttgttgtaggcgggtgaagtgttgtagcgcgaattttagtaggttcgcgggttggtgttttagtatttttatcgtgaagttttgtagtagtttcgttagtttcgtcgggatttcgatgtttattttgttttcggggcggtaggcgtttgggcgtcgttttcgtttttttttcggtacggtttagggtttcgcggttgtcgagcgagcgtttacggcgttggcgcgttatcggttgcgagcgcggcgtattgggtttcggcggttcggttggttcggttcgcggttttcggcgcgcgtttgtttcgtgtggtggcggcggttgagcgagcgcggtttcgggagggttggtagtattttttgtttttttcgttttagtcgcggtcgcgtttttttttcgttcgggcgtttcgttttcgtttcgtcgcggtgcgcgggagggggcgtaggagagcgcgtttacgtgattttcggaaattatggtaattttcgttggttggcgtcgcgtattcgtttgttagattatcgtagggttgcgcgttcgggtcgggagaggcggagggaggtttagcgaggtcgttttcgtgtttatttgttcgcgcgtttaggagcgggttggttattcgtttcgttttttaggcgttattcgttatggtgaattttcgtagaggtggtgttaggagatttgttttgaaattttagtttttattttagtagtggtattttattttttttttagaatttagttgtatgataagtgttgttaatgttttttgtttaaagttttatggtggtattggtttttttttggataaagaaatgttattttatttttgtgacgttttttttttttttttttatattttatttagtttttttcgatttattttgtttattatgtttcgttttattgatgttatttcgttgtgtattttacgtatttattatttattgagataaaggtattatttattgagaggtatttattaaagttagttgattttttttaaataggatagtgtaggatgaggcgtttattattttgaaatttttttttatgttttgaatgatttttgatttgtatgtttaaaaattgaaatattttagtataaagaaaaatagaattattaatgtgtgtttttaaagtagaaggttttgattttgaaatgaggtttattttgtaaatgtttataattttgaagtagagaaaattgttttttgttaattaaattttatttaagtacgtatattttattttttataattattatattattgtaaataaaatattttaagagtaagtttatttggttattttgatttatttttttatttacggaagagtaaatatatgattggggaaattttaagtttagaaattagagatgtaacgaattagttttttttgtaaaaatggattttgatgttaattttttgttaatgatgtattttgtattgattttatgagttaatgtatttttttatttttattttttaataattttatagtaataatgttacgttgttttaaatatatagtagttaagtgtttttaattgtgtcgagtattttaagaattaaatttttggtcgggcgtagtggtttatttatgtttgtaattttaatattttgagaggtcgaggtgggcggattatttgaggttaggagtttaagattagtttggttaatatggtgaaattttatttttattaaaaatataaaaattagcgggtatggtggtaggtatttgtaattttagttatttaggaggtttaggtagaagaatcgtttgaatttaggaggcggaggttgtagttaatcgagatcgtgtagtgtcgttgtattttaggttgggggataagagtgagatttcgttttaaaaaaaaaaaaaaagaattaaatttttataaaatatggtgagttttatatgttatcggttggagtataatgttagtattattttttatcgtgtaagtattattatttttacggatttggtaatttaagatgtatgtgtattatttgtttaaatttgtgataatatttgtattaattatgataaatattgtttatatgtggtagaaaatgcgaaatataatagtttaagatttatttttttggaatttaaatgtgggtagtttagagttggtattgagaggtgatagcgtgttggtagtttttatagttcgtattcgtttttggcgttttttttatttgggtttttattttggtagcgtttgaggagttttttagtttgtcgttgtattgtgggagtttttttttgggttggttaaggtttgagttagtttttttagtttgcggggaggtgtggagggagaggcgcggacgggaattggggttgcgcgtggtgtttgtgggttagcgcgagtttcgggtgggcgtgggttcggtagatttcgtattcggagcggtcggtcggatttatcggtttcgggtagttaggggtttagtatttgggttagtagttgttgtgtttaatttttcgtaggttttagttgttttttcgcggggtagggttcgggatttgtagttcgttatgtttgagttttttttttatttcgtgggtttttgtgcggttcgagttttttcgacgatcgtcgttttttgttttacggcgtttagttttatcgattatttaagggttgaggagcgtaggcgtatagcgcgggattggtaggtagttttatttgtagttttagtgcgggatttattgggtgaagttagttgggtttttgagtttggtggggacgtggagaatttttgtgtttagttaagggattgtaaatatattaatcggtattatgtatttagtttaaggtttgtaaatatattaattagtattttgtgtttagtttagggtttgtgaatgtattaatcgttattttgtatttagttattttggtggggacgtggagattttttgtgtggattttttgtatttagttaatttggtgggatatggagaatttttgtgtttagtttagggattgtaaatatattaattagtgttttgttaaaatagattattgggttttattaattagtaggatgtgtgtggggttagataagagaataaaaggaggttgtttgagttagtggtggtaattagttcgggtttttttttatagtgtggaagttttgtttttttgttttttgtaataaattttgttattgtttattttttgcgtttatattgtttttatgagttgtaatatttattatgaaggtttgtagttttatttttgaagttagcgagattacgagtttatcgggaggaattttagatgcgtcgttttaagagttgtaatatttatcgcgaaggttcgtagttttatttttgagttagtgagattacgaatttattagaaggaagaaatttcgaatatattcgaatattagaaggaataaattttggatacgttatttttaagaatcgtaatatttatcgcgagggtttgcggttttatttttgaagttagtgagattaagaatttattaatttcggatatagtgtggtattttatgattattagggatttaggttttttttagtttattgttttatgattttgtttgtggtttaaaatggttgttttagggttagttatattttagttaagaggaaagtgaaaaagagaagggaagtttttttttttttttttttttttaggaagttaaatataattttttttttatttttttggttagaatttagttaatatggttatatttttggtgtggtaaattgtattttttaaagacggttataataatattttttatagtgtggcgtggttattatttattaatgaattgaagttttattttttttttttttgaatttgaatgtgtttgtgatttttttgattaatagaatattgtaaaagttaagttagtatgatagaagaagttagttttgtattggatgttttggttgaagttttgttttatagaatttgtgagtataataaaaaggttgttgtaggtttttaggttttgagataatttgttatatagtaatagtaattgaaattaatggttattaggaaagtttggaaatgtaatatttattttgagtagttacgtgttaagtaaatatttgggaattaaaaagaattaagtttggacgggtatagtggtttatttttgtaattttaatattttggagggttaaagagggtggatcgtttgagtttaggggttcgagattagtttgggtaatatagggagattttatttttataaaaaaatataaaaattggttaggtttggtggtatatatgtggtcgtaattgttcgggaggttgaggtgggataagcgtttgagtttagggaggttaaggttgtagtgagttgtggttgtgttattgtatttcggtttgggtgatagagtaagattttgttttaaaaaaaaaaaaaaaaaaaaaaagtttggagataattattaatttttgttataatgtttaatattttttttttaggaatgataaaattaaaaaaagtattatttttttaaatattattaagagttatattttgttaatgttattttgtgtttttaaatttatttatttttttttgtagatttattatatgaagtatggtagatagttttttgttattaattataatgttaaggttgtgtggtttttatttttttaagaatatagtaatgattttaagtatgaaatgcgtaattggattagatgatttatatagttttttttattttgagagatttataatagtataatattaaaataagatttattggatttgaaatatttttgtaaatagttttttggtaatttttatttgtattagtttttaaattaataattatgatttgaaaaagtaaagtttggttttgatatttttattatattagtattgtttttagaataaatgtttattttttaaattatattttggtttttatttattattatataatttttttggtaatattttatgattttttttgtttttatttttagaatattttattttgagttttttgaatagtggtttatgggaattatgtattttatattttttaaaagagtattattgatattgattttttggttgtggatttgtaaagtaatttgtattagttttttagagaattagattggaagtaatggtaaatgaattttgagagtttagtattgaaatgaaaagagtgttattaaatttgtttttatattaggaaattaaatagatttattaatttgtttatatgtaattgttaaaaaaataaagttaatggtttgggta

SEQ ID NO: 229 - DNA, 6310 bp, Artificial Sequence
  chemically treated genomic DNA (Homo sapiens)
aatatagttgttttaaagttattgtttagtaggtttattttttgattattttttgggatagtttttgttggtttattttttttttttgaaggggttatatttttttttttttttttttttttttttgtttttttgtttttttttttttttatttttttttttttttttttttttgtttttttttttgttttttttttttgagataaggttttattttgttatttaaattggagtgtggtggtataattatggtttattgtaatttttaatttttaggtttaaatgatttttttgttttagttttttgagtagttgggattataggtgtggattatttgtttggttaattaaaaaaaagtttttgtggagatggggttttattatattgttttaattggttttaaatttttagatttaagtagtttttttattttggttttttaaagtggaggtataagtttttattatatttagtttttttttgttttttattataggtttttagttataattagtagtagttttaagtgattttgagagttgttatattttaaatgtttagtagttatatgtgggtattgtgataattgtgttgaagagtgtagttttagaataaagggattgaggtcgagcgcggtggtttatgtttgtaattttagtattttgggaggttgaggcgggtggattatttgaggttagaaattttagattagtttggttaatatggtgaaattttgtttttattaaaaatataaaaattagttgtgtacggtggtgtacgtttgtaattttagttatttgggaggtcgaggtaggagaatgggttgaatttgggaggcggaagttgtagtgagtcgaggtcgtattattttattttagtttgggtgatagagtaagattttgttttaaaaaaaattaaaattaaaataaaataaaataaaaaataaaagaataaaggggttgagaggtaaattattgtatttttgttttattttagagaagaggaaaatgagatataggaggaagtaagtgatttgtttagggttatgtattgtagttatttaaatggtagtttttaagaaggtatatttatgttataatttttggaatttgtgaatgttattttatttggcgaaggggtttttgtaggtataattatattaaggattttgagatgaagagattatttcggattatttagtgaagttttaaatttaaggattagtgtttatataaaagatatataaggtatagggttagtgtagtggtttacgtttgtaattttagtattttgggaggttgaaggtaggtagattatttgaggttaggagtttgagattagtttggttaatatggtgaaattttgtttttattaaaagtataaagattagtcgggtatggtggcgggtgtttgtaattttagttatttgggaggttgaggtaggaaaattatttgaattcgggaggtagagattgtagtgagtcgagattatgttattttattttagtttgggtaataagagtaaaattttattttggaaaaaaaaaaaaaagaaaagaaaaaagagatatataggggatattagagaaatagaaggggtgaagataggtatatagaggagagggtgatataaagatagaggaggatgggagcgatgtgattataagttagggaagttagggaatgttgatagtttttagaagttataaaaggtaaggaagcgtttttttttgaaatttttagagggaatgtggttttgttgatattgtgatttatggtttttggtttttagaatgatgagagaataaatttttgttatttttagttattttgttttgttataattttttatggtagttataggtttggagtaaagggattttggattttatttttagttatagtaatttgtttttttattgtttttgaaattttttaagtgattagtatttatttttttatgagtagagtgggtttggggggttttggtggtaaggaggatttatgtttaatttacggggagttgttgttttgtagtttttgttggtattatgttatgttgttttaattttttgtttgatttgtttagttgatttttttattgttttttttgtttttatttttttttttttaatttttatatagtagttagggtaagtttttaaaatgaaaattttataagttgtattaggttattttttagtttttaattttttaatggtttttatttattggagtgaaatttaaattttttattatatttgtaaagttttttggggttttgttatttttttgattttattttataagtttttttttttttttgtttatttaattattgaggttttttcgttatttttttaatatattaagtttgatatttttttaggttttttgtattttttgttttttttgtttggaaattttcgatagttttttggtttatttttttattttatttaggttttatttagatgtttttatattataaaggatttttttgtggtttttataataatgttttatttttatttataaatattttattatatattattaggtatggattcgttagttggttaggttattatttttttttttttattagattataagttttattagggtagggatttttgtttggtttgtttaatagtatttggaatagtatatagtaggtgtttaataagtaatttgttgattgaaagaataaatgtatgagtgagggaggaatgtaggttttatttagttttatttttttttttagataagttagaatttggatatttaagtaaaattttatgattcgtgaatttaaaaaataataataataataataatttattgggttagtttaaaaaaaatagagtatttggagttattagtttgagattttgatttataggaatttgggtttaatgggaattatattttttatttttatttggtgtaacgtttttaggaattaagtggtttttttttatttatagtttttgtatttttaggtttcggcgttatgaggtattgtttgttgttatagattaaagttatttagggtattttatttaaaaggtaggatgtgggttgtgagtttttagtttattagtttaaaggaaatttattttagtagtaatgttttttgggatgtttttttaagtttttttgggaggtggtggggtttttttaaggattaataatagataggtatatttagttttttaaatatgttaattttaaaagtgaatgttatttttttttttttatttttgaattattatgtaggagagggatattttattattgtagtttttgttttcgatatgttatttaataatgatttattatttagtagtttttaggtaaaattgttatagtgggatttgagttcgtgtaattttagtttgtttttttttatttattattatttaggtttatttttttgttattaggatgttttgtagttaggttagtttaattattatttagtaacggtatgattgtgggtgtattttaattattttgaatttttttatttttatttataatgaaagttattagatttatatagggttgttgcgggggttaaataagatagtataagtatttgatgtttagtaattatttgatatttattattaaatatttattgggtgtgagtgggggtaagaagtgtcgatttttaagtttttatttatttatttgtttatttatgtttttatttaattaattaatatttattggggttttgggaggtgttaggtattgagtttggtgttgggcgatatggtggtgaatagtttttttgtttttatagagtttaggtttggtgaaggagtttatagtttaatgaagttttgcgtttttagagtgggggatatggtggtagtgggtatttttaggttttgtgtatgaatagggcgttaaataatattgaattatatattgtagataattattatttttttagttatttttagattatattaaggagagagttttggttggatagtaatgtttttaatatttttttagtatttattaatttttttttttaataaataaaagatgattttagtcgaagatgtttaggatagatgacggtatttggagatattttaataatgtagatattttttgttgtttaaatttagattaaaagagataggtttttttttttttagagggtgtataaatacgattagaatttgtgaagacgagttagaaatgaatgaaatttggaaaaatattgatttattgaaattttttttttttatattattagttttatgttatagttggggaaacggagtcgttttgtagaggggatggatagaaggtagggagtttttttttaaacgtgtaggaggtaagtaaagttaagaattttttttgtggtggagttagagatatataaaataaagatcgttttttttttatttttgtagaacgtgtgtgtgtatgtgtgtgtaagtgtgtgcggttataagttttttcgaatgagtgatagcgggagtttatttttttaggagacgcgtgtagaatgattaatgggatggatgggggtggatgggtattagttttcgtagaggtcggggtggaattcgttgcgttttattttttttattcgttttttttcgtttcgtaggtttttttattttcgttttttttttgggtatattttttgaacgtagtttcgggggtcgaggacggggtggggtggggggcgaggttcgggttcgacgatttcgggttgcggtttcggcgttgtagagttgcggttgtgtacgtttagtcgcgaggttcgcggtagttcgggcgtcgatatgtaaagtagttggtagcgttgggcggggtttgggcgcgatgtaaatgaggagggcggggttggttcggggtttcgtttttttttttcgtagttggggttagcggtgttaagcgtagttggacgagcggtagtagttgggcgagtgatagtttcggtttcgcgcgtcgcggtcgttagagtcggcgtaggggaagcgttcgcggtttcgggtgtagtagcggtcgtcgtttttcgcgttttttcggttcgtagttcgcggtttcgcggtttcggggtcggtatttttcgggtttcggtttttcgcgcgtaagatggttgattcggttgcggggtcgtcgtcgagcgagggcgaggagagtatcgtgcgtttcgttcgtaaaggcgtttttcggtagaagaacgtgtatgaggttaagaattataaatttatcgttcgtttttttaagtagtttattttttgtagttattgtatcgattttatttggtgagcgcgcgcgcgtagggtattttttcgggttttcgagggtagcgtcgcgttagggatttttttttcgcgttttttgcgtttttcgcgtttttcgtattttgggatttcgcgttttcggattttcggtttcggattttgttgttcgggattttcggatggatagttttgtcgttgttttgtttttattttggttttagacgggtcgtcgcggggcgttttttgtttttttttgtttttaggcgtttttagagcgtttaggggcggcgtcgcgggagtttttgttttatttgattaggagcgcgcggggtttgtgtttgttttggagggtagcgtttcgggtgtttttcgattcggggttttttattttttcgtttgttttcgggcgcgaggagttttcgttttttattttttgttttcggggggggcggcgttttgggtgtttttttttatttttttgcgggtatgggatatttttttttatttttttgtgttttcgggtagcgttttgtgttattttttattgttttttttcgagggtttgggtttttttttttatttttcggttatattattgcgggttttttttttttttagtttttttagtagtggggtattttttttttttttttagttttttttttagaggatattatcgtcgcggggttattttcgttttttttttgaatgcgtttttatttttttttttttttcgagggtgttcggggtatttatgggtatatttgtcgtttgtttttagtttttatttcgacggaaacgttttttattatttcgttatttggtggtcgtagtttttttttttttgtaggagtgaaggtagatgggggttatagtcgagtttttatttatttttataaaggcggaagatttttgggtattcgtttgtggttgggagtttgtatttggggtatagaggtagggaggaaggcgggtgattttgtgggtaattagttggaggttgggtttttcgggttgtttg

SEQ ID NO: 230 - DNA, 6310 bp, Artificial Sequence
  chemically treated genomic DNA (Homo sapiens)
taggtagttcggggggtttagtttttagttagttatttatagagttattcgtttttttttttgtttttgtattttaggtgtaaatttttagttataggcgggtgtttaagagtttttcgtttttgtgggggtaggtgggagttcggttgtaatttttatttgtttttatttttgtagaagagaggaggttgcgattattaggtggcgggatagtggggagcgttttcgtcggggtaggggttgaaggtaggcgatagatgtatttatagatgtttcgagtattttcgggaaaagagaagagataaagacgtatttagagggagggcgagagtgatttcgcggcggtggtgttttttgggagggggattgggaaggaggaaaggatgttttattattggagggattggggaagaaaggggttcgtagtgatgtgatcgaggagtggaaaggggaatttaggttttcggggaggggtaatgggagataatatagggcgttgttcggaggtatagaggagtgagaaaggatgttttatgttcgtagggagatagagaaggatatttagggcgtcgtttttttcggaaataaggggtggggggcgagggtttttcgcgttcggaagtaggcggagagatagggaatttcgggtcggagagtattcgaggcgttgttttttagggtaggtatagatttcgcgcgtttttagttaggtggagtaaaggttttcgcgacgtcgtttttgggcgttttagaggcgtttgagagtaggagagggtaggaggcgtttcgcggcggttcgtttgggattagggtggggatagggtaacggtaggattgtttattcgggagtttcgggtagtagggttcggagtcgggagttcggagacgcggggttttagggtgcggagggcgcggagggcgtagagggcgcggagagggggtttttggcgcggcgttgttttcgggggttcgggaaggtgttttgcgcgcgcgcgtttattagatgaagtcggtgtagtggttgtagaaggtgggttgtttgaagaagcgggcggtgaatttgtggtttttgattttatgtacgtttttttgtcggagggcgtttttgcgggcgaagcgtacggtgtttttttcgttttcgttcggcggcggtttcgtagtcgggttagttattttgcgcgcggggagtcggagttcgagaggtgtcggtttcggggtcgcgggatcgcgggttgcgggtcggggaggcgcgggaggcggcggtcgttgttgtattcggggtcgcgggcgttttttttgcgtcggttttggcggtcgcggcgcgcggagtcggggttgttattcgtttagttgttgtcgttcgtttagttgcgtttggtatcgttggttttagttgcgggggagggaggcggagtttcgggttagtttcgttttttttatttgtatcgcgtttaggtttcgtttagcgttgttagttgttttatatatcggcgttcgggttatcgcgggtttcgcggttaagcgtgtatagtcgtagttttgtagcgtcgggatcgtagttcggggtcgtcggattcgagtttcgttttttattttatttcgttttcggttttcggggttgcgtttaggagatgtgtttaggggaggagcgagagtggaaagatttacggggcgaaggggagcgggtggaaggggtggggcgtagcgaattttatttcggtttttgcggagattggtatttatttatttttatttattttattggttattttgtacgcgttttttggagggatgggttttcgttgttatttattcggaaaggtttgtggtcgtatatatttatatatatatatatatatacgttttgtagaggtaggggaggagcgatttttattttatatgtttttaattttattatagagaagatttttggttttgtttgttttttgtacgtttggaagagaattttttattttttgtttattttttttgtaaaacgatttcgtttttttaattgtaatatagggttaatagtgtggggaggaaggattttagtagattaatatttttttaaattttatttatttttgattcgtttttataaattttggtcgtatttgtgtattttttgggggaaaaaaagtttattttttttggtttgagtttgaatagtaagaggtatttatattattaaaatatttttaggtgtcgttatttgttttaagtattttcgattgaagttattttttatttgttaagagaggaaattaataaatgttagaggggtgttaaagatattattatttaattaggattttttttttgatgtgatttgaaggtaattgaaagggtaataattgtttataatgtgtaatttaatgttatttagcgttttgtttatgtataaggtttaaagatatttattgttattatgttttttattttgggaacgtagagttttattaggttgtgagtttttttattagatttaggttttgtgagagtaggggggttgtttattattatgtcgtttagtattaagtttagtgtttgatattttttaagattttagtaaatattggttgattgagtgagggtatggatgaataagtgaatgaatgaagatttaaaggtcggtattttttatttttatttatatttagtaggtgtttaataataaatattaagtgattgttgggtattaggtatttgtgttgttttatttagttttcgtaataattttatgtagatttggtaatttttattatggataaggatggggaggtttagagtgattaagatatatttatagttatatcgttgttgaatggtgattgggttggtttgattataaagtattttggtgataaaggggtgaatttgagtagtggtggatgaaggggggtaggttggagttgtacgagtttaggttttattatgataattttgtttggaagttgttgagtggtaagttattattaggtagtatgtcgagagtaagggttgtaataatagaatgttttttttttatatagtaatttaaaggtaaggaggaaaaaatagtatttatttttaaggttgatatgtttgggaaattggatgtgtttgtttattattagtttttgaagaggttttattattttttagggaggtttgggaaaatattttaggagatattgttgttgaagtagattttttttgaattgatgagttggaagtttatagtttatattttgttttttgaatgaagtgttttggatgattttggtttgtaataataaatagtattttatggcgtcggggtttggggatgtaagggttgtggatggaaaagagttatttggtttttgaaggcgttgtattaagtgaggatgagaaatgtggtttttattggatttagatttttgtaggttagggttttaaattggtggttttagatgttttattttttttaagttagtttagtgggttgttgttgttgttgttgttttttaagtttacgggttatagaattttatttaaatatttagattttgatttatttaggaaaaaagatagagttaaatggagtttatattttttttttatttatatatttgtttttttaattaataaattgtttattaagtatttattgtgtgttgttttagatattgttaaataaattagataaaggtttttgttttagtggagtttatagtttaatggggaagggggagtaataatttaattaattaacgaatttatatttggtggtgtataatagaatgtttgtaaataaaaataaagtattattataaagattatagggaaattttttataatatggggatatttgagtaaggtttgaataaagtgagagggtgagttaggggattatcgagagtttttagatagagaaaatagaaaatgtaaagagtttaggggagtattaagtttggtatgttggagaaatagcgagaaggttttagtggttggatgaatagagaggagagaggatttatgagatgaggttagggaggtagtagggttttaaagggttttgtaaatgtgataaggagtttggattttattttagtgaatggaagttattggagggttggaagttgaggagtggtttgatataatttatggggtttttattttaaaagtttattttagttattatgtggaaattagaggagaaagggtggaggtaggaagagtagtgaagaggttaattgagtagattaggtaagagattagggtaatatggtatagtgttaataggagttgtagggtagtagtttttcgtagattgggtatgggttttttttgttattagagttttttaggtttattttgtttatgaaggagtgaatgttggttatttgaaagattttagaggtagtgagggggtaggttgttgtggttgagaatggagtttaaggtttttttgttttagatttgtggttgttataaaaaattataatagaatagggtggttagaaataataaaaatttatttttttattattttggaggttagaaattataagttatagtgttagtagggttatattttttttggaggttttagaggggaacgtttttttgttttttgtggtttttggaggttgttagtattttttggtttttttggtttgtggttatatcgtttttatttttttttgtttttatattatttttttttttgtgtgtttatttttattttttttgtttttttaatattttttgtatattttttttttttttttttttttttttttttttaagatggagttttgtttttgttgtttaggttggagtgaaatggtatggtttcggtttattgtagtttttgtttttcgggtttaagtgatttttttgttttagttttttaagtagttgggattataggtattcgttattatgttcggttaatttttgtatttttagtagagatagggttttattatgttggttaggttggttttaaatttttgattttaggtgatttgtttgtttttagttttttaaagtgttaggattataggcgtgagttattgtattggttttatattttgtatattttttatatgaatattggtttttggatttagggttttattggataattcgagatgatttttttattttaaaatttttaatatagttatgtttgtaaagattttttcgttaaataaaatgatatttataagttttaggaattataatatggatgtatttttttgggggttattatttaaatgattatagtgtataattttgggtaagttatttatttttttttgtgttttattttttttttttttaaggtaggataaggatatagtagtttgttttttaatttttttatttttttgttttttgttttgttttgttttggttttggttttttttgagatagagttttgttttgttatttaggttggagtggagtgatgcgatttcggtttattgtaattttcgttttttaggtttaatttatttttttgtttcggttttttaagtagttgggattataggcgtgtattatcgtgtatagttaatttttgtatttttagtagagatagggttttattatgttggttaggttggtttgaaatttttgattttaggtgatttattcgttttagttttttaaagtgttgggattataggtatgagttatcgcgttcggttttaatttttttgttttaaggttgtattttttaatatagttgttatagtatttatatgtggttgttgagtatttgaaatgtggtaatttttaagattatttagaattgttattaattgtaattaaaaatttatagtaagaaataagaaaaggttaggtgtggtggaggtttatgtttttattttgggaagttaaggtgggaagattatttgagtttaggagtttgagattagttgaggtaatatagtgagattttatttttataaaaatttttttttaattagttagataggtagtttatatttgtagttttagttatttaggaggttgaggtaggaggattatttgaatttgagagttgggggttgtagtgagttatgattgtgttattatattttagtttgggtgatagagtgagattttattttaaaaaagaaagataggaagagagatagggggagaaagaaggaaagagatagaggggaaggaaggtaggaaggtagggagagaggaagggagagaggggagtatggtttttttaaagggaaaaaataaattaatagaaattgttttagagaatgattagaaggtgagtttattagataatggttttaaagtaattatatt

SEQ ID NO: 231 - DNA, 6181 bp, Artificial Sequence
  chemically treated genomic DNA (Homo sapiens)
tttttcgttagtgtgaattttgttgttttttttgtatatagattttgtatatttttgattttgggttttgtttttttttagtttttttggaaagtttttttttttttttatttaagttttattttttttttatgttttagttttaattttattgattatgaaagtttttttgagttttttagtaattttttttattattttattatatttatagttttaatcgataagatgtattttttaatgaaatattattttgtattgattttttattgttgttatatgttatttttaattttttaattagaatgtattggaaatgtggtaatgtagaatgtaaggaaaatgtttatgttttatattgttggaatattttttttatatatatgtatatatttaaaagtatttattgagattttacgtgttgggttgtgttgggtattagggataagtttgtaaaaatttttgtaaaggaataagatataaggttatttttgttttttttaatggtaaggtatttaataggtattataaataattaattagattaagtttggggatatagtatataaaaagaattatataatttcggaattagaagagattttagattagggatttttattagggatgaggtgtttttttgggtattttagaaatttatgggggttgggagatagaagcgggcggattacgaggttaggagattgagattatttcggttaatatggtgaaatttcgtttttattaaaaatataaaaaattagttgggtatggtggcgggagtttgtagttttagttatttaggaggttgaggtaggagaattatttgaattcgggagatagaggttgtggtgagtcgagatcgtgttattgtattttagtttgggcgatagagtaaaattttattttaaaaaaaaaaaaaaaaagaaaaagaaaaaaaagaaagaaatttacggagggtttttggttggttggttgtttggggaatgttatgggatttgatgggtggttttagggataaagtatgttttgtagtatgtggattgttttgtttaacgaagaattgtattgttttatataaaattttaagatgattttttggttaagaaattatttgttttttaatagttttataaagaataaaatatgtaagagtaaaagaagtgtaaaatgtatattttaaaaatgagaaagtaattgaagttgtttaaataaatgaaaagttattttatgtttatggattggaaggtttaatattgttaatatgataaaaattatataaattgatttatagatttaaggtaatcgttattaaaattttagttggtttttttaaagaaattgataagttgattttaaaatttatatgaaaatgtaagggatttagaatagttaagatatttttgaaaaaaaaaaaagttgtaagatttatatttttttgttttaaaagttattaaaaaattatagtaatgaagatattgtgattattgttaaaggatagataaattaattaatagaatagaatttaaaatttaggaataaatttttaaattttggttatttgatttttgataattgtgtaaataattaaatgggagaaaaatagtttttttaataaatgatggtgggataattgaatatttatatgtaaagaaattaatttggattatttatattagatataaaaattaatttaaaatggattataagttaaaaagtaagagtttaaattataaaatttttagaaggaaatataggtgtaaatttttatgattttagattatataaagtttttttagatatgatattaaaaatatatataatatatagtttggtatatagtaaaataaataaaaattatacgtgataataataaaataaattagatttcgtgaaaattaaaaatttttatgttgtaaataatattattaaaaatatgaaaagattaaaaaaatgaaaagataatgtatagagtgggagaaaatatttgtaaataatttaataagagatgtatttttagaatatataaagagttttggttaggtatggtggtttatatttataattttagtattttgggaagttaaggtgggaagattatttgagtttaggagttgaagattagttttgatattataggaagatttagtttttataaaaacgagaaaaataaattagttgggtgtggtggtatatgtttatgggtttagttatttagtaggttgaagtggaaggatcgtttgagtttaggagttggagagttgtgattatgttatgtattttagtttgtgtaatagagtaagattttgttttgaagaaaaaaaaaagaaaagagagaatttttataatttaatgaaaaaagataatttaatttaaaaatgattaaaggatttgaatagatagttttttaagaagatatataaatggttaataaaaatacgaaaatatatttaatattattagttattagggagatgtatattaaaattgtaatgagatattattttataattattaggatggttatgataaagaagatgggaaaaaaattaagtattggtaaggatattaaaaaaaattgaaatttttattgggtatggtggtttatatttgtaattttagtattttgggaggttgaggtaggtagatggttttagtttaggagattgagattagtttggataatatggtaaaatttcggcgttataaaaaatataaaatttagtagggtgtggtggtatatgtttgtagttttagttattagcgatgtttagaatagaaaaatttatagtaatagaaaatatattattggttgttagaggttgaggagagtggggagtaattgttaatggatatgtagttatttttagggtgttgaaaatattttggatttaggtagaggtgatggttgtaaaattttgtgaagatatttaaaattattaaattttatattttaaatgagtaagttgtatggtatgtgaattatttttttttaaaaaaatgagacgggattttattgtgtattgtgttgtttagggacggagtttcgttggagtgtagtggtgtagttttagaggtttatagtaatttttgttttttgggtttaagcgattttcgtgttttagttttcggagtagttgggattataggtgttcgtatattttataatatattttataattaatcgtttcgtattaaatttgttgatgtaggtttttaattattgaaaaatttgatattaagttttttaatgggatttttttgtttgtttaagagatggggttttattatgttgtttaggttggttttgaatttttgggtttaagtgattttttagttttagttttttaaaggttgggattataggtatgtagtattttgtttgatttaaggggaatttttagtaagagtatataatttaagtttgtagtagttggaggatgtcgtattacgttgaagtgttatatataattgatgatttagttttttaagtttattttattatcgtaaagaaagttatttttttgattattttaatttttttagtattaggattgttgtaggggttggatttatgttatttgtagttgtagtgtaaattatgtgttagagttaagattttaggaaagttaaagattaggttataagagcgattttttttttttttttttttttttttttttgagatagagttttgttttgtcgtttaggttggagtgtagtggtatagttttggtttattgtaattttcgtttttttggtttacgttatttttttgttttagtttttcgagtagttgggattataggcgttcgttattacgttcggttaattttttgtgtttttagtagagacggggttttatcgtgttagttaggatggtttcgattttttgattttgtgattcgttcgtttcggttttttaaagtgttgggattataggtttgagttatcgcgttcggttaaggacgattttttttaatttttggtaagttagtttttatagaatgaaatgtttttggattgattgatttgattgggtaagtatttattgggtttttgttttatgtaagggtagtttataagggtttagatatgggggtttttaaagaagaaaaatcggttttttattatattttttggttgagtttttttttttattatatttgttatatatgttattaaattatttttataaaagaggttatgttgagtaggtaattaaatttttgtttttttaaaagatatgtataatttagacgatttatgtaattagaagaagggagattttattagttaataaagtttagaacgtgaggaagtttagttatttttaggatttttagatgtttaagttggatttaggttttttatttcgatagttttagggagtacgttggagagatagattttattagcgggaaggcgcggtattttacgcgtaaggaattttaagttttagaattttatgaggattttaaattttagaaatttgtacgtaaatttatttcgggtgttaagtcggtcgatcgtagacgtgattaagttgcgaggttagggtgaggtgtcgtagaatttgtttttattattgtttttgtagggaagagattttagtgatttagagttggttattgttttttttatagttcgcgtgaaagtatttttttcggcgtgtttgatgttatgattagcgttttttattttttttgttttttttttttgttttcgtaaggatggtttagttcggtattgaggttttttgagttggttggatggttgcgttcgttttatttcggaatgtgggtttttggagcgagcgaagtgggagggatcgacgtaggaggtgttttgggttcgggcggttgtagaggcggcggcgtttacgggtagtgggaggagtcgcgcggtttcggttgtttcggcgaggcgatttttgggtcggcgttgcgggcgaggtgggtaggtaggtgggcggacggtcgcggtttttcggtaagcgtaggcggcggagttttttacggcgttcgaagcgttttttcgtattttcggtttttagcgttgaggcgggggagtgaggagatgtcgatttagagggatagtagtattatgttttatacggtcgtaggcggcggtagcggggattatttttattaggttcgggtgaaagtttattatcgcgggtgagtgttttgggatagggcggtgggcgggaggggataggtcggttttattcggtttggaggaggggagggtgaggggttggaggtgttgtgggcggattgggttgggcgggcgggcggtttcggtgatttagggtgagtgacgaagtgataggggtgggggcgaagtaaggggatgtagtattgggggcgtttttaggtatggcggtgcggggagtcgaggggttagagtagggttcgagaaggaagttagggttagagtaggtgtatttggtgtggacgagagattcgttttttgagagttttgtaggggttttgtatttttaagtttgggtgtatttggggttgcgagttgaggattttaagtgatgttttagttaatttagtttgttgtggggatagaaaacgggatttttttagttagttgttcgttttgattattagtaggtttaacgtttttggttttttgagatatatttttattttcgttgtgtttacgtagtgtatttgtattgttagtatattagatataggggttgtatttaagaattaagtcgatgcgtttttagggacgtgtagtgggtatttacgtgtcgttaagattaagttgtatgtgtgtaaattaaaattttgtgagttttttttttttagtgttgttttaacgattattcgatagggtgagatattgtaaggtgaggagattagtttagttatagttttaaattttttgatttttatttttttattatggttataagaaaaaatttagttttaagtttattgtgttaaattattttttattagtgacgtaaagtgtttttttttttttaaatttagttgtggtttgaatttttttttgagataattatgtttaggagtattagaaacgtgaaatgttagtgtgattataaaggttggagattgagaagttatagaaaatttagttattttggtttgttttattgtttgtttaggtagaagtaaattgttttaaaaaattt

SEQ ID NO: 232 - DNA, 6181 bp, Artificial Sequence
  chemically treated genomic DNA (Homo sapiens)
gagttttttaaagtaatttatttttatttggataagtagtaaggtaagttaaagtagttgggttttttgtgattttttagtttttaatttttatggttatattaatattttacgtttttaatgtttttaaatataattattttaaaaaaaaatttaaattataattgaatttaaaggaaggggggtattttgcgttattgatagaaaatgatttaatataatgaatttagaattgggtttttttttgtaattatagtaagggagtgaagattagagaatttaaaattgtaattaggttagtttttttattttgtagtattttattttatcgggtagtcgttgaaataatattgagaaagaaaggtttataaaattttgatttatatatatgtaatttaattttgacgatacgtaagtatttattgtacgtttttgaaaacgtatcgatttgatttttaaatataatttttatgtttaatatattggtagtgtagatatattacgtgaatataacggggatggaggtatattttagagaattagaggcgttaggtttgttggtaattaaaacggatagttaattgaagaagtttcgttttttatttttatagtaaattgagttaattaaggtattatttggaatttttaattcgtaattttaaatatatttagatttaaggatgtaaggtttttataaagtttttaggaggcgagtttttcgtttatattaggtgtatttattttaattttagtttttttttcggattttattttggtttttcggtttttcgtatcgttatatttgggggcgtttttagtattgtatttttttgtttcgtttttatttttattatttcgttatttattttgagttatcggagtcgttcgttcgtttagtttaattcgtttataatatttttagttttttattttttttttttttaggtcgagtggagtcggtttgttttttttcgtttatcgttttgttttaggatatttattcgcggtagtaggtttttattcggatttggtgggaatggttttcgttgtcgtcgtttgcgatcgtgtgggatatggtgttgttgtttttttgggtcggtatttttttattttttcgttttaacgttggaggtcgggggtgcgggggggcgtttcgggcgtcgtgggggatttcgtcgtttgcgtttgtcggagaatcgcggtcgttcgtttatttatttgtttatttcgttcgtagcgtcgatttaagggtcgtttcgtcggagtagtcggaatcgcgcggttttttttattgttcgtaggcgtcgtcgtttttatagtcgttcgggtttaagatattttttgcgtcggttttttttatttcgttcgttttaaaggtttatatttcggggtagggcgggcgtaattatttagttagtttaaggagttttaatatcgggttgaattatttttacgggggtagagaaaggggatagagggaatgggagacgttgattatggtattaaatacgtcgagaggggtgtttttacgcgagttgtgaaagagataatgattagttttagattattaaagttttttttttgtagggataatggtagggataaattttacgatattttattttagtttcgtaatttggttacgtttgcggtcggtcgatttggtattcgggatagatttgcgtgtaggtttttgggatttggagtttttataggattttgggatttgaggttttttgcgcgtagggtgtcgcgttttttcgttggtgaagtttgtttttttagcgtgttttttggagttgtcggggtggaaaatttggatttagtttgggtatttgaaggttttggaaatgattgggtttttttacgttttagattttattaattgatgaagtttttttttttttaattgtataaatcgtttgaattatatatgttttttgggggaataagaatttggttatttgtttagtataattttttttatggaaataatttaataatatatgtaataaatataataaaggaagaaatttaattagaaaatatgatgaaaaatcgattttttttttttgggggtttttatatttaggtttttgtagattgtttttgtatggaataagagtttaatgaatatttatttaattaagttagttaatttaagagtattttattttgtaaaaattggtttattaaagattagaaagaatcgtttttggtcgggcgcggtggtttaagtttgtaattttagtattttgggaggtcgaggcgggcggattataaggttaggagatcgagattattttggttaatacggtgaaatttcgtttttattaaaaatataaaaaattagtcgggcgtggtggcgggcgtttgtagttttagttattcgggaggttaaggtaggagaatggcgtgaattagggaggcggaggttgtagtgagttaagattgtgttattgtattttagtttgggcgatagagtaagattttgttttaaaaaaaaaaaaaaaaaaaaaaaaaaagaatcgtttttgtaatttagtttttgatttttttaggattttggttttgatatataatttatattgtaattataggtagtatgaatttagtttttgtagtagttttggtgttgaaagagttggaataattaaagaaatagttttttttacgatgataaaataggtttgggggattgagttattagttatgtgtgatattttagcgtggtacgatattttttaattgttatagatttggattatatatttttattaaaaattttttttgagttaggtaaagtgttatatgtttgtagttttagtttttgagaggttgaggttggaggattatttgagtttaggagtttaaggttagtttgagtaatatggtgagattttattttttaaataaataaaaaaattttattgaaaaatttggtattaggttttttagtaattggagatttgtattagtaagtttaatacggagcgattaattatggaatatattataaaatatacgggtatttgtaattttagttatttcggaggttgaggtacgagaatcgtttaaatttaggaggtagaggttgttgtgagtttttgagattgtattattgtattttagcgagatttcgtttttgggtaatataatgtatagtgagatttcgttttatttttttaaaaaaagataatttatatgttatataatttatttatttaaagtgtaaaatttgatagttttaagtatttttataaagttttgtaattattatttttatttaaatttagagtatttttagtattttgaaagtaattgtatatttattagtagttattttttattttttttaatttttggtaattaataatatattttttgttgttatgagtttttttattttgaatatcgttagtagttgggattataggtatgtgttattatattttgttaaattttgtgttttttgtagcgtcggggttttgttatgttgtttaggttggttttaattttttggattgaagttatttgtttgttttagttttttaaagtgttgagattataggtgtaagttattatatttagtgaaggttttagttttttttaatgtttttgttaatatttggttttttttttattttttttattataattattttagtggttgtgaagtggtattttattatagttttgatgtatatttttttaatgattaatgatgttgggtatgttttcgtgtttttattggttatttatatatttttttggagaattatttatttagattttttaattatttttaaattgggttgtttttttttattgagttgtaagagttttttttttttttttttttttttttaagataagattttgttttgttgtatagattggagtgtatggtatgattatagttttttaatttttgggtttaagcgatttttttattttagtttattgagtagttaggtttataggtatatgttattatatttagttaatttgtttttttcgtttttgtagagattaggtttttttataatgttaaggttgatttttaatttttgggtttaagtgatttttttattttgattttttaaagtgttaagattataggtgtgagttattatgtttggttagagttttttatatattttggaaatatattttttattagattatttgtaaatatttttttttattttgtgtattatttttttatttttttaatttttttatatttttgatggtattatttgtagtataaaaatttttaatttttacgaggtttaatttattttgttgttgttacgtatggtttttgtttgttttattgtgtgttagattatatgttatatatgtttttagtgttatgtttaagagggttttgtgtaatttaagattatgaagatttatatttatatttttttttagaagttttatagtttaaatttttattttttagtttatgatttattttgggttaatttttgtgtttaatgtaagtggtttaaattgatttttttgtatgtggatatttagttattttattattatttgttgaaaagattattttttttttatttaattgtttgtataattgttaaaaattaaatgattaaaatttaagggtttatttttggattttaaattttattttattgattgatttgtttattttttgataataattatagtgtttttattattgtagttttttagtaatttttaaaataaggaagtgtgagttttataattttttttttttttaagagtgttttggttattttggattttttatatttttatgtgaattttaggattaatttgttaatttttttaagaaagttagttgagattttgataacgattgttttgaatttgtgaattagtttgtgtggtttttgttatgttaatagtattaaattttttaatttatgaatatgggataattttttatttatttaggtagttttaattgtttttttatttttagagtatatattttgtattttttttatttttatatattttattttttataaggttattggaaaataaatggttttttaattagaaaattattttaaaattttgtgtgaggtaatatagtttttcgttgagtagggtagtttatatattataagatatattttatttttggaattatttattaaattttataatattttttaaataattaattaattagaaatttttcgtaggttttttttttttttttttttttttttttttttttttttttgagatggagttttattttgtcgtttaggttggagtgtagtggtacgatttcggtttattataatttttgtttttcgggtttaagtaatttttttgttttagttttttgagtagttgggattataggttttcgttattatgtttagttaattttttgtatttttagtagaaacggggttttattatgttggtcgggatggttttaattttttgatttcgtgattcgttcgtttttattttttaatttttataggtttttaaaatatttaaggaggtattttatttttagtgaaaatttttggtttgagattttttttagtttcgaaattatgtggttttttttatatgttatatttttaaatttaatttaattaattatttgtaatatttattaagtgttttattattgaaggaggtaaaaataattttgtgttttgtttttttgtaaagatttttataggtttatttttaatgtttagtatagtttaatacgtagggttttaataagtatttttggatgtatgtatatatatggggaggatattttagtagtataagatatgaatattttttttatattttatattgttatatttttaatatattttaattgggaaattaagaataatatgtgataatagtaaaagattagtataaaataatattttattaaggggtgtattttgtcgattaaagttgtaagtataataaagtgataagagaaattattgagaaatttagagaagtttttataattagtagaattggagttaaggtatgaaggaagggtggaatttgggtgagaaagagggaaagttttttagaggaattgagaggaagtagggtttagagttaagaatgtgtaaggtttgtgtgtagaaagggtaataaagtttatattaacgaggag

SEQ ID NO: 233 - DNA, 5956 bp, Artificial Sequence
  chemically treated genomic DNA (Homo sapiens)
ttttttgttatagtttatttagttttagagtaattataataaagttttttttttttatattataattatttatttatgttattttttttttttggaaggttttttatatttttttttttttagttaatatttatatatttatgagaatttagtttaagtgtgaagtatttaggaaaagattgtttgttttatgtttaaagtattatgaatttattttattattatatttgttttattaaattataagttttatgataaaagcgattaggtatgttttggtaattattatatttttagtgataggaagaattaaatttttttttcgttttaaagagaagtttttttgtattgttgtgtatatggtagaaaatggttatttaatttatagaataatattttgttattttagattgttaattgattagtattttaatgatttgtttttaaagttttagagggaaaatttgattggttaaatttggatatggtttattagtgatttaattatagtttattggaagagttatgttaagtagagttaatatggttttagagatatttttgtgtataggaggaatttttagttaagtggatgtggattgagttgatattttaaaaagtagttattgtagttattatagttgattatttttttgtgtttttaattaagaattttgtgtttaaaattatttttagagcgtatataagagaatgatttttataagggggttttttaaggaagaagagggtggtgattaagtaatttttattttgatttttggagttttgtttttttttaggtatttttattttgattattattgttattttattttaattttttggaagtaggggtgggtttttttttttaatatggaaaataataataacgaaaggaaaataaaataaaataaaatttttgtattgattttttattatattgtagggatacgtttgaattgaatagtttataaatattaaggataagtaaaagggaaataaataacggaaggtaataaaaatgtgatttataaaataaagatttttggttttttttttggatatatggtttttgttttattttatttgaaatttaaggaaaaagagggtttatattatttgaatatttgttttaaaagtatagaaaatgaaaaaaaaaaaaagttgttagtttttttagaattttttttgtaatattttatttttaagaaaaaaagataatattttttatttatttttagatttttggttatttttattttttaaagatttttaaaatatttatgaaaaatttaaaaaggtattagtataattagtgatataatttagatatttttaaggattttgtttttttaaatggatattaaaaaaattttttttttttttttattgttaatgtaaattatttttgaattatatttaagattttttaaatatatttgtaaataggggtttaatataatttatttgaattaatttgatatgtttttattaaaatttttttaagtgtgttttagtttgataagtatgatttatgttttattacgtttttttttttttgaatagagaatgtgatttgggtagtaaattttagtttaaatgaaattaatttgttgtttaaattattatatattttagattattaagtagttttaatattgttggttttttttttgtattattttttttagtatagttaattttagaaataattttttaattttaaaaattttgtatatttgttgtttaaatttatatgtgaaatgtaaaattaatattttttattaatagtggtgtgtatttatagttttagttgttttgaaggatgagttaggaggattttttgtgtttaggaatttgaggttgtagtgagttatgattatgttattgtagttaagtttgggtaaaagagcgagattgttttaaaaaaattttttttaattattaatatttttaatattagaagtgtgtaatatttaaagtttttttttacggtaaaaatttaatgtttttagtttaatattaatttaaagttattatagtggtatggtgaaggttaaaataagtatggatggtaattaggagatttaggtaatagtttttatttttgttattaagtaatattgttgttttgtttttaattagttaaggaaattattaatttttttttttatttataataggagttaagttagatattttaagttatttttagttttaaaattatatgatgttgaaatgtgaatatttatatttaaattaatttttataaagattgtttattgattgtatttttaagtttttgtatagttaatttttagttttattattattaattattttttatgtgtatgttagttattttaaatttattttgtagtaagttttgataaaaataaatttgtacgttaggtacggtggtttatatttgtaattttagtattttgggaggtcgaggtaggagggttacgaggttaaaagatcgatattaatttggttaatatggtgaaattcgtttttattaaaaatataaaagttagttaggagtgttggtatgcgtttgtggttttagttatttaggaggttggggtaggagaattatttgaatttgggaggcggaggttgtagtgagttgagatggtattattgtattttagtttggtgatatagcgaataataaatttgattatgtattttattataataaaatattatatatatatatatataaatgtatgtagtgtttttttaatattgtatttattatttaaaatggtattattgttgttcggatataagttggtttttttaaagaattttttagttattttaaggataagtatttttttttttttttttttgaggtagtgttttatttttattgtaatttttattttttgggtttaagtaatttttttgttttagtttttcgagtagttgggattataggcgtatattattacgtttagttagtttttgtatttttagtagagatagttttattaagttggttaggttggtttcgaattttcgattttagatgatcggttagttttggttttttaaagtgttgggattaaaggcgtgaattattgcgtttggtcggataagaatttttaattttttttgtaattttaaagtttaggaaattatttggtttttagttattagtaaaggtaattatatttcggtttttttaagtgtttttttatgtatttaattattatttttaattaaggtaatatattagatatataaatagttgtaagatttgtgaagtatatattagaaaaattttttattatatatatgataagttagagtttagaaattgtggttatagaattttagatttttaatatatgtttgttgaattgatgtatgagatttgagaaggtaaaaggatagacgttaagttttggtattaggttaatagagttatatggagcgtgtgagaagtatataatgttatattttttaagaaatatgttaacgaatgttttttttaagtagtaacgtatttaaataatttttattattttttttaggtagttttaataaaggtattgtatcgtagttttaaaaaattaaaagttacgcgtttatttatttatttattgtttagataaaataaaaataaaagttatttgtaggagatttcgaaattttttaatattatagtgttattaaaaataaatatttagatttattttatttagttatattttattaagtagttaggttagttttaatgtttattacgttaaggaaaggtggttttttttttttttcgagggtaatttcgttttattttttttttttttaaataaagttaaaataatttaaaaaaatttagttaatttttagttttgtatagttttttagtataagtaatagtagtttaattttaagaaaaagatattttaaaggtcgtatattaaaagttgttagggatttagtcgtttatattttatgaaaagtatagattatattcgtttagttagttgtgtattttaattggtcgagaaggcgcgttgggggttgggtttgagggtgagtaaaaggtaagattattagtttgggttgacgtgggggttaaggggagagtagaggaataatttgtaagatttgagtttcgaagttttttgggttatggaggttagaaaagggtttgttaaagttaggtttaagtttcggtaaggtggaattgggaaaaaaaaaaaagaaagaaaaaaaaaacgaaattcgaaaaaataatagcgagtaggttttcgagttttagcgtttatagtgaagtcgttaaacgtagtaggaaagtaggcgtgtgtttttttttttttttcgtttttttagagattcgagtttagttttttttttttatttttattttagtcgagtttaatggttgttttcgtcgcggagtcgggtcggaagacgtttcgttttttcgtcgcgttcgttttagggaattttttcgttttattttttttgttcgatgaggggtagtggttgtcgtcgttacgtgtgttggtagtcgttaagtgaggtcgtttttgcgacgcggtgatagttaaatggtgcgataggaggagttgtagtcgcggtcgtagcgttcgtacggagaggtttgaggcggtttttggcgtcgtttagagggagcgattagacgaatagttcggtgagggcggcgagaggaagttcgttacgagtgttttagtttttcgtcgttttcgatgaatcggacggaataagtcgcgtttttagtaggggttgcgtttttatgaatttttagttgttttttttttttttttttttttttttttttttatttttatttcgagtttcgtttcgtttttttttttcgttagaggcggtcgcgtttaggtgcggagtttatatcggagcgtaatggcgtttaatttcgaacggggggagattttgtttacggaattgtaggtaagggtcgcggttttggtgagaggcgttggcggaggagatagggagagagtttcgcgcggcgtcggggatcgaggaaagttttgcggtcgtcgcgtttttagttcgttaagtgcggaaatttcgggatgttattcgggaaatgtttttttcggggaatcgtttttttggggagtcggattttttttttcgttaaagttttggtttgttatcgttttggtttgattttgtttattagaggggattttatttttgtagttttgttgtagcgggagtttgttttcgtttggttttcggagaggtcggttcgtcgttttttttttcggtgttagagttattcgcgaacgtttttgttgtttttttttttcgcgcggtcgggtttcgtttcgtttttttttcgtatatcgttttttaaatttttttgaatgatttttaagttgtttttttgtttttttttttttttttagatttcgtataaagagcgtttttataatttttagtttttagataagtttttttaaaaaacgagttttattaaatgtttgttttattttagtagttttttttaggtgatagagttttttttttttattttgagggttattttttttttttttttttttttttttttttttttttaatcgagtgataaatatagggtgtttttttttgttatttttgtttagattcgggagtttagatgttgatgttttttagatttttatttttttttttatttgagtattagagaaagagttaataagttgtttattaatgagaaagtagtcgattaagggaaaatattgggtattatatgtttgtaaaagatgagagtaaagtagatcgtttagttaagttatgtcgagtagtaatgttattttttatttttagataaatatttgataatgtaggtacgattttttttagatttttatggtgtatatggggatttaagttattttgtcgggttttttattatttgggagtgttttagagatgt

SEQ ID NO: 234 - DNA, 5956 bp, Artificial Sequence
  chemically treated genomic DNA (Homo sapiens)
atatttttggaatatttttaagtaatgaaaaattcgatagggtagtttaagtttttatgtatattatagagatttaaagaaaatcgtgtttatattattaaatatttatttggaaatgggaaataatattgttattcgatatgatttaattaagcgatttattttgtttttattttttgtagatatgtggtgtttaatgtttttttttagtcgattgtttttttattagtaaataatttattagttttttttttggtgtttaaatgagagggaaaatgaaagtttgaaaagtattagtatttgagttttcggatttgggtaggggtagtagagaaaggtattttgtatttattattcggttaaaaaaaaaaaaagaaaggaaaagaaaagaaaaagataatttttaaaatagaggaaagaaattttgttatttgaagagggttgttgaagtgaagtaaatatttggtgagattcgttttttaaaaaaatttgtttaggggttggaagttatgggggcgttttttgtgcggagtttgaggggagggggagggataagaaaatagtttgggagttatttaaaggagtttaaggagcggtgtacggaggaaaggcggggcggggttcggtcgcgcgaagggagggggtaataggggcgttcgcgggtagttttgatatcgagggagggggcgacgggtcggttttttcggggattaggcgagagtaggttttcgttgtagtagggttgtagagatggggttttttttggtaggtagaattaaattaaagcggtggtaggttagggttttggcgggggagagggttcggttttttagggaagcggtttttcgagggaagtatttttcgagtgatatttcggagttttcgtatttagcgggttaggggcgcggcggtcgtagggtttttttcggttttcgacgtcgcgcggggttttttttttgtttttttcgttagcgttttttattagggtcgcggtttttatttgtagtttcgtgagtagaattttttttcgttcggggttggacgttattgcgtttcggtatggatttcgtatttggacgcggtcgtttttggcgaagggagaaggcgggacggggttcggggtgggggtgaggagaggggagagaaagaaaaaaaaaaaaataattagggatttatggaggcgtagtttttgttggaggcgcggtttatttcgttcggtttatcgagagcggcggggagttagggtattcgtagcgggttttttttcgtcgtttttatcggattgttcgtttagtcgttttttttgggcgacgttaggagtcgttttaagttttttcgtgcgggcgttgcggtcgcggttgtagttttttttgtcgtattatttggttgttatcgcgtcgtaaaagcggttttatttggcggttgttagtatacgtgacggcggtagttattgttttttatcgggtagggaaggtggggcggaggggttttttagggcgaacgcggcgagggggcggggcgtttttcgattcgatttcgcggcgagggtagttattggattcggttggggtgaaaatgaggggaaaggattgggttcgagtttttggggaggcgggaagaggaagaaaatatacgtttatttttttgttgcgtttaacggttttattgtgaacgttagaattcgggagtttgttcgttgttgttttttcgggtttcgttttttttttttttttttttttttttttttagttttattttgtcgaaatttgggtttaattttaataggtttttttttaatttttataatttaaagagtttcgggatttagattttatagattatttttttgttttttttttgatttttacgttaatttaaattaataattttgttttttgtttatttttaaatttagtttttagcgcgttttttcgattagttaaggtgtatagttagttaaacgggtatggtttgtattttttatgaaatgtaagcggttggatttttggtaatttttaatgtacggtttttaagatgttttttttttgaggttgaattattgttgtttgtattggagaattgtatagagttgagaattagttgggtttttttgggttgttttaattttatttaagggagggggaggtgggacgggattattttcgggaaaggaaaaaagttatttttttttggcgtggtaagtattaaagttaatttgattatttagtaaaatatagttaagtaaagtaaatttaggtgtttgtttttaatgatattatggtattaaggaatttcgaagttttttataggtagtttttgtttttgttttgtttgagtagtgaatggataggtaaacgcgtaatttttgattttttgaagttgcggtataatatttttgttaaaattatttggagagagtggtaagggttatttaggtacgttgttatttagaaagggtattcgttgatatattttttaggaagtgtaatattatgtattttttatacgttttatgtaattttgttggtttgatgttaggatttaacgtttatttttttgtttttttaagttttatatattaatttagtaaatatgtattgaagatttggagttttgtggttatagtttttgaattttaatttattatatgtgtgataaagaatttttttggtgtgtattttataagttttataattatttatgtgtttagtatattgttttggttgaagatgataattaaatatatgaaagaatatttggaaaggtcgggatatgattatttttattggtaattaaaagttagatggttttttaggttttggagttatagaaaggattaggagtttttattcggttaggcgtagtggtttacgtttttaattttagtattttggaaggttaaggttggtcgattatttgaggtcgggagttcgagattagtttggttaatttggtgaaattgtttttattaagaatataaaaattagttgggcgtggtggtgtgcgtttgtaattttagttattcgggaggttgaggtaggggaattgtttgaatttaggaggtagaggttgtagtaagagtgagatattgttttaaaaaaaaaaaaaaaaaggtatttatttttggggtgattggagaattttttggggaagttaatttatgttcgaataataataatgttattttaagtaatagatatagtgttaggggagtattgtatgtatttgtgtgtgtgtgtgtataatgttttattatggtaaaatgtataattaaatttattattcgttgtgttattaggttggagtgtagtggtgttattttagtttattgtaattttcgttttttaggtttaagtgatttttttgttttagttttttgagtagttgggattataggcgtatgttaatatttttggttaatttttgtatttttagtagagacgggttttattatgttggttaggttggtatcgattttttgatttcgtgatttttttgtttcggttttttagagtgttgggattataggtgtgagttatcgtgtttggcgtataaatttatttttgttaaggtttattgtagaatggatttgagatggttgatatgtatatagaaggtgattaataatggtggaattaagagttaattgtgtaagggtttagaaatatagttaatgagtagtttttgtaaaaattaatttagatataaatgtttatattttagtattatgtaattttagaattagaagtgatttgaaatatttagtttaatttttattgtaggtaggaaaaaaaattaatagtttttttagttaattagaagtaagatagtagtattatttagtggtagagatggggattattatttaagttttttaattgttatttatgtttgttttaatttttattatgttattataataattttaaattgatattaaattgaaagtattaaatttttatcgtagaaaaagattttaaatgttatatatttttaatgttaaaagtgttaataattaaaaaaaatttttttgagatagtttcgtttttttgtttaggtttgattgtagtggtatgattatagtttattgtaattttaaatttttgggtataagggatttttttgatttattttttaaaatagttgggattataggtgtatattattgttgataaggaatattaattttatattttatatgtaaatttaagtaataaatatataaagtttttaaagttaaggaattatttttgagattagttgtgttagggaaagtagtataaaagggaggttaataatattaaaattatttgataatttaaaatatgtgatgatttaaatagtaaattagttttatttaagttaaaatttattatttaggttatattttttgtttagggggaaaaaaacgtaataggatatggattatatttattagattgaagtatatttgaaaaagttttaatggaaatatattaggttgatttagatgggttgtattgggtttttatttataaatgtgtttagagaattttaaatatagtttagaagtaatttatattaataataaaaaaaaaagaagagtttttttagtgtttatttaagagggtaaagtttttaaaaatatttggattgtattattagttatgttggtatttttttaaattttttataaatattttaaaggtttttaagaagtagaaatgattaaaaatttagaaataaatagaaagtgttattttttttttttaaagatgggatgttataggaaaaattttagaaaagttaataatttttttttttttttattttttgtgtttttgaaatagatatttagataatatgggttttttttttttttaaattttaagtgaaatgagataggaattatatgtttagggaaagggttagaaatttttattttgtgagttatatttttattgtttttcgttgtttattttttttttgtttgtttttaatatttgtaaattgtttaatttaaacgtgtttttatagtatgatggagaattaatataagagttttgttttgttttgtttttttttcgttgttgttgttttttatgttagaagaaaaagtttatttttatttttaaaagattagaatgaagtagtagtggtaattaaagtaagagtgtttaaggaaaggtaaaattttagaggttagagtaagaattatttggttattattttttttttttttaagaaatttttttgtagaaattatttttttgtatgcgttttgaagataattttgagtatagggtttttgattaagaatatagaagagtagttaattatagtgattatagtagttgttttttagaatgttagtttagtttatatttatttgattgaaaattttttttatatatagagatatttttgaagttatgttgattttgtttaatatagtttttttagtaaattatgattagattattgatagattatatttaggtttagttaattagattttttttttaagattttggaaatagattattggaatgttgattaattggtagtttagagtggtaaggtgttgttttatggattggatagttattttttgttatgtgtataataatgtagaaaaatttttttttggaacgagaaaagaatttaattttttttgttattgggaatataatggttattaaagtatatttggtcgtttttgttatggaatttgtagtttggtaaaataggtataatgataaggtaaatttatagtattttaaatatagggtagataatttttttttaagtattttatatttaagttgagtttttataagtgtgtaaatgttaattgagggggaaaaggtgtaaagagttttttagggagagagaataatatagataaatagttataatgtgggagggggaaattttattgtaattattttaaggttaagtaggttatagtaaagag

SEQ ID NO: 235 - DNA, 6012 bp, Artificial Sequence
  chemically treated genomic DNA (Homo sapiens)
gatagaattgttgttgtatagataaattaataagtatttaaattttattattgatatttgtcgattttgatatttaatcggagtagtaaagtgtaaaggttagggattttagaatgtttttttttatttaaaagagtaagaaaagtatatagttttttttttgaatatattgtgaaataaatttaaaatgttatgttttttttagtttttgaggattttagtttttttggatattttagataattgattgattaaataaaataaaatgtatttataaaaatatatattattatattaatatggaaagattttatatagttaaaaaatatatataaaatatttaatttatgaagtaaatattttatttatagatatatggagtagagttttttagtttaaatatatatgagattaaataagtaaataattaaatttttaaaaagtaatgtaagataaagaaggttagtgtgtttataatataaataatttttaggattgtatgtttgaggataagaattagtaaaaagaatgtagatgatgattaaataaaatgtaattttaattttatgtaaattattttattttaattatgtagatttttattttagtggaatatgtatattatagtaataagtgaattttagaaataatgttatttaaaatttttttaagttaagaaaagtaaattatttttttttaagttattaaaaattatttttttttggttatgttattaagaaataaattttttagatttttttttttaaatatttgtattttttaaattaagtaatagaaattatatataagaaattttagtttaaaaatattttttttaggaagaaatttaaaaagtaattttgaattaattgtatttttattttgttttattaattttttaaaatttagttattgattttagtaaaatatattgaatgaaaaatgtaaagttttataaaatgatatgtattaaagagagtaaattagtttatagaataatattaataaatgggatatattgatatttatattagaagatgtttagttatgatatttatttagtgagaatggaggaaagtttgtatttttggaattaatgggttttgaaaataggattagaaaaattgtatttttatgaaaaataaatgtgttgttgttaatggtttttgaatttgaatgttggattgatttagtaaaagttaatgtgtataattagagttggtaattttaagtaatatagttttttgagtatattgaagttgaaggaaaaagtgttagattggtgattttattttgttttttatagggaatttgagtaaattttatgatattttggagttagtagatgttagtttttatgagaatagtagagtttttattgtttaggatggaatgatatttaggaaattaagttttattaaaaaatataatataaaaatgtaaatgtaggtaggtattttggatgtatataaaaagtatatggttaaaattattaacgttttggataaaaaattttgaagtttatttatgtttttaaaagttagagaaatatagtttgaagaaattattagtagtattattttttaaaattttttttaataaagatgtaatttttttaattttatttttaaggtttattggttttacggatacgaattttttttttattttttttttttgtaataatttaaatattggtagttggatttatttttttagtttgttgatgaatataagtagataaaaatgttttttaatagtgaagataattaaaatagtttaattttggttgaaatttagaaaaaataaatatttgtaatgtttttttttaatttgaagttagaagagtaagtaatataataatatttattttagttaatttatgtttgtttttaggaattatttttaatttataattttttacgaattatttgtttaaataatttgatttagaatgttgttgattattgatgttaaatttattggtttatattttgaaatttttttgaaaattaagatatttgtttttttttaagaatattttaagatatttgtaatatatttattagtatagttttgtgattatttgaatgtttattttttatttagataatgtgtgattatttttttatttattttgagttttagtttttttttaattatttttttatatttttttattttgttagagaaattaagtaaaatggagttaggtttgttttttttgttgttttaatattatagtaagtaatgtggttggtaggaatgatgtttggattaatatagttgataatagttagtattttggggtgattaatagttagtatttgtggtaggtattgtgttatgtgtttttatataaattaaattatttaatgtttataatttttgagtagtgtaattttttattttattaatgaggtgattgtggttttagttatagttagtggagatggttaggtaagaaattagttattttttttttgagttataatattaataagtggtagatttagtattaaaattagattagttttttttttagagtttatttatattttattatattaaagaattttagatttgttagtaataggaatttttatttttaaataaatttgtgggattttggtatattaataaatgaaaggagagttgtttggttgaaagtgaggtaggatgtttaattgtatttattagggtttagagagaattttaagttttttataagaagtagtttataagtttttgttttataatataatataaaattttttaagagtatcgtttatatataatatggaattattaaagttaattgattgtttttagtttataataatttttatttatttttgtttatatatttatttttatttttgtttatttttttggtttgtttgtatttatttaaaatttgaggtgtagttatattggtttttgtatttattttttatttggattatttatgattttatagttgaaagtttttttttaagggttttttgtttttttagggtttttgattttaggattatatttagaaatttggtttttttttttttttttttttttgttttttttgagatggagttttgttttgttgtttaggttagggtattgttttggtttattgtaaatttcgttttttgggtttaagtgatttttttgttttagttttttaagtagttgggattattggtgtttgatattacgttcggttaattttttgtatttttattagagttagggttttattacgttggttaggttggttttaaatttttgattttgtgatttatttgttttcgttttttaaagtgttaggattataggtatgagttattgcgttcggtcgaaatttggttttttaaagaataaattagtttttttttttggtgaaaaattaggttaataagtttattttttttttttttattgtttatgaaattattagtaagataaggtagtattttgttataaaattaggttttagtagaagattttttgttaggtgtttgtggttgatgtttttatttgggttttattttttttttgtgttattatttttatttagtttggtttgatgaataattatagatgaatattttaaagtaagtaaataataataaatttttaaattatatagttatttatttatttatttttatttttatgtatataatatttagtgtttaataatatataaaggaaggatatattggaattatatttttttttttaaatttttgatttttatattggtatataatttttgtaatttttaattttttaagttggtaaatgtttggacgaggggatatgatttttttagttatagatttgtatttttttttttttttatttttttttttttgttgtttatttaatttggataaagtatatagtgagtgaggttgagtgttatttaaattaggttatttttagttttttttttgatttttgtgaattattgtatatttttaaaatgatttgaatatataattattttttgaagataatttgataagattaatatttatcgttggaaattgttggaagtatttttacgtaattttgtatatttttgtaggtttatattatttttatgtgggtatgaaattttttttttttttttttttttttttttttttttaatttgagatggagttttaatattgttgttcgggttggagtgtaatggcgtgattttagtttattgtaattttcgttttttgggtttaagtaattattttgttttagtttgttaagtagttgggattataggtgttcgttattatgttcggttaattttttgtatttttagtagagatagggttttattatgttggttaggttggttttgaatttttgatttcgtgattcgtttattttagttttttaaagtgttgggattataggcgtgagtttaggtttagggtatgaaatttttttatttttgtaggtttatattatttttatgtggagtttttattagggtatgaaattttttttataaagtggtgtttttagttattgttagaagttttttatttttgttttgttagttaggattaaaataatgaaagtttattttatgaatataattaatataagttattatttattttttatattttttttttttttttaagattaaaatatttagaagagattaaaattagatttttttaaattttttaagttttttatgtttaattttaaagttgttagagatatatattaggtttattatagatattttttgtttatttatttttttgttatttagtaaaagtgagtagtagttggaaaattgttagattttaggtgtttataatagaaattgtaataattaattttatgggaattttttgtttgcgatggggaggtttagtagatatacgatttttttttttttgtttttttttatttatttttttgtatttagtaatattttatcgttttaaaagtaatgttaattttttagggtatttttagaatttttttttttgtttttttattaattatttttaatattttatataaattttttatattattgataaattatagtttaataagaagttatttatattttttttaaaatttttgtaagttttataattgataagtattttaagttttttttttttagagtttttatttaattttatattgaaatgttttttgtatattgagaagatttttaaatgtatttttgattttttttttttttttggatgttggatttatatatttagttttagatgttatttttaagttgaatatttagtagtatattaaatttaatatggttaaagtagaaattttatttttttttgaatttgtttattttttattttttgtgttaattattggtattattattagtttaattgtttagaaatttgggagttttttgtgatatttttgtttttttattttttgtaaatttttgatttatttagtaagaattttcgttaatatagagtttgtagttttttattttttagtattttttttataattataggagtttaattcgtgtttttagatttaaaaatagtaatagttttttatttagtgtttttatttttattttttttttttatattttatataaaatttagagtaattttttaaaatatgttaattaattttattattttttgttttaaaattttttaatgggttggtagtgtattgagaattgaaataaaaatattttattatggtttttaagatttttggtaatttggtttttattagttttttgattttattttacgtatttgtttttttttttttatgttttgaaaatgttaaatatatttttgtgttagagtttttgtattttttgttatttatgtttataatgttatttttttagtttttttgaagtttattttttttattatttagattttggtttaaatgtaaattttttagtgaagtttttttttatttttagtttagagtagtgtttatttttttatttttttttttata

SEQ ID NO: 236 - DNA, 6012 bp, Artificial Sequence
  chemically treated genomic DNA (Homo sapiens)
tgtgggaggagggatgaagaaatgggtattgttttggattgggaatgagagaagattttattgagaagtttatatttgagttaaaatttggatgatagaaagggtagattttagaagaattaggggaataatattgtaggtataggtaatagagagtgtaaagattttaatatagaaatatatttaatatttttaaggtataggaaaagaggggtaagtgcgtgagatgaggttagagagttaatagaaattaggttattaggagttttgaaagttatggtaaagtgtttttattttaatttttagtgtattattaatttattggaaggttttaaagtagggaataataagattaattagtatgttttaaaagattattttggattttgtgtggaatataagagaaaagagtaaaagtggagatattgggtaggagattattgttgtttttgagtttagaaatacgggttagatttttatggttgtagaagagatgttaagaaatgggaaattgtaggttttatgttggcggaagtttttgttgaatgagttagagatttataaggagtgagagaataagggtgttataaaagatttttaagtttttgagtaattggattgatggtggtgttaataattgatatagaagatagagagtgagtaagtttagggagaaataagatttttattttgattatgttgagtttgatatgttgttagatatttaatttagaaatagtatttagagttggatatatgggtttagtatttagaaaagagaagagggttagaaatatatttagaaatttttttagtgtgtagaaggtattttaatgtgagattagatgagagttttagagagaaagagtttaaagtatttattagttatgagatttataggaattttaaaaaaagtatgaataattttttgttagattatgatttattaatagtatgaaagatttatgtagggtgttggaaataattgataaggaaataggagaaggaattttaaagatgttttagagaattaatattatttttaagacggtgaaatattattgaatgtaaaagagtgaataaagaaaaataagaagaaaaaaatcgtgtatttattggatttttttatcgtaaatagaaaatttttatggagttggttattgtaatttttattgtaggtatttgaaatttaatagttttttaattgttgtttatttttgttgaatgataagggaatgaataaatagagaatatttataataaatttggtgtatatttttggtaattttgaaattgaatatagaaaatttgaaggatttgggaaaatttggttttaattttttttggatgttttaattttggaaaagaaaagaggatatagaaagtgaatagtagtttatattaattatatttatgaaatgggtttttattattttaattttggttaataagataagaataagggatttttagtagtgattgggagtattattttgtaaagaaagttttatgttttaatgaagattttatataaaagtgatgtggatttgtaagggtaagaaagttttatgttttaggtttaggtttacgtttgtaattttagtattttgggaggttgaggtgggcggattacgaggttaggagtttaagattagtttggttaatatagtgaaattttgtttttattaaaaatataaaaaattagtcgggtatggtggcgggtatttgtaattttagttatttggtaggttgaggtaggataattgtttgaatttaggaggcggaggttgtagtgagttgagattacgttattgtattttagttcgggtaatagtgttaagattttattttaaattaaaaaaaaaaaaaaagaaagaaagaaaaaaaaagttttatgtttatataaaagtgatgtggatttgtaagggtatgtagagttacgtggaggtatttttaataatttttaacgatgaatgttaattttgttaggttgtttttaaaagatagttgtatgtttaagttattttggaaatatataataatttataaaaattagaaaaagggttgagaataatttgatttgagtggtatttagttttatttattgtatgttttgtttaaattaaatggatagtagagaaaggaaagtgagaaaaaaaaaaagtgtaaatttgtggttgaaaggattatattttttcgtttaaatatttgttagtttaagaaattgaggattatagaaattatatattaatgtggaaattagagatttgagggagaaagtatggttttagtatattttttttttatatattattgagtattggatgttatgtgtatgaagataaagatggatagatggatgattatatgatttaaaaatttattgttgtttatttgttttagaatgtttatttataattgtttattagattaggttaaataaggataatggtataaaagaaaaataagatttaaatggagatattaattatagatatttggtaaaaaattttttgttaaaatttgattttgtgataaaatgttgttttattttgttgatgattttatggataataaaaggaaagaaggtaaatttgttaatttaattttttattaagaagaaaaattaatttgttttttaagaaattaaatttcggtcgggcgtagtggtttatgtttataattttagtattttgggaggcggaggtaggtggattataaagttaggagtttgagattaatttggttaacgtggtgaaattttgattttaataaaaatataaaaaattagtcgggcgtggtgttaggtattagtaattttagttatttgggaggttgaggtaggagaattatttgaatttaggaggcggagtttgtagtgagttaagataatgttttagtttgggtaatagagtaagattttattttaaaaaaaataaaaaaagaaagaaagaaagaaattaaatttttaggtatgattttagagttagagattttgaaaggataggaggtttttgaagaaaagtttttaattataaaattataaatgatttaggtgaggaataaatgtagaaattagtgtgattatattttaagttttggataagtataaataggttaagaaaatgaataaaaatagagataggtatatgaataagagtaaatagaaattattataagttaaaaataattaattagttttaatagttttatgttatatatgaacgatgtttttggggaattttatgttatgttatagaataagggtttatgaattattttttatgaaagatttagggttttttttaggttttaatgggtatagttagatattttgttttatttttaattaagtagttttttttttatttgttaatatattagggttttataaatttgtttgaaaataaaagtttttattgttaataaatttgaaattttttagtgtggtaggatgtgaatgagttttggggaaaaggttgatttaattttgatgttaaatttgttatttattaatgttgtggtttagaggagagatggttggttttttatttgattatttttattaattgtggttggagttatagttattttattggtaaagtaaaaaattatattatttaagagttgtgaatattaaatgatttagtttatataaaagtatataatatagtgtttgttataaatattagttattaattattttaaaatattagttattattaattatattagtttaaatattatttttgttagttatattatttattataatgttaaaataatagagaaaataagtttaattttattttgtttggtttttttagtaagataaaaggatgtaaaaaaatggttaaaagaaaattgaagtttaaaataaatgaaaagatggttatatattatttaaataggggatgagtatttaaataattataagattgtattgatggatgtattgtaaatattttaaagtatttttggagagaaataaatgttttgatttttaaaaagattttaaaatgtagattagtgagtttagtattaataattagtaatattttaaattagattatttaaataaatggttcgtgaaaaattatgaattaaaagtagtttttaaaagtaggtatgagttaattaaaataaatgttgttatattatttgtttttttaattttaaattggaggaggatattatagatatttgttttttttgaattttaattaaaattgaattattttggttgtttttattattggaggatatttttatttgtttatgtttattaatagattgaaagaataaatttagttattagtgtttaagttgttataagaagggagaatgaaggaaaagttcgtattcgtggaattaatgggttttgaaaataggattaaaagaattatatttttattaaaagaagttttaaaaagtagtgttgttaatggtttttttaagttatatttttttaatttttaaaggtatgagtaaattttaaaattttttgtttaaaacgttgatgattttaattatatgttttttatgtatatttaaaatatttatttgtatttatatttttatgttatgttttttggtaagatttgattttttaaatattattttattttagatagtaaaaattttgttatttttataagaattaatatttgttggttttaaggtattataaaatttgtttaggttttttgtagaaaatagaatgaaattattagtttaatatttttttttttaattttaatatatttagaaggttatattgtttagagttgttaattttaattgtgtatattggtttttattaagttaatttaatatttaaatttagaaattattaatagtagtatatttgttttttataaagatgtaatttttttaattttatttttaaggtttattggttttagaaatataaatttttttttatttttattggatgagtgttatagttaaatattttttagtatgaatattaatatattttatttgttgatattattttataaattagtttattttttttaatatatgttattttatgagattttatattttttatttagtatgttttattaaaattaatgattaaattttgaaaagttaataaaatagaatagaggtataattaatttaaagttattttttgggtttttttttggaaaaaatatttttgagttgaaattttttgtgtgtggtttttgttgtttgatttggaaaatataaatatttaagggaaagaatttggaagatttattttttggtgatataattaggggaaaatagtttttaatagtttaagaaaaaataatttgttttttttggtttagaaaaattttaaatggtattatttttaaaatttatttattattataatatatatattttattaggataaaagtttatataattaaaataagatgatttatatggaattgaaattatattttatttaattattatttgtattttttttattaatttttatttttaaatatataattttaaaaattatttatgttgtaagtatattgattttttttgttttatattattttttaaaaatttaattatttatttatttgattttatatgtatttgaattaaaaagttttgttttatatatttataaatagaatatttattttatgaattaaatattttatatatattttttaattatataaagtttttttatattaatataataatatgtatttttataaatatattttgttttgtttaattagttagttatttagagtatttaggaaaattgaagtttttaaaaattgaaaaaagtataatattttagatttgttttatagtgtatttaagaaaaggattatgtattttttttatttttttagatgaagaagaatattttaaggtttttaatttttgtattttgttgtttcgattgaatgttaaagtcgataagtgttaataatggaatttgaatgtttgttggtttgtttgtgtaatagtagttttatt

SEQ ID NO: 237 - DNA, 8964 bp, Artificial Sequence
  chemically treated genomic DNA (Homo sapiens)
agagtcgaatgcgtgattttattgtttagataaggggtttatggggggatttagtttttgttttgttcggaatagtttggttagttagtttttttgtgtatagattgttgttataaagtatgagattattatgtgttatataatagattattaggatggttgaatagtagaaaagaattttattggtaatattagtttgtatatcgggaagagatagtttttggcgtgtatggaaggtgttttttttttaaagagggaaagtgtaggttggttttatgttttttaggttttatattatataatagagttagatatatttagaaagttttggggaaaaatttatatatatttatgaggggagttaagtgtaggtgttaggggtaaatatatgtttaatatatattttatgtttattttggggtatagttgtagtattaaaattagattttaaatttggttttttatattaaaaggtaaatgataggatataatgatatttagtgtgtagtatttgtaagttgttgaaattggtttggggtttgtatttgtttatcgggaaagaatgtttggaagtttggttttttgtttaattagagttgtaggggtttgggttgtaaattagagttaggaagagttttaaatttcgtttgattatttttgttattagggagattaataagggtgtggttttttttgtagttgtaggaatttaggaggttgtgatgttagttaagttttgaattttcgatttttgggtaatttttgtttttttaattttagaatttattttagttgatgaaggggtaattgttttggttttttagattatacgtgaatggagagtgaagatgagatcgattgaaatttagagtgtatagaggatagattatatagtttagttttgaggtaggttattttagtatatatttttgtttatagaaatttttatttttggttaaatatttagggaaatttttttttttttattatttgtttcgaatattaaaaggtaatttatgaaaattttttatgttaattttttttttgtgtatttattatatatttttttggtttttaatatagatggatagatacgtatatttttatatttatatatatatatatataaatatatatatatatatttatatatatataggtgtgtatatttgttaaatgtggtaatttatatatttagtagtattgtatgaaagtgtatgatttattttgtttttattaatattaagtaatagtattttaaaaatatttgataattgtatgggtaaaaatatattattgtttttattatatattttttttttttttttttttttttttttaagatagagttttgttttgttgtttaggttggagtgtaatgatatgattttggttttttgtaatttttgtagggagtaaagcgatttttttgttttagtttttagagtcgttgggattataggtgttttttattatgtttggttaattgttgtatttttgtagagagggggttttattatgttggttaggatggtttggaatttttgattttaagtgattttttcgttttggttttttaaagtgttgggattataggcgtgagttattatgtttagattattttattatatattttaaatattataattttttttatagtttaaattaggatttaaaatgttaatttttttttaaataaaatgtattattaatttttaatgttattttatttttagttgtgtttgtttaattgtaaatgtttaaaagagtttaaatattatagaattaaagttattttaattttttaaaagatttgattatttttttttagtaatttgattattttaagattttaatttaatatgtagtttttttatatatattttttttattttatttttataatttttgtatttataatatatgttttaaaatattaattgtatatatttttttttttttggtttttgaattattatatagtaaaattgatttttggtttggtgtagttttgtgaatttaagtttagatttttgtgattattagaataattaagtcggagaatagttttgtttttttttaaaatttgtttatgttgtttttttttgttgtaatttttggtaattattgatgtttttttttatatagttttgtttttttaggaatggtatatgtaattatatagtattttattttgtatgttttaaattgtttatttggttaaatatttttttataattagttggaattatgatttttgtattttgtatagtttgtgtttttgtaatttatttttttgggttataaatagtgttttttttataaatttgtatatttatattatgtaagaatggcgtttatttatttttgttatattaattatagttatttttttgggtaggtttttattgttaagtttggttattttttttaaatgtataagattttattaataggaataatatttgataaataatattgtaatattttggtgatttagtttgatgtagtatttttaaatttgggaaaggttgtaaaaaaaaaaaaaaaaaaaaaaaaaaaaaaaaaagatgttattttaaagatgtatttttttttggtatgtagaagttggaaatagattaaatatgtagttatagattttagtaacgtagatcgtagagttattgttaataggatgttatgtaagaatgataaggaagtttgagaaaatgttagagaaatttgaaaaaaattttatagtaaaatgttaatttaaaaagttaaatataattttatatttataggatgattatagtatgtaagaaaaaaaaaaatataaaatttgttaatttaaaaagattagggaaaatagattagaatagtaattgattttttttattggtggaaatttggagagattttttattaattttgtgtgttttttttattttttattatgattatttaaaaagtgttttgaattatatagagaaaagtattttgtgtagttcgggtgtaaaacgttgttatttgtttgaaaaatttatatttgagtttgcggttttattgaatgatgtgtgaagattattatataaatatttattttgttttttagatgttaggtgtatgttaggttatgtttgatatatatttttaaaggtttgtgagtagatttttatagaatagtgtaagtgaatttggtgaaacggtcgtttaatttgtattgtttattaagtaagaaattattgtttaggaagatttttagggggatagagggttttgttttaatttttttttttgttgtaatggaagttttggttattttggaggtttttattttttttttttggggtagtattttttagacgtttgttgggttattgttgtttgattagaaatttattttgggaatagtagggtgatattagaaaaggttagggtgttttaattttggttttgtgagttagtgatttttttagatttaaatagaattaaggaaatttttagaaagttttaatagggtaaaaattttcgtaattgaagatgatttttagtgattttttttgatttgtggagaaatgaagttttgtttaaaagatttaattggtttaggaaagaagggatttttaaagaaattttttttagagaatttatagttgttagtttcgtttttgtttgggaattttaaatttatagggtaaagggcgttttttaaagataaatttgtaagttatttatttgttaatttagtaacgtgatagatacggaatttagtaaattatgatgtttatttaattattttttttagataaaatttttaaattttgtaggaaattaggattttattaatatttgtgaaattaatgttcgttaaaagtttttaatttgttttttttgtggagttaaagaatattggtatttagtatattggagattttttttgttttagttagatgaggtattataggtttaagatttttaggtatgttattgattttttttttaggtttttattattttaaatagttttttttttttatataaaggtagaaaagataattaatgttttgttttttatttttggtttatttatgaaagtttagaaaaaattataagtataaattattaaaaagagagacggagtaaggaagtaatttttttgttgaatattagatgatagttttagattaatgggatttcggaaaagtaggtaaaaaagaagaggtatttagtttatataagtggttagaatatttaataatggaataatagatgaagaattagattagatttttggatttgtagttaatattttgataattattatttaaattttttggaaagtataattattgatttttgggtttttatgaagtattttgtttatttttatatgagaaagttttattttatagtagttaattagtttggagttttttacgtggtttgtgatgtttaaaggtttagagtgtgtgtgtgtgtaattgtgaagaaagtagatttttttgaaaatgtttagagtaaataaggattagttgtcgaatgttttgggttaattttattatatatataaatagattatgtaagaattttgcggtgttatatttaattagtgtgattaaaatagattcgttttatataaatttattttttgattattgtgtgttgttttttgggtatttatttgaataatagaagatataaaatattggaaaatttttgttttattttttaattattgggtttaattttattaggttgaatggaattaatttttgagttattttttaaaagtaaggttgagtgtagatttttagaaagtttttttttttagtaagttagtgtgtggttttgggtgagtttagtagtgttttttgtagaaggggaagtgaaaatatttgtttatatggatagtggatttatgtgaggttttggttgtttatgataaagtattggttaagtagatatggggtattaaaaataatattttttatagtttttaaatagcgtttgttttttgtttttttttagggcgtaattatgtcgttattttttcggattggtttgtttaattttgattgcgggttttgttagttttgttagggcgaggttgttaatttttattgtgttgtgttcgttaaagagtatgtcgaattaggtaagtttgaggggatttttaaagcgggggaggaggaggagaattttgttatgaattgtgtatgaagtaaggttttttaggatatttgatattatttggtggaattaaattttgttatttaggacgttgatgtttagtaaagttaaggatttttttatggatatatatttcgtgatggattttaaattaggattcgatggtttatcggtgttttattgtattgtattattttttttatatatataaagggaaagagaaagttgggttgaggaaattatataaggagttaatgggaaggaattttaatgagttgaagtagaatatagttttatgtggttaagtttggttattttaaataagtttaggtagattaagattgtataattttttaattaattttaaagattgtttattgttgttttggcgaatttttagtggatattataaagtatttataattagttattagaatttaaattttagaaaacgtatttttgtatttattaaggttttggttgaatgaaagaatagtgatgttttattaagtttaaatataggtagtttaaggtgagggggaaagtgggatagttatttaacgttttgtttgtgggtttagaatgttttattttaatagttttatgtgtagggaatgtttttgtggttacgtcggtcggtttttattttttaagatttttatttttgtattggaagtttgttacggatttttaaaggaaaagtaggagggagtttagattttataatttttttgattgtatatttttttttgtttttttacgtgtattttgattttagtagatattttgtagggaatgataatgatgatggatgtaggtttgtagtaattatggaagttattatagtttatttatataaaagtgtttacggagagattattgtaagagtgttgggattagagtatagagggaaaaaaagttaaataagtaagttgaaggaatttaggaagattgttttttttttagagtatttatttttgtagaagaaagtggtaataaataaaaatataaatagtaggtaatgaaggaataaaaagtagtgtaaagaagagagggattgggggtagggatgtgtgttattttatatagggttgttttgtaaaggtttgtgagcgagggatatttgtagatataagaagaaattgatttagattttgagaattttttgttagatgtttagagtttagattttggggtttttaaatttattattttgtattttttattaaaagtttttttgttttatagttgattttgtttttttagttattttgaatatattaaagttagagagattgtttgaattattttgattttttttttgtttagagtttttttttgtttagttaaaagtgtgaatgttatttgtttttaatttaaaattttttagatgttatagatatttttgaagtgtaaaacgtttgagttttttaaagtcgtttttgatttaatgggttttttggatttagttttttttattattttaggtttttttgatatttgttttttgagggtttttttttttttttttttttgtatttggttttgtttttgaatttggtttaatgagttatgtggatcgagagtttttgttagaaaagaaggaaattggtttttttaaatattagtttgtggagttggagggagtttagagatttttgtttttgattttattttgggtttgttttgaaaagaaattattttgaatattattatttaatatttatttttataggatttaaatatattttagtttttggggtgtaaggttgtattttttataatgagttaatagaataaggataaataggttacggggttgcggggttgtgagtcgttaaaacggtaatattttatatagatagggttttttgtttaggtgattataaacgtggcgaatgaaaatgtaaaaagtgttttgttttggggatttttgtttttttttagggtatttttggtttttttttttaggtatagagaatggttattattaaaaggaagtatcggaaagggaagttttaggtttgtggaagtaaaatgttatcgtgattattaatattgtcgttggtttttaaaaagtttaatttttagtttaattttttttttattaatttataaaaaatgttttttttttattttacgtttagtagttttatggtttatgttttttttagttaagtttatttaatatttgagttttaagtttatttaattttttgtatattttcgaaataaatattaatttaataaatgttaaatgtttgttttgtttagttttgtgtgttggatagaaggggttttcgaaagttagaagggttttattttttggttttaagtagatttttttttttttgtttaatcgatatttttgaattgttaaatttgttatttaatgtgtttatgttataagaaataaatatttaaatgtaggtttttgtttttgaaatgattaaagaataaatattagagaaaatttaatgtgcgtgaaagataagaaaaaattttttaattagtaaattttttgttaattatagagcggttttagggaggttttttttagattgatttttttgtttatagatttgttattatttttagggtttttgtttatttgtttttatttatttgtaggttggtagtcggttttagttttgttggttttatgggtaaagattagtattatttttttgatttgtttattagtttttgttgagggtgtatggtatatgtaaaatgtatttttatttaagaattagagaaggaaataatggtttattatgttttaaagattattgttttttattgtatttatgttaaatggaaaaaaatgtaaatattttttaaaggagtatttattatgcgttgaaattacgttattatgttttttagatgaatatatagtagttttgtattgattatgtttaagttggggttagtgaggttaattagttataggattaatattatagattaataaaggagaattttaaaggtataaaagattttttaaaaagtttgttgtttaggtgtttaaatttagagtgaagtaattaattgttgaataggaaaataatattttgaaattaatttaatagttttatagatagttgtttttggttgattatagaaatggatttttttgattttaaagtttggaatttatatttgttttatttgagttttttttttaagaaaggatttttatattttttaaaaaaaatattaaagaattgaaatttattagattatggtatttagagattgaagcgttaggtttttggtttattatgattgtttatttattttttttaagtttttgtttttttatataaagttatattttttttttgttatataaatttttagttttagttggttatggagatggattttagattgagtttttattttttcggttgtagtatttaattaaagtttttttttttggtaattttcgttattttagttattggttttttgtgcggtgagtagtagaatttagaatgtttggtgttttggtaataatttttagtttaaggtattagtagattgttgtttgaattattaacgttggatttataaggtttaatgtattattttgtatttggattcggggattgttttattttgttttatattgtttttgattgtttatgtgttatttttgtttttttaatagaattttatattttagagaatagagggagtaggtgttattgttgagttgaattgaattattttttaggtttggttgaaggaataatgagattttacgtttttgtttttaga

SEQ ID NO: 238 - DNA, 8964 bp, Artificial Sequence
  chemically treated genomic DNA (Homo sapiens)
tttaggaatagaaacgtaaggttttattatttttttagttaggtttggaaaataatttagtttaatttaatagtagtatttgttttttttgttttttgggatatagaattttgttgggaagataaaagtagtatataaataattagagataatatgggatagaatgagatagttttcgggtttagatgtaaggtgatgtattgaattttataagtttagcgttgataatttagataataatttgttaatgttttggattggaaattgttattaaaatattaggtattttaagttttgttgtttatcgtatagaaagttaatgattgagatgacgagaattgttaaggaagaaggttttagttgggtgttgtagtcgaggagatgagagtttagtttgaagtttatttttatgattaattaaaattagggatttatatagtagggaagaaatgtaattttgtatgagaaaataggaatttgggaggggtaagtaagtaattatgatgaattaggggtttggcgttttagtttttggatgttatgatttggtgagttttagttttttaatattttttttgagaggtgtggggatttttttttgaggaagaaatttagataaaataaatgtaaattttaagttttaagattagaagggtttatttttataattagttaaaaataattgtttatgggattattgggttggttttaaaatgttatttttttatttaatagttagttgttttattttgggtttaaatatttgagtaataaattttttaaaaaattttttatgtttttgagatttttttttattaatttgtagtgttgattttatgattgattaattttattggttttagtttaaatatagttaatataaaattattgtgtgtttatttgaaagatatagtggcgtaattttagcgtataatgaatgtttttttaagaaatatttatatttttttttatttgatataaatatagtaagagataatgatttttaaaatataatgagttattatttttttttttaatttttgggtgaagatatattttatatgtattatgtatttttagtaaaagttgatgagtaagttagagaggtggtgttgatttttatttatggagttagtaaggttgaagtcgattgttagtttgtaagtgagtaaaggtaggtaggtaggagttttggaaatagtaataaatttgtagataggaaggttagtttaggggaaatttttttaaagtcgttttgtgattggtaaagagtttattaattaagaagtttttttttgttttttacgtatattggattttttttggtatttattttttaattattttagaagtagaaatttgtatttgagtgtttgttttttgtgatataagtatattaagtggtagatttagtaatttagagatgtcgattaagtaaaaggggaaaaatttgtttaaagttaggaaataaagtttttttaattttcgagggttttttttgtttaatatataaagttaaatagagtagatatttagtatttgttaaattaatatttatttcgggggtatataaggagttgaataagtttgaaatttaaatgttagataaatttggttaggaaagatataaattatgagattattaaacgtggaatagaaaggggatattttttgtgggttggtaaaaaaaaaattggattggagattgggttttttagaaattaacggtaatattaatgattacggtaatattttatttttatagatttgaagttttttttttcgatatttttttttgatggtaattattttttgtgtttggagaaaagggttaaaaatattttgagaaggggtaaaagtttttaaagtaaggtattttttatatttttattcgttacgtttgtaattatttaaatagagggttttatttatgtagagtgttatcgttttaacgatttataatttcgtagtttcgtagtttgtttgtttttgttttgttggtttattgtggaaaatgtagttttatattttaagaattgaaatgtgtttaaattttgtagaagtaaatattgaatgataatatttagagtgatttttttttagaataagtttaaaataaaattaaaagtaaaaatttttaaattttttttaattttataggttaatatttaggaaaattagttttttttttttttgataaggattttcgatttatatggtttattagattaagtttaaaggtaaggttaaatgtaaaaaaaaaaaaaaaaaaaagtttttaggaagtaaatgttagggagatttgagatggtaaagagaattggatttaggagatttattaagttaaaggcggttttgaaaaatttagacgttttatattttaaagatgtttgtgatatttgaaaggttttaggttgggagtaagtggtatttatatttttaattaaataggagagaattttgggtagaaaggaaattaagatgatttagatagtttttttggttttgatgtgtttagagtggttggaaggataaagttagttgtgaagtaaaaaggtttttggtgggggatgtaaaatagtaggtttgggaattttagaatttgaattttgagtatttggtaggaggtttttaaagtttgagttagtttttttttgtatttgtaaatgtttttcgtttataggtttttgtaggataattttatataaaataatatatatttttgtttttagttttttttttttttatattgttttttgtttttttattatttgttgtttgtatttttgtttattgttatttttttttgtaagaatagatgttttaaagggaaggtagtttttttgagtttttttagtttatttgtttgattttttttttttttatgttttggttttagtatttttgtagtggttttttcgtaaatatttttgtgtaagtgaattgtgatggtttttatagttattgtaagtttgtatttattattattattattttttataaagtgtttgttaaaattaaaatgtacgtagggaaataagaaaaggtgtgtagttaggagagttgtgggatttaaatttttttttattttttttttggaaattcgtggtaaatttttaatgtagaggtgaagattttggagagtggaagtcggtcgacgtgattatagagatattttttatatataagattgttggaatggaatattttgaatttataaataggacgttgggtggttgttttatttttttttttattttgagttgtttgtatttgaatttgatgaaatattattatttttttatttagttaagattttagtgagtgtaaaagtacgttttttgaaatttggattttaatggttaattatagatgttttgtaatatttattgaagattcgttaaagtagtagtaagtagtttttagagttggttggaagattatgtagttttaatttatttagatttatttaaagtaattaggtttaattatatagggttatgttttattttagtttattagagtttttttttattaattttttatgtaatttttttaatttagttttttttttttttttgtatatgtgggaaaaatgatatagtgtaatagagtatcggtgggttatcgggttttggtttagagtttattacgaaatgtgtgtttatgaggaagtttttggttttgttgggtattagcgttttaaatggtaggatttggttttattagatgatgttaaatgttttggaagattttgttttatatatagtttatagtaggatttttttttttttttttcgttttgaaaatttttttaagtttatttgattcgatatattttttgacgagtatagtatagtaagggttaatagtttcgttttgataagattggtaggattcgtagttaaagttggataagttaattcgaagaaatggcgatatggttgcgttttggaaaaagataaaagataaacgttgtttgggggttataaaagatattatttttggtgttttatgtttatttaattagtgttttattatggatagttagaattttatataggtttattatttatgtgaataaatgtttttatttttttttttgtagaggatattgttggatttatttaaaattatatattgatttgttgaggggagaggttttttggaagtttgtatttaattttgtttttgagaagtaatttaagagttagttttatttaatttaatggagttaggtttaatggttggagagtgaggtaaaagttttttaatattttatgttttttgttatttaagtaggtgtttaggaaatagtatatagtaattagaaaatgagtttatatagagcgagtttattttagttatattagttaaatatgatatcgtaaaatttttatatggtttatttatgtgtgtaatgggattggtttaaggtattcggtagttgatttttatttattttggatatttttaaaaaggtttgttttttttatagttatatatatatatattttaagtttttgaatattataaattacgtagaaaattttaaattaattgattattataaaatagggtttttttatataaggatgaataaaatattttataaaagtttaaaaattagtaattatgttttttaagaggtttagatgatagttattaaagtgttagttataaatttaggaatttagtttaattttttatttattgttttattattgagtgttttggttatttatgtgaattagatatttttttttttttatttattttttcgaggttttattaatttgaaattattatttgatatttagtaaaaaagttatttttttgtttcgtttttttttttgatgatttatatttataattttttttaagtttttataagtaagttaaagataagaaataaagtattgattgttttttttgtttttgtataaagaaagaaaattatttgaaataataaagatttggaaggagaattagtaatatatttggagattttgggtttgtaatattttatttagttaagataaaagggatttttagtatgttaaatattagtgttttttgattttataagagagataaattaggagtttttgacgggtattaattttatagatattaatgaagttttaattttttgtagagtttggaagttttatttaaaggagatggttgggtaaatattatgatttgttgggtttcgtatttgttacgttgttgaattagtaggtagatgatttataaatttgtttttaggaggcgttttttgttttgtgagtttagaatttttaggtaggagcggggttaatagttgtgagttttttggagagagtttttttgagaatttttttttttttgggttaattgggttttttagataaaattttatttttttataaattaggaaaaattattaagaattatttttagttacgggagtttttgttttgttgggattttttgaagatttttttaattttgtttgagtttagagggattattaatttataaagttagagttaaagtattttgattttttttggtgttattttgttatttttagggtgggtttttaattaggtaatagtagtttagtaggcgtttgggaaatgttgttttaggaagagaagatggaaatttttagggtgattagggtttttattatagtaaggaagagagttggggtaaaattttttgtttttttgaaggtttttttagataatgattttttatttaataagtaatgtagattaaacggtcgttttattagatttatttgtattattttgtaaaggtttgtttatagatttttagaaatgtatgttagatatgatttgatatatatttgatatttagaagatagaataggtatttgtgtggtaatttttatatattatttaatagaatcgtaagtttaggtgtgagttttttaggtagatggtagcgttttatattcgaattatatagagtgtttttttttgtgtagtttagagtattttttaggtgattatgatgaaaaataaagaagatatataaagttagtaaaaagtttttttagatttttattaataaaagaaattagttattattttgatttattttttttagtttttttaaattagtaagttttgtgttttttttttttttatatgttatgattattttgtgggtatggaattatatttggttttttaagttaatattttattataaaattttttttaagtttttttgatatttttttaggtttttttgttatttttgtatgatattttattgatagtagttttacgatttgcgttattaaagtttgtagttatatatttagtttgtttttaatttttatatgttagaaaaaaatgtatttttaagatagtattttttttttttttttttttttttttttttttttttataattttttttagatttagggatattgtattagattggattattagagtattataatattatttattaagtgttatttttattggtaaggttttatatatttaaagaaaataattaaatttaatagtaaagatttatttagggaaatagttatggttagtgtaatagaagtaagtaaacgttatttttatataatatgggtatataaatttgtaagaaaggtattgtttatgatttaagaaaataaattgtaaaggtataagttatataggatataaaaattatagttttaattaattgtggaaaaatgtttagttaggtgagtaatttaagatatgtagaataagatattatgtaattgtatgtattatttttgaaaagataaaattatatgaagaaaaatattagtggttgttaggagttgtagtagggaggagtagtatgagtaaattttggggaaagatagaattgtttttcggtttgattgttttagtggttatagaagtttagatttaaatttatagaattatattaagttaaaagttaattttattgtatgataatttaaaaattaaaagaaaagaaatatatgtaattggtattttaaggtatgtgttataaatatagagattatagaggtaaagtaaaaagaatatatatgaaaaagttgtatattaaattaaaattttaaagtaattaaattattaaagggaaatgattagattttttaaaaaattaaaatagttttggttttgtggtatttaagtttttttgaatatttgtagttaggtaaatatagttgagaataaaataatattagaaattaataatgtattttatttgaggaaaaattaatattttaagttttaatttaagttgtaaaaagaattataatatttaaaatatataataaaatagtttgggtatggtggtttacgtttgtaattttagtattttgggaagttaaggcgaggagattatttgaggttaggagttttagattattttggttaatatggtgaaattttttttttataaaaatatagtaattagttaggtatggtggggggtatttgtaattttagcgattttggaggttgaggtaggggaatcgttttgttttttgtagaggttgtagagagttaagattatgttattgtattttagtttaggtaatagagtaagattttgttttaaaaaaagaaaagaaaagaaaagaaaaatatataataaaaataataatatgtttttgtttatgtaattattaaatatttttgaaatgttattatttaatgttggtaaggataaaatgaattatatatttttatataatgttgttgggtatgtaaattattatatttaatagatatatatatttgtgtatatgtaagtatatatgtgtgtgtttatgtatgtatatgtgtggatgtaaaaatatgcgtatttatttatttatattaagagttaagaagatgtgtaatgaatatataagaaagaaattaatataaaagatttttatgggttgttttttggtgttcggagtagatagtagggggaaggggatttttttgggtgtttaattagaaatgagagtttttgtagataaaaatatgtgttggaatagtttgttttaggattaagttgtgtgatttgttttttgtgtattttaaattttagtcggttttatttttattttttatttacgtgtgatttgagagattaagatagttgtttttttattagttaagatggattttaaggttaaagaaataaaagttatttaggggtcgaggatttagggtttggttggtattataattttttaaatttttatagttataggaaaagttatatttttgttagtttttttaataataagaataattaggcgaagtttgagattttttttaattttgatttataatttagatttttgtaattttgattggatagggaattaggtttttaggtattttttttcgataagtaaatgtagattttaagttagttttagtagtttataggtgttgtatattaaatgttattgtgttttattatttgttttttgatgtaaagagttaaatttaggatttaattttaatgttataattgtgttttaaagtgaatatgggatgtatgttggatatatgtttatttttggtatttgtatttaattttttttataaatatgtatagatttttttttaaagttttttgaatatatttgattttattgtgtaatatggaatttgggaggtataaaattagtttgtattttttttttttgaagagagagtattttttatatacgttaaagattgttttttttcggtgtgtaaattgatattgttaataaagtttttttttattgtttagttattttggtggtttattgtgtaatatatggtagttttatattttatgataataatttatgtataagaagattgattggttaggttgtttcgaataaggtaggggttaggtttttttatagattttttgtttgagtaataaagttacgtattcgatttt

SEQ ID NO: 239 - DNA, 6394 bp, Artificial Sequence
  chemically treated genomic DNA (Homo sapiens)
ttttttattgatttgtttttgtttttttttgtattttttgatttttggattagttgattgtattgtttaggtttatttttgggatttttgttttgttttattgatttatttgtttatttttttattaatataatattatattgattatcgttattttattagtaagttttaaagttggatagtattagtttttttttaatattgtgttggtttagtatatgtttttagtttaataagttttttttttaagataaatttttttgttggataaataatgttaaatgtaataataatagtaatatttaatattttttaaataaatattatatgttaatatttgtgttaaatttttattatgatttattttatttaattttttaaaaattgtaaatgataggtagtattgttttgtttatttttttatgtttttattttttttttttattattgatatttaagtattttgtttgagggaatatagattattaaatgaaagtgtttttattgggattttggatttataattttagttagtattatattattttttatattgatagatatatatgtagttatatatatatatttatatatgtgtgtgtgtgtttgtttgtgtatatttataatagattttagatgggtagagagagaaatagatattatttagattagagttaagattttggttttaaattgttatagggttggaggaaaaatagaaaataaagtttaattttttttatattgattgttaggtgttaattcgtttgtaagcgtttttatagttatttttgttttttttatgttttttttaattatttttggtggatagtaatttttaaatggcgattatattaatataataatttgtagttttatgtagtttttttttttttagcgaaatgttattatttattcgattgttgttttttatatttaattgtagaagagtattgtttttagagtgaattatggtttttggttgtttttaaagataattaggtgggtttttatgttttaagtattttattgtagtgtgtgaaaataaataggggttatatgagggaattatagagttttaattattaagtttttgtagttatgaattggtttcgtgttatttataattttttttttgtttttattttttggtggggaatttgttttttaggttgtttgtttttaaatgatttttttttttaatggaagatagaatttaggtaaagtaagagttttttattttcggttattattttttaaaggaataatgtgtatttttaaagagttttgttatttgagaggttgaggtagaagggtggtttgagtttaggatttcgagattagtttgagtaatatagtgtaagattttattttaataagaaaataaaaaaaattagttaagtatggtggtgtgtttttgtagttttagttattttgaaggttgaggtaagagggttatttgagtttaggagttttaggttatagtgattgtattattggttattgtattttatggttgtagaatgagattttgttataaataaataaataaaaatttataaaagatttttgtggaagatatttagtttattagatttttgttttatttagaaatgattttttttgggttttttttatatttagatattaattgtttgtttttagttatatattataataagagttgtttatttattttatgtttgatatttgttaggtattatatggggtattttataaacgtaataattatagtaattttacgagatggatataaatatatttttttttgtagatgagaaagtaagatttaaagatttttaggaatatatagaaggttgagaaagagtagattgttttataattttaattggtttgattttattgtttatgttaaattttgatttttatttttagatttattttttattgtattatgtgttgttttttgattgtaagaatgattttaataatttgtagttgttagattgatggagtaatattttatggtttatttttttttgtggttagtaatatatatttgagaaatagtttattttagtgattgatataggaaatagagtgaatttaattaggttttatgaagttagagatttgaaattttggttttagggataataatatttaaatggatgaattaagtaagaaattagattagtattgagttatttagtaatttatttatgtattttaaattagtgatttgaaagatgagttagttatttttattttatttttttttgaaattttaaatagtttgaaagatttatatagtttttaattaaattagaggataattggtgttttgggagaatttaatattttttatttaattgtgttttaagtttgtaaaattattggattggtatagaattttttgaatattatttatagagtaaaaatgattttaagtttttttatatttgtaatgttaaaattgttttttgtgttaaatttgattgtaaatttatgatgggatatgtttttgatatggtatatgatattttggttttagtaaataatttttttatgaataaaaatgagttagttgttagtttaatattagatttgaaagtttttatgcgtgtttttttatttataaggtaaatttttttttttttattattatattttttttttttttttattgatttaagaatatttttttatgaattaagaaggttgtttagaaaatgggttattgatgcgtgttaaaaacgtgtgtatatattaattttagattttttggagtattttttttatgtttgtaatttataattttatttaggtttatttttagattttaatataatatattttgaattgtttatttaaggtataagtatgtttagggttatttttttgaattttagtttttttattttttttatatatttataatatataagattagtaaatgttgttaagttaatagaaatttaaaggttaaatttgttatatttttgtaatatattaaggtaattttttaaaggttaatgtttattaatgattattttgaatttgaattttatgagaaataagtaggtgttttaagattgtttttataaatgtatttgttttttgtattatttattgtaggtaatttgtattgattatttggttatatttgtttgaaatttagatgttgtgttatatttttgtatttgtgtttttgttgttgtagaggttatagttattttggtagaattagtgaaaaaattttaagtattttatttttatttaagtttgaagtttggagggcgagaggggtagatgtgtgggttataaaattgttttattttttttgatttgagataattagaattaatttaagtttagtttataagtgttataatgttttttgggttatggttgttgtattagtttgtttttatgttgttattataataaagatatatttgagattgggtaatttgtaaaggaaaggggtttaatggatttatagttttatatggttggggaagttttataattatggcggaaggtaaaggaaaagtaaaggtaaatttttttttataaaattattagattttatgagatttatttattattacgagaatagtatgggaaagattcgtttttatgatttagttagtttttattgggttttttttataatatggggatttatgggagttatagtttaagatgagatttgggtggggatatagttaaatgatattagttgttaaaaattgtatgtgtaaaaatatgaagtttaaataggtagtttaaaaagttttaaaatattataataattaattagagtagtattttttaaagtttatatatttaagttttatttttgtgagtttgttcgtgtgtgtttattatttgtagatgatttatttttatttttatcgaattgatttagtaaatttgaatatttagtttagtttttattgaagtaataataataatgagattataattttgtggtgatagttatttatattttaaatatatgttaaaataaatatatagttattagattaaaataagttttgaataaattaaattattttttataatttttgatttgtatattatatttagagatttattagatttatgattattttggggtttgaattgaagatatttatttttttaatttttgaaatttttataattttttatattatattaatgttaggaggatatttttaataggaaaagaatagagttttgtagtatgggtcgtatattttggagattttttattttggatataaagtagaggatgtagaataattttaaaattttttttgttggtgattatagtttagaagtgttttagtagtgagtgttattagaaatgtaaaatttaatagatatatatagtaggaggaaagtgttaattaattattattaattttgttttcgttttttgagaaatgtagatgtgtaattttttaaatttggggaaggttttttattgttgtcgtatggggagttatgaaagttgtgatatttttatgtttttgttgttgtagttgtttatttgtattttatttttgttatgttgatatttaaattatagttttgatgtgatgtttttggtagttgtttagagagattgtttagagaaaatagtaggtaatttagattatttgtgaaaaatgttaggtgtgatatttatgtttttaaagggataggtaagaatgaatttaaatgttaatttttttttatggagggaaaaaagaaattaatagatagtttttttttttttttggaaatttcgggaagtttattgttttttaaataatgaagattgttgtgtttttatttatgaaataagataggaatgagaggaatggtggggattgttgggaagtgaaattttatttgatattttttaattttgtgtttttttaggtttttgagtaaaatgggaaatggtttagtgaaatttaaatattttaagtatttagatggatattttgggaattttattattgatgttttgcggaataaggtgatagagttggagagagagttgaggaggaaggatgttgagatttaggagcgggagtattatttgaaggagttgcgggagtagttgtcgaagtagattgtggttattgttgaatttatagaggagttttagaataagtgtatttagttgaataagttgtaggatgtggtgtatatgtagggaggaagttcgttttaggtttttttagataaagtgttttttgaggtttatcggaagatttttggattggtttttttttatagtaggaggggagtaaaggttggcgtgtttgttgagttaataattcggatttatgatttgaataaattttttgaatttttttttgagaaagtaagagttagaaaagattttaggtaagaaattttcgtattttttaaatttagatgggtttaatattgtgaaatatgagagtgatatttattaagtttttttaatgataaagaatatattgatttttttagattttggggtagaggggtttttgaaatgattttgttttgtaaaaaaattttttattgggtagaagtttaaagtagaaattgtattatatatattttttatgaggagtttagtttattgataattatttttattattttgaaaattttaggggtgtgaaatagtattagaaagtgtatatttttttttttagaggagtgaatttaaaaatgtatatatattatagtgaattgtgattatgttagttaaaaaaaaaaaaaagagagttatattttagtagtttttaagtgttatggaaaaggaatatgttggagttttaaagatgaatttatttatttattttagtttatggtggtttttattttttgttagttattgtgttagatgttaagtatgttttagtgaatagaaatagagtttttttagtaggggcggtaaatagtatatatagaaataagttagtaatgtgtaattattaattggaattaataatatgataaaagttaatattatagtaggtggtatttggagtgaagggaaaggaggttagggagataatagaagtaggtttgttatgaaggtttggttgaggaagtgatttttaatagattttaaggagtatgaattaggtaggaagaggattttaggtagagggaataattaaaagttagaattatttttaaaaatttgagtttttaaaagaatatataaatatttgtttttgtatttatgtataggggtgtgtgtgtgtgtgcgtatatatgtgtgtgtatgtatttttttatgggcgaaagtttgattttttgggttagggaagatttattagaaatattattagttagggttttttttttttattatttttaattgagtatttattaattgaaattaaat

SEQ ID NO: 240 - DNA, 6394 bp, Artificial Sequence
  chemically treated genomic DNA (Homo sapiens)
atttaattttaattaataaatatttagttaaaaatagtaagggaagggaattttaattaatgatgtttttaatgagttttttttgatttagaaaattaaattttcgtttataaagaaatgtatatatatatatgtgtgcgtatatatatatatatttttatatatgaatgtagaggtaagtatttatatgtttttttaaaaatttaaatttttaaaagtaattttagtttttaattgttttttttgtttgaaattttttttttgtttggtttatgttttttgaagtttgttaaaggttatttttttagttaggtttttatgataagtttgtttttgttgtttttttgattttttttttttttattttagatattatttgttatagtattggtttttattatattattgattttaattaataattatatattgttgatttgtttttgtgtatattgtttatcgtttttgttagaaaggttttgtttttatttattgaggtatatttagtatttaatatagtggttggtagagagtagagattattataaattggaatgaatgaatgaatttatttttgaggttttagtatgttttttttttatgatatttgaagattattaaaatgtgatttttttttttttttttttggttaatatagttataatttattgtgatgtgtgtatatttttaagtttatttttttagaaaaagaagtgtatattttttaatattattttatatttttagggtttttaaggtaatagaaataattgttagtaaattgagttttttatgagagatatatatagtataatttttattttaaatttttgtttaatgggagatttttttgtaaaataaaattattttaaaaatttttttattttaaaatttgaaagggttaatatgttttttattattaaggaggtttaataaatgttatttttatattttataatattaagtttatttgagtttaaaggatgcggaaattttttatttggagttttttttgatttttgtttttttaaaggaaaatttagggggtttgtttaggttataggttcgggttgttggtttagtagatacgttagtttttgttttttttttgttatggagagagattaatttagaggtttttcggtggattttaagaggtattttatttggagaggtttgaagcgggttttttttttgtatatgtattatattttgtagtttgtttagttggatgtatttgttttggagtttttttgtgagtttagtaatggttatagtttgtttcgatagttgttttcgtagtttttttaaatggtattttcgtttttggattttagtattttttttttttaattttttttttagttttgttattttgtttcgtagagtattagtggtgaggtttttagagtgtttatttgggtgtttagaatgtttaggttttattgaattattttttattttgtttagggatttgagaaggtatagaattgggaagtattaagtggagttttattttttaatagtttttattattttttttatttttattttgttttataaataggaatatagtaatttttattgtttgaaaagtaataaatttttcgaagtttttagaaaaaaaaaaaagttatttattgattttttttttttttttatgaagaggagttggtatttgggtttatttttatttgtttttttgagagtataagtattatatttaatattttttataaatggtttgagttatttgttgttttttttggatagtttttttgaatagttgttaaaagtattatattaaaattgtgatttggatgttagtatggtaaagataaaatgtaaatgagtagttataataatagaggtatggaaatgttataatttttatagttttttatgcggtaatagtaagaaattttttttagatttagaaaattatatatttgtattttttagaagacggaagtagagttggtgatggttgattagtattttttttttgttgtatgtatttattaagttttgtatttttgataatatttattgttaaaatatttttgaattgtggttattaataagaagagttttaaaattgttttgtattttttattttatgtttaaagtggaggatttttaaaatgtacgatttatgttgtaaggttttattttttttttattaagaatgtttttttaatattggtgtagtgtgggaagttatgaaaattttaaaaattaaaaaaatgaatatttttagtttaggttttaaagtaattatgaatttagtgagtttttggatgtggtatgtagattaggggttataagggatgatttagtttatttagaatttgttttagtttaatagttatgtatttattttaatatgtatttgaaatataaataattattattataaagttgtgattttattgttattattgttttagtgaagattaaattaggtatttaggtttattgagttaattcgatgaaaataaaaataaattatttgtagataataagtatatacgagtagatttataaaagtagaatttgaatgtgtgaattttgggaaatattgttttaattaattattataatgttttaaggttttttagattatttatttaaattttatatttttgtatatgtagtttttgatagttgatattatttggttgtgtttttatttaaattttattttgaattgtagtttttataaatttttatgttgtgggagggatttaatgggagttaattgaattatgggggcggattttttttatgttgttttcgtgatagtgaataggttttatgagatttgatggttttataaaggggagtttgtttttgttttttttttgtttttcgttatgattatgaggtttttttagttatgtagaattgtgagtttattaaattttttttttttataaattatttagttttaggtatgtttttattataatagtaatatgagaatagattaatataatagttataatttaaaaagtattataatatttgtaaattaagtttgaattagttttgattattttaaattagaagaaatgaaatagttttataatttatatatttgtttttttcgttttttaaattttaaatttaaatagaagtgaaatatttagagtttttttattagttttattagaataattgtgatttttataataataaaggtatagatgtaaagatgtaatatagtatttagattttaaatagatgtgattaaatagttaatgtagattgtttataatggatggtgtaaaaaataaatgtatttataaaagtaattttgaaatatttatttattttttatagaatttaggtttaaagtggttattaataaatattagtttttggagaattgttttaatatgttgtagagatgtggtaggtttaatttttaagtttttgttgatttggtagtatttattgattttatatattatgaatgtataagaaggatgaagagattagaatttaaagaagtagttttggatatatttgtattttgaataagtaatttagaatatgttatattgaaatttgagaataaatttgaatgagattatgaattataagtataagaaaggtgttttaaaaaatttgaaattaatgtgtatatacgtttttaatacgtattagtgatttattttttagatagtttttttggtttatggagaagtatttttaggttagtagagaaagaagggagatgtgatggtaggaggaaaaggatttgttttataaataaaaaagtacgtataaaaatttttaaatttaatattaaattaataattaatttatttttgtttatggaaaaattgtttattaagattaaagtattatatattatattaggggtatattttattatggatttgtagttaaatttgatatagaaaatagttttagtattataaatatgaaaaggtttagaattatttttgttttatggatggtatttaaaaaattttgtattaatttaataattttataaatttgaagtatagttaggtagaggatgttaaatttttttaaaatattaattattttttggtttagttggaagttatgtaaattttttaagttatttagaattttaaagaggggtaaaatgagagtaattaatttattttttaagttattaatttaagatatataagtaagttattaaatggtttaatattagtttgattttttatttagtttatttatttaaatattgttgtttttgaagttaaggttttaagtttttggttttataaaatttaattagatttattttgttttttgtattagttattaagataagttattttttaaatatgtattgttagttataaggagaaatgaattataggatgttgttttattagtttggtaattgtaggttattaaaattatttttatagttagagggtagtatatgatgtaataagaaatgagtttggagataaagattagaatttaatatgagtaatagagttaggttaattagggttataaaataatttgtttttttttaattttttatatatttttaaaaatttttgagttttatttttttatttataaaagggaatatatttatatttatttcgtagggttattatgattattacgtttgtaaagtattttatatgatgtttggtaggtattagatatgaagtaggtaagtagtttttattatagtatgtaattagaaataggtaattaatgtttaggtgtgaagaaaatttagagaggattatttttgggtaggatagaagtttagtaaattggatgttttttataagagttttttgtgggtttttgtttgtttgtttgtgatagggttttattttgtagttatgagatgtagtggttagtggtgtaattattataatttgaaatttttgggtttaagtgatttttttgttttagtttttagagtagttaggattatagaggtatattattatgtttgattgattttttttatttttttgttgagatggggttttgtattatgttgtttaaattggtttcgaaattttgggtttaaattatttttttgttttagttttttaaatgataaaattttttaaagatgtatattatttttttgggaggtggtggtcgggagtaagggatttttattttgtttggattttattttttattgagaaaagaagttatttggaaataaatagtttggaaaataagttttttattaaaagatggagataaaaaaagaattatgaatgatacggagttagtttataattataaggatttaataattgaagttttgtaatttttttatgtagtttttatttatttttatatattgtaatgaaatgtttaaaatatggaggtttatttaattatttttgaaggtaattaaaaattatagtttattttggaggtaatatttttttgtagttaggtataggagatagtaatcgaatgagtagtggtatttcgttagaagagaggaaattatataagattataaattattatattaatgtaatcgttatttagaaattgttgtttattaagggtaattagaagagatataagaaaagtaaaagtgattgtgaaggcgtttgtaggcggattaatatttggtagttaatgtgggaggaattaagttttgttttttgttttttttttagttttatagtagtttgaaattagaattttggttttggtttagataatatttatttttttttttatttatttggagtttgttataaatatatatagataaatatatatatatatatatagatgtgtgtgtatagttatatgtatatttgttaatatgggagatggtatggtgttggttaaggttatggatttagagttttagtggaagtatttttatttagtggtttatatttttttaggtaagatatttgagtgttaataatggaagaaaaagatagaaatatagagagatagataaaataatgttgtttgttatttatagtttttagaggattaaatgagataaattatgatgaaaatttagtataggtattagtatatagtatttgtttaagaaatattaaatattattattattattatatttaatattatttatttaataagagaatttattttagaggaaaaatttattgaattgaaaatatgtattaaattaatataatattgaaggagaattgatattgtttaattttaaggtttattaataaagtaacggtaattaatatagtgttgtattggtgaaaaaatagataagtagattaatggaatagaatagagattttagaggtagatttaaatagtatagttaattgatttaaagattaaagaatataaaagagagtaaagataagttaatggagaa

SEQ ID NO: 241 - DNA, 5338 bp, Artificial Sequence
  chemically treated genomic DNA (Homo sapiens)
taatatgtttagttaatttttgtattttgtatttttagtagagatagggttttattatgttagttaggttggttttaaatttttgattttaggtgatttatttgtcgcggatttttaaagtgttaggattgagatatcgcgtttagtttaatttttgtatttttagtagagatagggttttattatgttggttaggttggttttaaatttttgattttaggtgattttttagttttagttttttagagtgttgggattataggcgtgagttatcgtatttaattttacgtttgttttttaattaaggtatgttttgtttttaagtatattttttatgatgtttgttagaaatattttttaggaaggtagttttgaagggtatttgtttatttaaaaattttaggtagatatttatattagtttaggggtttttggtaatttaaattagaaattttgaatttaaatgtttattgtggttatgtaggaaacgtgagttaagtgagtggagtatttgtatataatatatgagattgtttttgtttttataaaaagatatatttggtttttttttttttgaaatatatgttattttagttttttttgtttttttgtttttaataagatgtagaaaatagttgtgaaagtataatgataagtagtatttgattttcggtttgtgttggggaggttgttagggagtggtagggattgtggtgaattagagagtatatgtttttttaatggcggggttatagttcgatggttacgtagaaatgttgatttgattttttaaaagaaagtaaaaattaggatttttatggtaaatttttttatttttgataggtaaataattttaagtttttaaaaagtatcgtgtgagttatttttttatattattggtgggtgtttaaattagtataatttttaaggatagaaatttgatattagttattaaaattgtaagaataatattttttaatttgatatttttatttttggtattttttttgtatatatatttgttgtgtgtaaaatgatgtgtttaagaaaatttattgtagtattgtttgtaatagtgaaaaaattgaatttatttaaatgtttatttagggggttttggttaaataggttatattcgtaaaggaatattatgtagttgtaaaaatgagtgttttttttttagatatgataatagtataagtgataaaagataaaatagataattggattttattaaaattaaaaatttttgtggaatagaggatgttattaagaaagtgaaaagacgatttgagaaatggaagtaaatatttgtaaattatgggaagtaaatatttgtaaattatttaataaggtaatatttgtatttgtaaattatttgataagggatttttgtttagaatatataaagaattttgatagtttaataataaaaaggtaaataatttaattaaaaatggatagagggttgatgcggtggtttatgtttgtaattttagtattttgggaggttgacgtaggtcgattatttgagtttaggagtttaagattagtttggttaatatagtgagattttgtttttgttaaaaatataaaaattagttgagtgtaatgatgtgtgtttgtagttttagttatttgagaggttgaggtaggagaattatttgagtttgggaggcggaggttgtagtgagttgagattttattatcgtattttagtttgggttggagtgaaattttgttttaaaaagaaaaaaaaaaaaggttaaaggatttgaatagatattgaatagatatttttttaaaggagataaatggttaataaatcgtgaaaatatttttagttattagggaaatgtaaattaaaattataatgacgtattattttatatttattaggatggttataattaaaaaataataataataataaggttgggtattgtggtttatgtttgtaattttagtattttgggaggttgaggtaggtggattatttgaggttaggagttcgaaattagtttgattatttttaataaaaatataaaaattagttggatatggtggtggggatttgtaattttaattattcgggaagttgagggagaagaattgtttgaatttggggtgtagatgttgtagtgagtcgagatcgtgttagtgtattttagtttgggcgatagagtgagatttagtattagaaaaagaaaagaggtgttggtgaggatgtggagaaatcggaatttttaaatattgttggtgaatttgtaaaatggtgtaattgttggagaaaatagtttggtatttttttaagaagttaatagtttattatgtgatttagtaattttatttttaagagaaaggaaaatatgtttataaaaaaatttgtaaataaatgtttttagaagtattattataatagttaaaaagttgaaataatttaaatgtttataaattgatggataaataaaatatggtatatttaaataatgtaatatatttggttataaaaattagtgttaatatgataatatgaattttatgttaagtgaaataagttaaatataaaagattatatagtgtgtgattttattagtatagagtatttataatacgtaagtttatagagatagaaagtagtttagtggttgtaagggttttggtgaaagaggaatgaggagtgatcgttaatgggtataaattaaaaataaaattagaaggttttttgtaattatttgaatggattttttttttggttagtatattttaaaatttaatttgaaagattggtttaggttacgatgggaggtgagagttggatatgttttattatatttttttaatattaatattaatattgattttaagtttgataagaaatatttgtttattttttttatagtttgttattgggaggttttaattgtataataaaatttaggttttttggttaggtgtagtggtttacgtttgtaattttagtattttgggaggtcgggagtaggggggcgtggatgatttgaggttaggagttcgagattagttaggttaatagggtgaaattttatttttattaaaatataaaaaaaaaaaaaaaaaaaaaaaaaaaagtcgggtttgatggtttatgtttgtgattttagttattcgggaggttgaggtaggagattaggagggggaggttgtagtgagtcgagatcgtattattgtattttagtttgggtaatagagtgagatttattttttaaataaaataaaataaaataaaataaaataaaataaataattaaaaaattttaggtttttataattttttattataatttagatatttttttttatagataataatttttgtaattaattgttaattaggatatgtttaaatttatttgtgatttggaagttttttttttttgagttgtttcgtttttttagaatagatattgaatagatatttttttaaaggagataaatggttaataagtatattaaattaatgttaattttgtatgtattgatttatgtattatgtttttttgaaatgtataaaggttgattatgtttcgattattttgggtatatgttgtaggattttttgaggttgttattattatgtttttaatattggtaaaataaattttttaaattgatttgagatttgttttagatatttggtttatataggttttttttaggggcgatgaaaatgttttataaattattttatttaaaattaggtagtgatgatggttgtttaattgtgaatatattaaaaaatattgaattgtatattataaaaggatgagttttatggtatgttattaaaagttgtttaaaagtgagggatttttttagttattgatatggaatgatttttaggaaaagagtataatatgttatatttttgtatattaaaggggaggtaggtacgaatatgtatatatattgtttttttttagaagtcgtttaggagtgaaattaaaattttttattttttttcggttttatttcgagttttttttagaaaatttttttttttagtttatagtatttattatgtttattttcgtttttcggtattgagttttagaggggcggtgttttataaatatttgttatatgaatgaacgaattaattatcggattttggggtgggtcgggatagttcggttttagcgagggtttcgtattcgcgggtttcgtagaggagtagaggttgggcggtcgtttcggttaatttcgttgtagtttaaagtacgggaatcgcgggatagataaacgagcggagggaagatatttagaagttaggaaatcgcgagttgtagtttaatttggtcggaagttgcggagaggtttagttatcggaagttagtggagggttcggtcggacgttttagaatttcggaggatcgggatttttgtggttggtcgtgacgggtattttttatcggggatgatatatttttagagtttttgggattaagtaaatggcggatataattttttgggcggaaggggatttcgggagttagtagttaaggtaatagttttagatttgggtattttaggtcgggtagtttttcgagtttacgggattagttgtgattggtcggatgaggttgagagttttatggggacgcgcgcgttacgtgtaggggcgttgttttttatttatttggcgttcgattgttagtgcgtatgcgtttgaaggcggtgtagggcggggagtatatttttgcgaagtgtcgggtattttttgggcggttttcgtcggcgagttggatagcggcgcgcgttaggcgtggttttttcggtcggtgggttaggattggacgtagtaggtagaaggggtaggatttttcgtagtagtagtttagcgattggttaggagttggagggagcgtggttttgggaggcggggcggagggggacggatagggtagtttaagacgcggaggtggtggttgcggtttttgaataagtaagtgagttattttcggagattttcgcgttggggacgggaggtcggcgagtttcgggatttttgaaagttttgaggaggcgcgggggtgagtgcggttttgaggaaatttaggtgtttcgtttttttttttttttttggttcgcgtttcgtttatttttttttcgattttggcgggttttcggttttgggttcggatttttggggtagttagtttgttacgaattagtcgcgcgtttttgtttttgtcggtttaggaaattgggaagttttttggttttgttttttagttcgtagaggggatattgaggtttacggtaggtggttttttttttattcgagtttttatataga

SEQ ID NO: 242 - DNA, 5338 bp, Artificial Sequence
  chemically treated genomic DNA (Homo sapiens)
tttgtgtggagattcgggtgaggagaggattatttatcgtgggttttagtgttttttttgcgggttggggagtaggattagggaattttttagttttttaaatcgataagggtagaagcgcgcggttggttcgtggtagattagttattttaggggttcgggtttagagtcgggggttcgttagggtcgggggaggggtaggcgaggcgcgggttaggaagaaagggaggggcggggtatttgggtttttttagggtcgtatttattttcgcgtttttttaaggtttttagaggtttcgaggttcgtcggtttttcgtttttagcgcgggggttttcgagggtggtttatttatttgtttaaaggtcgtagttattattttcgcgttttgagttgttttgttcgttttttttcgtttcgttttttaaggttacgttttttttagtttttggttaatcgttgagttattgttgcggagggttttgttttttttatttattgcgtttaattttagtttatcggtcgagaaagttacgtttggcgcgcgtcgttgtttagttcgtcggcgggagtcgtttaaagggtgttcggtatttcgtaggggtgtgtttttcgttttgtatcgtttttaaacgtatgcgtattggtagtcgggcgttaagtgaatggaaggtaacgtttttgtacgtagcgcgcgcgtttttatgaagtttttaattttattcggttaattatagttagtttcgtgagttcggggaattgttcggtttgagatgtttaggtttgggattgttattttggttattggttttcgaagttttttttcgtttagggaattgtgttcgttatttgtttggttttaggagttttgggaatgtgttattttcggtagagggtgttcgttacggttaattatagagatttcggtttttcgggattttagagcgttcggtcgaattttttattgattttcggtggttgagttttttcgtagttttcggttaagttggattgtagttcgcggttttttggtttttaggtatttttttttcgttcgtttgtttgtttcgcgattttcgtgttttgggttgtagcggagttaatcgaggcggtcgtttaatttttgtttttttgcggagttcgcgggtgcggagttttcgttggaatcgagttgtttcgatttattttaaaattcgatagttgattcgtttatttatgtagtaaatgtttatggagtatcgtttttttaaggtttagtgtcgggaggcgaaggtggatatggtggatattgtgagttggaaggaaaggttttttaaagggagttcgaggtagggtcgaaaagaagtgaagaattttggttttatttttaggcggtttttagaaaaaagtaatatgtatgtatattcgtatttattttttttttggtgtataaaaatgtagtatattatgttttttttttgaagattattttatattaataattggaggggttttttatttttaaataatttttaataatatattataaaatttatttttttatagtgtataatttagtgttttttggtatatttatagttgagtagttattattattatttaattttaggtagagtggtttatggaatatttttatcgtttttaaaagaaatttatgtgaattaagtatttgagataagttttaagttaatttagaaagtttattttgttaatgttaaggatatggtggtgatagttttaggaggttttataatatgtgtttaagatggtcggggtatagttagtttttatatattttaggaagatataatatataagttaatatatgtaagattgatattgatttgatgtgtttattggttatttgttttttttggggaaatgtttgtttaatgtttattttggaagggcgggataatttaaaggggaggggtttttaagttataggtagatttaaatatattttgattggtagttggttataagagttattatttatagaaaggaatatttgggttatgataaggggttgtggagatttagggttttttggttgtttattttattttattttattttattttattttatttgaagagtgagttttattttgttgtttaggttggagtgtagtggtgcgatttcggtttattgtaattttttttttttggttttttgttttagtttttcgaatagttgggattataggtatgagttattaagttcggtttttttttttttttttttttttttttttgtattttagtagagatggggttttattttgttggtttggttggtttcgaatttttgattttaagttatttacgtttttttgttttcggttttttaaagtgttgggattataggcgtgagttattgtatttggttaggagatttaggttttattatgtagttgaagttttttagtagtaggttatagagagaatagataaatattttttattagatttaaggttagtgttgatgttaatgttggaggggtataataaggtatgtttaatttttattttttatcgtggtttgaattagttttttaggttaaattttagggtgtgttggttaaggagggagtttatttagatggttgtaaagggttttttaattttatttttggtttatatttattaacggttattttttattttttttttattagagtttttgtaattattgaattattttttgtttttatggatttgcgtattgtggatgttttatattaatggaattatatattgtgtagttttttgtgtttggtttattttatttagtataaagtttatgttgttatattagtattaatttttatggttaaatatattgtattgtttagatatattatattttgtttatttattagtttatgaatatttgggttgttttaattttttggttattatgataatgtttttgagaatatttgtttataagtttttttgtggatatgttttttttttttttgggagtgggattgttgggttatatggtaaattattaattttttgagaaagtgttaagttgttttttttagtagttgtattattttataaatttattagtaatatttaagagtttcgatttttttatatttttattaatattttttttttttttttgatattgagttttattttatcgtttaggttggagtgtattggtacgatttcggtttattgtaatatttgtattttaggtttaagtaattttttttttttagtttttcgagtagttgggattataggtttttattattatgtttagttaatttttatatttttattagagatggttaggttggtttcgaatttttgattttaagtgatttatttgttttagttttttaaagtgttgggattataggtatgagttatagtatttagttttattattattattattttttaattatagttattttagtgggtgtgaagtgatacgttattgtagttttgatttgtatttttttaatgattaaggatgtttttacggtttattggttatttgttttttttggggaaatgtttgtttaatatttatttaaattttttgattttttttttttttttttttgagatagggttttattttagtttaggttagagtgcggtggtaggattttagtttattgtagttttcgttttttaagtttaagtgatttttttgttttagttttttaagtagttaggattataggtatatattattgtatttagttaatttttgtatttttagtagagatagggttttattgtgttggttaggttagttttgaatttttgagtttaagtgatcggtttacgttagttttttaaagtgttgggattataggtatgagttatcgtattagttttttgtttatttttaattggattatttgtttttttattgttgagttgttagagttttttatatattttaaataaaagttttttattagatgatttatagatatagatattattttattagatgatttatagatatttattttttatgatttatagatatttatttttattttttagatcgtttttttatttttttgataatattttttgttttataaaagtttttaattttgatgaagtttagttatttgttttgttttttgttatttgtgttattgttatatttaaaaaaaaagtatttatttttatagttgtatgatatttttttacgaatataatttatttaattaagattttttagatagatatttagatgagtttagtttttttattattgtaaataatgttgtaataaatttttttgaatatattattttgtatatagtaagtgtatatgtaggaagaatattagaagtgggagtgttaagttaaagagtattgtttttataattttagtagttaatgttaaatttttatttttagagattatattgatttagatatttattagtggtatgagagaatgatttatacggtgttttttaaaagtttggaattatttgtttgttaaaaatggggagatttgttataagaattttgatttttgtttttttttgggaaattagattagtatttttacgtagttatcgaattgtgatttcgttattgaaagaatatgtgttttttaatttattatagtttttgttattttttgatagtttttttagtataggtcgagggttagatgttatttattattgtgtttttataattgttttttatattttattaaaagtaggaaaataaaagaggttgagatgatatgtgttttaggaaaagaaagattaagtatatttttttgtgggaataaagataattttatgtgttatatatagatattttatttatttggtttacgttttttgtatggttatagtgggtatttgagtttaagatttttggtttaggttattaaaagtttttgaattaatgtaaatgtttatttaggatttttgagtagataaatgttttttagagttgtttttttgaaaggtatttttggtagatattatggagggtgtatttgaaggtagagtatgttttgattaaaagatagacgtgggattgggtgcggtgatttacgtttgtaattttagtattttaggaggttgaggttgggggattatttgaggttaagagtttgagattagtttggttaatatgatgaaattttgtttttattaaaaatataaaaattaggttgggcgcggtgttttaattttggtattttgggagttcgcggtaggtggattatttgaggttaggggtttgagattagtttgattaatatggtgaaattttgtttttgttaaaaatataaaatataaaaattagttgggtatgttg

SEQ ID NO: 243 - DNA, 8210 bp, Artificial Sequence
  chemically treated genomic DNA (Homo sapiens)
aatagttttgttatagttagtaagaggtgaatagatagtaaattgttatatatttatataatgaataatatttagtaagaaaaagagtaagttattgatatattaatattttggagaattttaagggtattatattgagtgaaatagttatttagtttttttttttattataaaaatacggttgtttttttatgagttttaagtttatatatattttagatatatattttttgttagatgttttataattattttttttttagtttgtggtttgtttttttatttttttaatagtgtttttttattttgaaataattttaggtttatatagaagttataaaatattatagtttttgggtattttttatttagtaatagtatttgataaattatagtataattattaaaatgaggaaattaatattggtataaaattattaattaaattagaaattttttttagattttaaaagatttaaaagattatttatggtaattttaatttgtataatttttttttttttttgagatagttttattttgttgtttaggatagtatgtagtagtgttattatagtttattgtagtttttgatttttgggttgaagtgatttttttgttttagttttttaaatagttaggattatagatgtgtattattattgtggtagatttttttttttttttattttttatagagatggggtttttttatgttgtttaggttggtttcgaatttttgggtttaaggagtttttttgttttggttttttaaagtgttaggattatagatatgagttattattattaatttataattttttaaatgaaaaaaatgatagtgataaagaatagattagtagttgtcgtaggtagatttgggaggagtatgtgattataaagggatggtatgaagatgtttttttgaggtgatggaatagtttagtattttttttttttttttttgagatagagttttattttgttatttaggttggagtgtagtggtacgattttggtttattgtaattttcgtttttagggtttaagcgatttttttgttttagttttttaagtagttgggattataggtatatgttattacgtttagttaatttttgtgtttttagtatagatagggttttatcgtgttagttaggttggtattgaatttttgattttaagtgatttgttttttttagttttttaaagtgttaggattataggagtgagttattgtattaggtcggaatagtttagtattttgattgtagtggaggttatattaatataaagtatgtgataaatttgtatagaattatatatatatagggtatgtaaaaattggtaaaatttgaggaaagtttttagtttgattaatagttttatattagtgttagtttttttattttgatagttgtattatggtttgttagatgttgttgttgggtgaaaggtatttagaaattgtaatatttttgtaatttttatgtgagtttgaaattattttaaaataaaaagatattgttaagaaaatggaaaggtaagttatagattgggaaaaaatagttgtaaaatatttgataaaggatgtgtatttagaatgtatagttttaaaatttataagaagatagtcgtatttttataatagggaaaagaattgaatagttattttattaaaaataattatataaacggtatataagtttatgaaaaggtgtttatttttattagttattaggaaatgtaaatgtaaattattatgaaatattattgtatatttattagtatagataaaattaaatggtaattcgaagaatgtggaataattggattttttatatgttgttggtgtaaatgaaaaatgatatggtttttttgtaagatagtttgataattttttaaaaatgtagggtttagtaattttatttttagataattaaacgaagatgaatgaagaaaaagtgaaatttatattagtattatttataataattttaaaattgtaaatagttgaaatgtttaagtggtacgtttatataatgaaatttattttttagtaaaaggattttagtatggatgaattttaaaattattagaataaatgaaagacgttaaataaaaattatatgttgtgtgattttatttatatgtagatttagaaaaggtataataattaatttagtggttgttaggagttggggggtaaggggtagagagtggagattgattatatagggaatgtattgaagtaatgggaatgttttatattatgatttttttgatgatggttacgtaattgtatatattaatcgaaatttattaaattgtatagttggtataatttttaggttttttgtattcgatttgtttttttttgtttagaaagtttttttttttttttgtttggttgatttatatttagtgtttagattttgtttaaacgttatgttgttaggagtatttgtttttgagtttagattggtataggtttttttgatattttgtcgtttttttttattgtttttattatagttgtagttttagttaggtaggtagttattagtttaaggtttttttttttgttttagttgtaatattgtgaggagttagatgttgattattattttgttaatagtacgtagtatggtgtttaaattaggtttgaatattgtatgattgagtataagtgagtagagagttgtgtgttttttgtttttgtaagtggtagttgtggtttttgttaagggtattgttagttggggttgtttgtttaattttggagtttgtttgtttgtttttgttttgtttttggggagttgtgattatttatgtttatttgtttgttatagtttttgtttagattttttgttatcgtgaattttatttttgtggtcgggttattttgttttgagaatagaaaggagtttttttttgttgttatttttttagtagaaaaggaaatttgttttattgtatgtatgtttttggatttatttaagttttttttttttttttagtaagtggagaaattttgaaatatagtgttttgttatttgttttggtaataatatattattttttgtgaagtattagagtatttttttgttttttgattattttaatttttttgagagagatatatgatttttttaagtaaggttaggaattttaatttgtaggtagtttgaatgtttgggtggaaggtttaatttttttaaaggtgaaaatattattaattttgtgtttagtttttgtttatatttgtagattattagagattattattattgtttttatgtttttcgttgatttagtttttaggataaatgtgtagaataattaataaagggtttgatagttaatattttttttttattttttttatttttttttttttttattttattattgtagtaggtaagagggaatttaggttatggtaggaaaatgattaggatgaataatttttgtatgtgagtattgtgtgaatatagtttagtgtttaaattattattaaagtttttttttttattatgggttgtttatttaagaagaatttatgagttttgttattttagatagttttttttggagtattatatgattagtttagttagtgattttagaaatgtttttttggattttttaaaatgtatttaagtttaattttttatttgtttttagtttatttgttttcggttttatagtttatatagtttggagttttttgtttagttttgtttatttttaatttttttaggtttaagattttttattgttttttttttatttgagttattataatagttttttaaaagtttatattttatttttgtttttttttttttttgtagtataatttatatgtcgtagttaaggattaggttaaggtatttttatgttttttttagtggtttatttttttatttagtttgtgatttggttttaggatatgtagattgtttagtaggtaattaatatttgttgaattaattttttgtattgtaagttatattaggattttttgggggttagtattattttaaaattataaaaaataataattttagatttaattggttttatgatttattgaggaggcgaggaataggttaaagttgttttgtatatattttggaatagttttttttgtttagtaaggatggataagtttgttaataattagtatttatatgggtagaaaaaaagtgttttgatttttaattttataagtagtaaaggaatggtagttagaagttgaatcgtatttttaatgttttaggtaggatagaatagtattgttttgttttgtattttaatatgtttaattattttttttttttttttttttgttttgttttttatttttttatttattatagttttagtatgtgtgttatattaggaggttgttttggtaggttagaggatttgttatagtgaaggtattgtggtattttttgttttttaggtaaggatgatatatgttagttaatttatttttatttgttgttttttttatttggtattaaatgagatttaattatttttgaattaaagtttataaattttttataaaaattaaggtttttattttttataataagtatatgagaaagattggttttaaattttaaattgtggagtgacgtaaaaatatgtttaattttaattatttgtttttttttgttcgttttgtaagttattaatgtattaatattggtaatttttagattggaggaatgatttattttaatgttttttttttaaaaaaaattattagttatttatatggtatatgttaattaaggttttgcggtatttttttttttatgttttttaatgaagtagttttttttatgatttagtagtttgtgttattattagtacgtaaatagtaaggatttaaattttaagattaaaataagtttattttgttaatattatgttttgttgtattttgtagttttttggtgaatttttggatgaagttattaaattaattgtttgttattatgagtagaagtaagcgtgataataatttttatagtgtagagattggagattttatatttatagttttgaaacgatattagaatttaaaatttataggtttaggagtttaaggaatagtatggtaagtgtttatttttaaaaattaggtaaagaattattaattgttatttttttttttttcgtaatttagatattttggtaaatatttaatttgttttgaaaaattaaattaaaattaaaaattaaacgaaaattattttatagtaaattgtttgttttaggattaatggttttttttttattattattattaaaggttgagtattttttatttgaaatgtttaggattagaagtgttagattttggaatatttgtattggttgagtattttaaatttaaattagaaatattttagtgaatattttttttgagtattatgttagtgtttttaaaatttagattttcgagtattttagattttatatttttagatttgggataataatttgtattatttataagatataattttataaattagtattgttatttttaagtataaattatgattaaatatttgggtatagttattgaagataaatatttttattagtaaagaataagtggtatgtttgttaattttatgtatatatgtatttttatagataattgtttaataagaagttttatttagttattatttttatattataatgaagcgtggaattttagaaattttattttatattggggaatgaagttagttaatattttattgtgtgtgttttaaaatttatttatatgtttaaaattgatttattagttaatttttataaaagttttaggttatattagtataattttttataaattgaaatgtagattattttttgggatagttttgatattgattgtagattattaaattagtataataataaattagtgttttggggaattataagttttatttaagaataattatatttttattatttttttttgaaataaattttagaatttattttaaataaaatgtaaattgttaagtatttataatttagtattttttttaggttttaaaaaaattgttttatatgtgtatagggagttatgtataggattggtgtttgtagtattatttataatagtaaaaattggaaatagtattaaatttattaatagaagaataaaaaattgtgatatagttatgttgtgaaatattatataatattttaaacgaattggagttatatgtgttaataaggataattttagaaatgtagtgttgggttttaaagtaagatgtagaatatatatatatattattatattatttatatgtagtttaaaatatgtaaagtagtattatatatttatggattatatatatgtataaaagattaaaatatgtataaatattaaatttaggatgttgtttatttttgagaaaatagagaaaagaaaggaggtttgatttataatattatatttttttttaaaaaatttagagtaagtcgggcgcggtggtttacgtttataattttcgtattttgggaggtcgaggtgggtggattatgaggttaggagtttaagattagtttggttaatatggtgaaattttgtttgtatttaaaatataaaaattagttgggtatggtggtatatgtttgtaattttagttatttgggaggcggaggtaggagaatagtttgaattcgggaggtggaggttgtggtgagttgagatggtgttattgtattttagtttgggtgatagagtgagatttcgtttaaaaaaaaaaaaaaaattagagtaattatggtaacgtattaagatttaataaatttgtataatagaatggtatttattattttttttgtatttttgaagtaatttataatattaaaaattatagaagttggagttattttgtaagtcgttttgattggtttgtttttattgtaattaattatatttaattaattataaattaaatttaaagaaaattatattatatagttagtattaggattttgaaagttagttttttgtttagattttgttttttgttttttgtttttttgtttttttgtttttttttgagatagagttttattttgtcgtttaggttagagtgtagtggcgtgattttggtttattgtaagtttcgtttttcgggtttacgttattttttcgttttagttttcggagtagttggggttataggtgtttgttattacgttcggttaatttgtgtgtgtgtgtgtgtgtgtgtgtgtgtgtgtgtgtgtgtatttttagtagagatagggttttattatgttagtcgggatggtttcgattttttgatttcgtgatttattcgtttcggttttttaaagtgttgggattataggcgtgagttattgcgtttggtttttttgtatttattttattgtgtttaaaaggatagaagtaatgtgtttatatagaattatttagtaaattttttgagtagaatttatatgttttttttttttttgagggagtttattaggttggagtgcggtggtgcgattttggtttattgtaattttcgttttttaggtttaagtgatttttttgttttagttttttaagtagttgggattataggtgtgtattattatatttagttaatttttttgtattttagtagaggcggagttttattgtgttggttaggatggtttcgattttttgattttatgatttatttattttgattttttaaagtgttgggattataggcgtgagttattgtatttagtttcgtatgtattttttattttatttttttttgatggaagtataaggttaaggatttatttaggttttaggttatttagtggagttaaataattatggatttgtatattgagtgtttacgatgtattaggtggatttttgaggtaatataacgaatatgtagggtttttgttggtatagtttattgtttatttggatttattagtattttaggaaatagttgtaaaaaaatatatgttgtaatagatatagaagatatatgttgagcgttatagatttggaagggatttagttatttgtttttggagaaagtgagaaatgtatatgattgttttatgaatttagtttatagatttttgtttgaagtttttttgtgtgtttttgaattttttattatagt

SEQ ID NO: 244 - DNA, 8210 bp, Artificial Sequence
  chemically treated genomic DNA (Homo sapiens)
gttgtaataagaaatttaaaaatatataaaaaaattttaagtaaaaatttgtaaattgaatttatgaaatagttatatatattttttattttttttaaagataagtaattggattttttttaagtttatgacgtttaatatgtgttttttatatttattataatatatatttttttgtaattattttttaaaatgttaatggatttaaatagatagtggattatgttaatagagattttgtatgttcgttgtgttgttttaaagatttatttagtatatcgtgggtatttaatgtataaatttataattatttagttttattagatagtttaaagtttaaataaatttttaattttgtatttttattaagaaaaggtaggataaagaatgtatacgaggttgggtgtagtggtttacgtttgtaattttagtattttgggaggttaaggtgggtggattatgaggttaggagatcgagattattttggttaatatagtgaaatttcgtttttattaaaatataaaaaaattagttgggtgtgatggtgtatatttgtagttttagttatttgagaggttaaggtaagggaattatttgaatttgggaggcggaagttgtagtgagttaagatcgtattatcgtattttagtttggtagatttttttaaaaaaaaaaaaagtatataaattttatttaaaagatttgttgaataattttatgtaaatatattatttttatttttttggatataataaaataaatatagaagggttaggcgtagtggtttacgtttgtaattttagtattttgggaggtcgaggcgggtagattacgagattaggagatcgagattatttcggttaatatggtgaaattttgtttttattaaaaatatatatatatatatatatatatatatatatatatatatataaattagtcgggcgtggtggtaggtatttgtagttttagttatttcggaggttgaggcgggagaatggcgtgaattcgggaggcggagtttgtagtgagttaagattacgttattgtattttagtttgggcgatagagtgagattttgttttaaaaaaaaataaaaaaataaaaaaataaaaaataaaaaataaaatttgaatagagagttggtttttagaattttaatattgattatataatatgattttttttaaatttaatttatggttggttaaatgtggttggttataatgagaataggttagttaaaacggtttataaaatgattttaatttttataatttttgatattgtaaattattttaagaatgtaggaaagataataaatgttattttattatgtaaatttattaaattttaatacgttattataattgttttgattttttttttttttttagacggagttttattttattatttaggttggagtgtagtgatattattttagtttattataatttttatttttcgggtttaagttatttttttgttttcgttttttaagtagttgggattataggtatgtgttattatgtttagttaatttttgtattttgagtatagatagggttttattatgttggttaggttggttttgaatttttgattttatgatttatttatttcggttttttaaagtgcggggattataggcgtgagttatcgcgttcggtttgttttgaattttttagaaagaaatataatattataggttaaatttttttttttttttttatttttttagagataaataatattttaagtttggtatttatgtatgttttaattttttgtatatatatataatttataaatatatggtattgttttgtatattttaagttatatgtaaatggtataatgatgtatatatatattttatattttgttttgaagtttagtattatatttttgaggttatttttgttgatatatatggttttagttcgtttaaaatgttatatagtattttatagtatgattgtattataattttttatttttttgttgatagatttgatgttatttttaatttttgttgttataaatggtgttgtaaatattaattttatgtatgattttttgtgtatatgtaaaatagtttttttagaatttaggagaaatattggattataaatatttaatagtttatattttgtttagaatagattttgaaatttgttttaagaagaggtaataaaaatataattatttttgagtgaggtttataattttttaaaatattagtttattattatgttaatttagtgatttgtaattagtattagaattattttaaagagtgatttgtattttagtttataaagaattatgttgatatagtttgaggtttttgtagaaattagttaataaattaattttaaatatatggatgaattttgaaatatatatagtgagatattagttgattttattttttagtatagaataagatttttgaaattttacgttttattatagtgtgaaagtgatgattaagtgaagttttttattaaataattatttatgggaatatatgtatatatgaaattaataagtatgttatttattttttgttgatagagatatttgtttttaatggttatgtttaagtatttaattatagtttatatttaaagatggtagtgttagtttatagagttgtattttatgaataatataggttattattttaaatttgaaaatatgaaatttaaaatgttcgagaatttaaattttgggggtattgatatgatgtttaaaggaaatgtttattgaagtatttttgatttgaatttggaatgtttaattaatgtaaatattttaaaatttgatatttttggttttaagtattttagataagggatatttaatttttaataataataataaagaaaagattattgattttgaagtaaataatttattgtggaatagttttcgtttaatttttagttttaatttaattttttaaagtaagttaaatatttgttaaggtatttaaattacgagaggagaaaaggtagtagttaatgattttttgtttaatttttggaagtaaatatttattatattattttttgagtttttgagtttataggttttaaattttgatatcgttttaggattgtgaatgtagaatttttaatttttatattataaaaattgttgttacgtttgtttttgtttatgatggtaagtaattaatttaatggttttatttaaaaatttattaagaagttgtaagatgtaataaaatatgatgttaataaaatgaatttgttttaattttaaaatttgagtttttattgtttacgtattgatagtaatatagattgttagattatgaaaagagttgttttattaaaaaatataagaaaaaaaatatcgtagagttttgattagtatatgttatatgaatgattgatagttttttttaaaaaagaaatattaggataaattatttttttaatttagaagttattagtattaatatattaataatttataagacgaataaaagaaagtaaataattaaaattaaatatgtttttacgttattttatagtttaaaatttaaaattagttttttttatgtgtttattatagagaataaaaattttaatttttgtaagaaatttataaattttgatttaaaaatggttaagttttatttagtgttaagtggagggaataataaatggaaataagttgattagtatgtgttatttttgtttaaaaaataaagggtattatagtgtttttattgtgatagattttttgatttgttaaggtaattttttggtgtaatatatatattgagattgtaatgggtgaaaggatgagaagtaaaatagaaaggagagagagagaagtagttaggtatattgggatataaaataaaataatattattttattttgtttgaggtattaaaagtacgatttaatttttgattattatttttttattatttgtaggattaaaaattaagatattttttttttatttatgtgaatattggttattaataaatttatttatttttattagataaaagagattattttaaaatgtatgtaaagtagttttaatttatttttcgtttttttaataagttatgaaattaattaggtttaaagttattgttttttgtggttttaagataatgttaatttttaagaaattttgatatgatttataatataaagaattaatttagtagatattaattgtttattaggtagtttgtatgttttggggttagattataaattaggtaagaaggtgagttattggagagagtatgagaatgttttgatttgatttttggttgcgatatgtagattgtattgtaggagaaagggggagtaagagtggaatatgaatttttgagagattattataatgatttagatgaaagagaaataatgaagagttttaggtttaaaggagttaaaaataaataaaattaaataggaaattttaaattatgtaagttgtaaaatcgaggataaataaattagaaataaatgaggaattagatttggatatattttaaaaggtttagagaaatatttttaaaattattaattggattagttatgtagtgttttagggaagattgtttgaaatgataagatttataaattttttttaagtggatagtttataataaagaaaggagttttggtaatgatttaaatattgagttatgtttatataatgtttatatatagggattgtttattttaattatttttttattataatttgaatttttttttatttattatagtagtgaaataaggaagaagagaagtgggaagagtggaagaggagtgttggttgttaagttttttattaattattttatatatttattttggaaattgggttagcgggggatatggagatagtaataatgatttttgataatttgtaaatatgagtagaggttgagtataaagttgatggtgtttttatttttgggaaggttaaattttttatttaagtatttagattatttgtagattaggatttttaattttatttggaggagttatatgttttttttaaaaagattaagataattaggagataaaggggtattttggtgttttataggaggtgatatattgttattaaagtaggtaataaaatattgtgttttagagtttttttatttgttggaaaaaaagaaaaagtttgagtagatttaggaatatgtatgtagtagggtaggtttttttttttgttaaaagaataatagtaaggaaaagtttttttttgtttttagaatagggtggttcggttataggagtgggatttacggtgataagaagtttgaataaaggttatggtaggtagatgagtatggatagttataattttttaggagtagggtagaggtaggtagataggttttaaggttaagtaggtagttttagttagtagtatttttggtagaagttatagttgttatttataagaatagaagatatataattttttatttatttatatttagttatgtaatatttaaatttgatttaagtattatgttacgtattgttaataagatggtaattagtatttggttttttatagtgttgtagttaggatagaaaaagagattttaagttgatggttatttgtttgattgaaattatagttgtggtaaggataatgaaggaaagcggtaggatgttaaagaagtttatgttagtttgggtttaggaatagatatttttgataatatgacgtttaagtaagatttgaatattgaatatgagttaattagatagggagaggagagagttttttaggtagaaaaaaataaatcgaatgtaaaggatttaaaaattgtattaattgtataatttgatgagtttcgattaatgtatataattacgtaattattattaggaaaattatgatataaaatatttttattattttaatatattttttatatggttaatttttattttttattttttgttttttaatttttagtaattattgaattggttattgtgttttttttagatttgtatataaatgaaattatatagtatgtaatttttgtttggcgttttttatttgttttaatgattttgagatttatttatgttggagtttttttattagggaataaattttattgtgtggacgtattatttggatattttaattgtttatagttttagggttattataaatgatgttggtatgaattttattttttttttatttattttcgtttaattatttaggagtggaattgttgagttttatatttttaagaaattgttaaattgttttgtaaagaggttatattattttttatttgtattagtaatatgtgagaggtttagttgttttatatttttcggattgttatttaattttatttatattagtgggtgtatagtggtattttatggtggtttatatttatattttttaataattaatgaaggtgagtatttttttatgggtttatatgtcgtttatgtaattatttttggtgaaatagttatttagtttttttttttattgtaaaaatacggttgtttttttatgagttttaagattatatattttagatatatattttttgttagatgttttgtaattatttttttttagtttgtggtttgtttttttatttttttaataatgtttttttattttgaaataattttagatttatatagaagttataaaaatattatagtttttgggtattttttatttagtaataatatttgataaattatagtataattattaaaatgaggaaattaatattggtataaaattattaattaaattagaaattttttttagattttattagtttttatatgttttgtgtgtgtatagttttatataaatttattatatattttatattagtataatttttattataattagaatattgaattatttcggtttggtatagtggtttatttttgtaattttagtattttgggaggttgaggagggtagattatttgaggttaggagtttaatattagtttggttaatacggtgaaattttgtttgtattaaaaatataaaaattagttgggcgtggtggtatatgtttgtagttttagttatttgggaggttgaggtaggagaatcgtttgaattttggagacgaaggttgtagtgagttaagatcgtattattgtattttagtttgggtgatagaatgagattttgttttaaaaaaagaaaaaaagaatattgaattattttattattttaaagaaatatttttatgttatttttttataattatatattttttttaagtttatttgcggtaattattaatttgttttttgttattattattttttttatttaaaaagttataggttagtagtagtggtttatatttataattttggtattttggaaggttaagatagaaggattttttgagtttaggagttcgagattagtttaggtaatatagagagattttatttttataaaaaatgaaagaaaaaaaaaatttgttatagtagtagtgtatatttatagttttagttatttgggaggttgaggtagaaggattattttagtttaggagttagaggttgtagtgagttatgatagtattattgtatgttattttgggtaatagagtgagattgttttaaaaaaaaaaaaaggttatataaattaaaattattataagtaattttttaaattttttgaaatttgaggaaagtttttagtttggttaatagttttatattagtgttagtttttttattttgatagttgtattatggtttgttaaatgttgttgttgggtgaaaggtatttagaaattgtaatattttgtaatttttatgtgagtttaaaattattttaaaataaaaagatattgttaagaaaatggaaaggtaagttatagattgggaaaaaaatagttgtaaaatatttgataaaggatgtgtatttggaatgtatataggtttaaaatttataagaagatagtcgtatttttataatagggaaaagaattgaatagttattttatttagtataatgtttttaagattttttaaggtgttggtatattaatagtttgtttttttttttattgaatattatttattgtatgaatgtatgataatttgttatttatttattttttgttggttatgataaagttgtt

SEQ ID NO: 245 - DNA, 9208 bp, Artificial Sequence
  chemically treated genomic DNA (Homo sapiens)
taattatgttttatataagtgggaggtcggatttttgattattgtttaattattgtgagtaattcgggaggtattcgacgggggaggtgtttggggagggatttgtattgtatagatttcgtggagtttgggaattaggaaattagatatttttttattttggagagttcggggaagggtaggaagtattgtttgttttggaggttttttagttttttaggtagagaatgttttattaaaataaaagttttagttgtagagttgtgaaaggagaggggttatagatgtagtgagaatgttgtgagagggttaaaatgaatttttagatgtggatttaggttttagatgaggttgagggggttggatggagggttagggattttttttaggtttagggattttgtagtttttttggggtttggggaaggatgtggtggtagagttataatgttttttattaaaaattttatgagttttttttttttttttatgtgttatgtatttttttatttattttttatagttttatttattgataaggaaattgaggcgttaagtgttttgtttgaggttatatagttgtgataggcggagttagggttttttttaggattgtgtttttatagtggtttttttcgtgtttttttatgtgttttttttatgttggatgtttgagttgagttggtggggtgtttttatttttggttttgtttagagtatgtgtagtgggtttgtttttatggttacgttagatttagaggatagattgaggtagaggtgatgttttttttgtgtatagcgttttatattgggtttgttgtattttcgttgtaaaattttatttatttgatagatgtagaatttagtttggatggaggagtggtcggattgtttttataggtggagagttttattttgtgtttattttattttgggtattgggttttttagtattgattttttttttatttttttaaaggaatttgaataaagtagggagtggttggcgtttgattttattggagttttatttttgagttttttgtttggtagtaggtgttttgtattgtttttatgttatgggtttggggagttttttatgagtgtgtgaggtttttaggtttatagttttgttggtttttttttggtttttttgtttatatggttatttttggttggggttagaggttaagtggttggcgttggggttagtgggtgggggtatgtgtgtaagttatatttgtttttggagggtattatacgtgttttgttgtcgtttagaatatgggttttgttttttttgttttaagagtgttatttgtgggagtattttatggttaatttttatatagtttggattgtggttgtaggatttttgattgttcgatggtgatattgaggttttatagagtattgttgtattttagttttgtttgttgtggttatttttttaatttttggttgtcggaaagattggaggtggtatttcggggattttttttattttttttgtgacgtataggaaattttttgttagttaatttatggtttagcgtttaaagggagtaaagtttttagttggttcgtgtgaggagaaggtcggggtagcggaggttttcggcggtgagttagcgggtattgggtgttgatttattcgttgggtatgttagtcggttgtttatagtttaaaggggcgatgtttgttagtttggtgggtggggagggggttacgtgttttgtaggtggtatttagttttgagttggggtattggaggtggtttttttttgggtttcggattgggttgggaatttttgggtaggttttttgtgttttatttaggaattttttttattaggtaaggggttttgtttttttttgtttatagagtaggagtaggtggtagtgattgtttattatttttggtttaggggatattttaggtttagttgtgtagttgggatttagggagggtgaggagtagaggtggtgtagggtcggttggggtgggattcggtttgagtttttggaagatggtgatgtggagaggttaagattttagtttttagagtttgattgtttgggtttaaattttagttttgttttttttgcgatgtgacgtgggataagttgtatttggtttattttttgtattttgtaaatgatttttgttttttgggtatggtttagtttttagaggagaagtttttatttttttatttgtagattgagaatggggattttgtttgtttggatgtagatagttttattttatatttgttaagtgttaggtataagttatagtgagattgttttttgtttgtagagaatttagtcgaggtatgtttttgttaggtaggaagtcgggggttttgggttttgttgggatggttttgggttcgaattttggttttattatttttttatttgggtaagttttgtgttttttttagtttttagtttttttttttgtaaagtgggagtaaatatgtttttttgtagggtagtggtcgagattgaagatagtatttgttaagtgaatggtatttgttattattttattattgttatttttgtgggtgtagtttattggtaggtggataaatagtagtagggtttcgtgataatgtgttcgtaggcgttgtgatatgaggttttttggttgtagggtttttttacgtaggttagaatttattaggttttagggttttttaatttattggtttttaacgtggggttggggattgtttttggttttttgggttttttttgggagggtgagtggggaatagagagttggggtttgtttttgtaggtttgttttgtttttggttttggtatgtagtattaataggacgaatatggggaaggtggggtgggattgggaattagaatttaggtttttgggttagttcgggaagtaagagggtttggggttatggttttaggggtttagttttgagttaggggtgttggggggtggtgggttaagttgaggggagtaattgggtgttagtgttttgggagggttttagaggagggttgttgggtagtagtatggaggatatagtattgtggtagggttttacgattgatgtttatatgtcgtttacgtttgtttttgttcgcgttttttggcgttgtttatttttattaggtttgtgtgtttagtggtttttgtagatgttttttcgaagtagtggttttggaaattttaaatagttttttgttaggggtatgaaggttatatagggttaggggaggtagaagtagtttgttgggttttttgtagtttttagatattaagtttgattgcggtagttttagagagggttttagattttttttttttgattttagttttgggtatatgtttttgttatttttttgttttgtattttagggttattttttttggtttttttggggaggttatgtttagttgttttttttttagttggttttttgtttagggtggtcggtattattttttgttatgtggtttatggtcgggattgtatttggttttgttgatattttttggcggttatatcgagtgttttgattgtttttgtttgtattattgtgttgatgtttttaagggtttttaaggttcgttttaaggtttatatgtgttagtgtgtgcggtgatgcggtgataggttagggggttgttttattggggtagggttgcgaggggttgtggatgttagcggtgtgtttagatttaattaggaggtgtgtgggggttggggagtattgttgtttgggagggttgttttggcggtgttagttggtagttgaggtatacgttggaggtttgtttaggacggttttgggtatggggatggagatagtttttatttttttgttattttgtttttgtttggtttagttttttggttaatttatagttttttgtcgttggtatggtatacggtatttcggatggttggggtagattttagggtggcgcgggtagatattcgttgggaaagtttgtagggatttttaggtggtagggttggttttaggttagttttttatttattttttagggttgttgttgagggtgaatgagatttggtaagtttagggagtttttaggtattagatagtattgaatttgaatttgatgtttgtgttagtatttttattattaagaatttcgtttttggtatgttttattattaattttatgttttgtaagattttaatagtaatgataaattttagtttttgggaggtcgagataggaggattatttgagggtaggagtttataattagtttgggtaatatagggagagtttatttttataaaaaatataaaagattagttgggtatggtggtatacgtttgtagttttagttatttaggaggtagaggtgggaggatcgtttgtgtttgggaggttgaggttgtaatgagtgttatagtattttagtttgggtgatagagtgagattttgtttgtttaaaaaaaatagaagtaggttaggtacggtggtttacgtttgtaattttagtattttgggaggtcgaggcgggtggattatgaggttaggagttcgagattattttgtttaatacggtaaaatttcgtttttattaaaaatatataaaaaattaatcgggcgtggtggtaggtgtttgtagttttagttattcgggaggttgaggtaggagaatggtatgaattcgggaggcggagtttgtagtgagtcgggatcgtattattgtattttagtttgggtaatagagagagaatcgttttaaaaataaatataatataattaatataatagaatataatataatagaatataatataatagaatataatataatagaatataatagaatatagtataatataatataatataatataatataatataatataatacgtagtgataatagtgaagtatagatggcgtttgtttaggtttgtttttcgttttgtaggagtagtagtattggtttgtcgatagtgtaggtggttggtaatggttttgttgatttcgagtcgggtttacgtggggatttttggagtatagtttacgattttggtgtaaggaatgttttatttttttgatgttttgggagggttgagtattatttgtgggtttttttgttttgttatggttttttaaagtttgagtatggggtttgttttatagtgtgggagtttggggttagagttttatcgatttgattttttttgtgttggggattttgtgtgtatggatttgtttggtttttacggttatttagtaatttgggtgtgttgttattaattttattttaggagtgagtaaattgaggtttggtgggatagtgatttgtttaaggttacgaaggattgttttgggagtatggttttgtttttataatttcggatttttgtttatttttttttagaggttatggtttttttattcgtttataggacgttaaaggaggaaatcgaggtttgtatagagagggagtgtggttcgtttttaggttggtacgggtcgacgttgtggtggtttttttattgaggtgcggggaaggtaggagttgggatttaggttgggggtttgattttgttgttgttttggtgcgttattttaggcgtgttttggggtttttggtgttagtatttgtattggatagtttttggggtattttttagtttgagtagtttgttgcgggggttgtattgtgtttagtgagtttggttgtttttttagatagaggagagtgttggggttggttttaagtaggtttttttgtttttttttttttttaaattgtttgtatttgagtagtttttattatatagtgtaggaattttaaagggataaaaaggtagttttttgttttttttcggaatattttgtatattttagtatttttttttttttttttttttattttttttttttgagatagtgttttgttttgttgtttagtggtatagttatggtttattatagtttagacgatttttttattttagttttttaggtaattgggattataggtacgtattattacgtttattatatttttgttttgttttattttttgtagagataggattttgttatgttgtttaggttagtattgaatttttgagtttaaggaatttatttattttggttttttaaagtgttgggattataggtatgtgttaatttttgtatttttagtagagatagggttttattatgttggttaggttggttttaaatttttgattttaagtgatttttttgttttggttttttaaagtgttgggattataggcgtgagttattttatatggtttgatcggtatttttttttttatattgttgtatttttgttgtttttggttttttttgtttttgggaggttatttttcgtattttgttgaggatttgtaggatttttattaattttatgtgttagttttttgattttataaattttgggttttagtttttttatttgtagtatggagattatattagtatttgttttaaggggttgttgagaggattaaatgagatgtaatgaaagaaatttgtataggttaggtacgtagaggatattttaggatattttagtatatagtaggtatttattaaatgttagtgggtgttgtagtgtgggggtaagttgtttaacgtggaatttttggatgtagaagaatgggtattttgatggttatggggtatggaggatttagatcggtgaggtttggttatgggaggttaggttgtattttgatgttcgtagttatttgttgtgggttttttgttttttacgtgttttgtgttttagttattttgttcggggttttttcgtgttgtttttttttttttttagcgaggttcgtgtttttggtttttttttacgtttttttttttaaagtataagtggttttatgttgtaggcgggttatggttgtttttgttgggttgttggtattgggcgggaggattttttggtagttatggttgtttttgtgtagttgagtatttggtttttttatcggatgttaggggtgttttcgagttatgttggttcggagtattatcggggagggggcgttgttaggtggatagtttggggatttttcgttttttgtaggtgaggaagtttttgtagggtagagaggtggggagggtgtgaggttttggaggttaggttttggttaggtggttttgtatagtcgggtagaggtagggtagggttgtggagggtagagttttggttatttttttttattttagtttgttgtatatttataaggtgaggatagagaaggtagggtttgtagtggtcgtgtatgaggttagatggtatagtttgggtttggtatggagtaggtatttggttagatgggagaatttttttttttgttttgtattttttttagagtttaggataggggttttagaattttagggtaaggggttttgtttgaaggtgtatggttattttttgttgtttataggtgtttggtagtggcgtttgtagtattttaggatttttgatggtatttgttttggggagaggggttagtgtttggtaggtcgtagttaaatatatttatttatatcgtcgaggtatatttgtttacgtaaaagtttgtgtttatttttcggggttttagtttttttcgtgttatggagcgtattggttttgttgttgtttttttgagggattttggggaatagaggtggtttggggtagggcggcgttttttgttgtttatattttttagtttttgtggttttttttttggtaggtttagaatttttgtagtagaatagggattttttggaatattcggaagttaggtgagggtagtgaattaggagtagggattatttttgttgttagaaatttggtgatgtttttgtatgtggtatggtgtggggttgattttatgagtggaggcggagtaggggttgtaaggaggggttgttattttgtttttgtgggtgatttttagagggttatatagtttggtttttttaggtttagggtagagggagtagtcgaagtgggggttttgtttttaggttgttgttgtttggacgttggagttagatagatttgtttttatggttattttttattagacgtttatcgtgtggtttttttaagttattttttttttcgtatgtttgatataatagataagtgaattttttttatttttttgtggagttattgagagggtggataggggtggtttggggttgagggtggtgtttttttgggagttgtgtatttttagatggttttatttaatttttacgcgttaggtattgttatggtatgacgttgataattcggggaggtttgtttgtaatttttattttatatatgtttagagaggtgaagttatttgtttgagggtatatagttaggaaggggtagagttgtagttgagtttaggttttggttttagagtgagtgtttataggtgatttgttgattggttttttgagatggtaattgtagaacggttatttgtgggattttatagtagagaagttattaggttatagggagagtcggttattggggtttgcgtagttaggtagtttttttgaattggtgaaaggtaagacgacgtagtagttaggatagttatagggaagagtattttaggtagagggaagggtatgtgtgaaggttttgcggtgggaaagtaggtgttttatttagagaagggtttatttaagggtcgggggttttagttgggggtgagtgggaggagatagggtagagttgttacggttagtgagagttgtgttttagtttgggggtgtttttttttatttgtggtgtagttttaggttagtggttgaattttggttagttttagtttttttgtttttgtttgggggttgttatgaggttggagtatgtggaggatattttaggatatttcgtgttgagagtcgggataggcgggtttatcgtgggttgttagtggtcgtcgagagtttttgtttgttgtggtgatggttgttataacggttgtatttgggtagttttgggttgtttggttatttgggtttagttttgacgtttgtagtagtttgaggtttgtttttaggttgtttttatgacggttttatttattttttttgatagttgggtggtttttttatggagtttgtggtttttttgatgtaggtttggtgtttttaatagg

SEQ ID NO: 246 - DNA, 9208 bp, Artificial Sequence
  chemically treated genomic DNA (Homo sapiens)
tttgttggggatattaagtttgtattaggagggttataggttttatggggaagttatttagttgttagagggagtgggtgaggtcgttatggagatagtttagaaataggttttaggttgttgtagacgttagagttgggtttagatggttaggtagtttagggttgtttaggtgtagtcgttgtggtaattattattataataaatagaggttttcggcggttattggtaatttacgataagttcgtttgtttcggtttttagtacggggtgttttggggtgttttttatatattttagttttatagtagtttttaggtaggggtaaggaaattgaaattgattagaatttagttattgatttgaggttatattataggtaaagagaggtatttttagattagaatataatttttattggtcgtggtagttttgttttatttttttttatttatttttaattagagttttcgatttttgagtgagtttttttttgaatgagatatttgtttttttatcgtagggtttttatatatgtttttttttttgtttgaaatgtttttttttgtgattgttttagttattacgtcgttttgttttttattagtttagagaggttgtttgattgcgtaggttttagtgatcggttttttttgtggtttgatggtttttttgttgtggagttttataggtggtcgttttgtagttattattttagagagttagttagtaggttatttgtgagtatttattttggagttaaggtttgggtttaattgtaattttgtttttttttagttgtgtgtttttaggtaagtggttttatttttttggatatatgtaaagtggagattatagataaattttttcgggttattagcgttatgttatagtagtgtttggcgcgtggagattagatggggttatttggaagtgtatagtttttaagagaatattatttttagttttagattatttttgtttatttttttagtgattttataagggagtaggggaggtttatttatttgttgtattaagtatgcgggagaagaggtgatttagagaggttatacggtgggcgtttggtgaggagtggttataaaggtaggtttgtttggttttaacgtttaaatagtaatagtttgagggtagggtttttatttcggttgttttttttattttgggtttggggagattaagttgtgtgattttttaagggttatttataggggtaagatgataatttttttttgtagtttttgtttcgtttttatttataaagttagttttatattatgttatatgtaggagtattattaggtttttgataatagaagtaatttttgtttttagtttattgtttttatttgattttcggatgttttaggaggtttttgttttattgtagaagttttgggtttgttagggaaggagttataagggttgggagatgtgagtagtaagaggcgtcgttttgttttaggttatttttattttttagggttttttagagggatagtaataaggttaatgcgttttatggtacgggggaaattgaggtttcgagaagtgggtataggtttttgcgtgggtagatgtatttcgacggtgtggatggatgtgtttggttgcgatttgttagatattggtttttttttttaggataggtgttattagaggttttgaggtattgtagacgttattgttaagtatttgtgggtagtagggggtggttatgtatttttaggtagggttttttgttttgaggttttggggtttttgttttgggttttggagaggatgtaggataagggggaaggtttttttatttaattaagtgtttgttttatgttaggtttaggttgtgttatttggttttatatacggttattgtaggttttattttttttatttttattttgtaggtgtgtagtaggttagggtgaggaggagtgattaaggttttgttttttatagttttgttttgtttttgttcggttgtgtaaggttatttggttagggtttggtttttagggttttatattttttttatttttttattttatagggatttttttatttgtagagaacgggggatttttagattatttatttggtagcgtttttttttcggtgatgtttcggattagtatggttcgggagtatttttaatattcggtggggaggttagatgtttagttgtataggggtaattatggttgttagagggttttttcgtttaatgttaatagtttagtagagataattatggttcgtttgtaatatggaattatttgtgttttggagggaaggacgtagggaagggttagaggtacgggtttcgttggagagggaaggaggtaatacgggaggatttcgggtagagtggttggggtataaggtacgtgaaagatagggggtttatagtaggtggttgcgggtattagggtgtagtttggttttttatggttagattttatcggtttgggttttttatgttttatggttattaaaatgtttatttttttgtatttagaaattttacgttgagtagtttatttttatattataatatttattaatatttagtgaatatttattatgtgttggggtgttttggggtgttttttgcgtgtttggtttatgtaaattttttttattatattttatttgatttttttagtaattttttgaggtaggtattaatgtgatttttatgttgtagatggggaaattgaggtttagggtttatagaattaaaaggttggtatatggaattggtgaggattttgtaggtttttagtaggatgcgaggagtggttttttagggataggaagagttaagagtagtaggagtatagtagtgtgagaaagaaaatgtcggttagattatgtgaggtggtttacgtttgtaattttagtattttgggaggttaaggtagaaggattatttgaggttaggagtttgagattagtttggttaatatggtgaaattttgtttttattaaaaatataaaaattagtatatgtttgtaattttagtattttgggaggttaaggtgggtggattttttgagtttaggagtttaatattagtttgggtaatatgataaaattttgtttttataaaaaataaaataaaataaaaatgtagtgggcgtggtggtgcgtgtttgtagttttagttatttgggaggttgaggtgggaggatcgtttgagttgtggtgagttatgattgtgttattgggtaatagagtaagatattgttttaaaaaaaaaaaatgagaagaagaaggaaagaaaatgttggagtgtgtagagtatttcgaggagaaataagagattgtttttttgtttttttgagatttttgtattgtgtgataaaggttatttaagtgtaggtaatttaaagaaaagaagaaataaagaggtttgtttgaagttagttttagtatttttttttgtttgaaggggtagttaggtttattgagtatagtatagttttcgtagtaggttgtttaggttggagggtgttttagagattgtttagtgtagatgttgatattaggggttttaggatacgtttgaggtgacgtattagggtagtagtagagttaggtttttagtttgggttttagtttttgtttttttcgtattttagtggagaaattattatagcgtcggttcgtgttagtttgggggcgagttatattttttttttgtgtaagtttcggtttttttttttgacgttttatgaacgggtgaaggggttatgatttttgggaaaggatgagtaagggttcggagttgtaaagataaagttatgtttttaggatagtttttcgtgattttgagtaggttattattttattaggttttagtttatttatttttaagatggggttgatgataatatatttaggttgttgggtagtcgtgaagattaaataagtttatgtatataaaatttttagtataaaaggggttagatcggtgggattttggttttaggtttttatattgtggggtaggttttatgtttaggttttaagaggttatgatagggtagggggatttataagtgatgtttagtttttttagagtattagaagaatgggatattttttgtattaggatcgtaggttgtgttttaaaggtttttacgtgggttcggttcgaggttagtaaggttattgttagttatttgtattgtcgataggttagtgttgttgtttttgtagaacggaaaataaatttgaataaacgttatttgtgttttattgttattattacgtgttgtgttgtgttgtgttgtgttgtgttgtattgtattgtattgtattttattgtattttattgtattgtattttattgtattgtattttattgtattgtattttattgtattgattgtattgtatttatttttgagacgattttttttttattgtttaggttggagtgtagtggtgcgatttcggtttattgtaagtttcgtttttcgggtttatgttatttttttgttttagtttttcgagtagttgggattatagatatttgttattacgttcggttaattttttgtgtgtttttagtagagacggggttttatcgtgttagataggatggtttcgagtttttgattttatgatttattcgtttcggttttttaaagtgttgggattataggcgtgagttatcgtgtttggtttatttttattttttttaaatagatagggttttattttgttatttaggttggagtgttgtggtatttattgtagttttaattttttaggtataaacgatttttttatttttgttttttgagtagttgagattatagacgtgtgttattatgtttagttaattttttatgttttttgtagagatgagttttttttatgttgtttaggttggttgtgaatttttgtttttaaatgatttttttgtttcggttttttaaaggttgggatttattattattattaaaattttataaagtatgggattgatgatgagatatattaaaaacggggtttttggtgatggaaatgttagtatagatattaggtttaaatttagtgttgtttggtatttaggggttttttggatttgttaggttttatttatttttaatagtagttttgagaggtaggtagggagttggtttagaattagttttgttatttggaagtttttgtagatttttttaacgagtgtttgttcgcgttattttggggtttgttttagttattcgggatgtcgtgtgttatgttaacggtaggaggttatgggttgattagaaggttaagttaggtaagagtagaatgataaggggatgggagttgtttttatttttatatttagagtcgttttgggtaggtttttaacgtgtgttttagttgttaattgatatcgttaaagtaatttttttaggtagtagtgttttttagtttttatatattttttgattaggtttgaatatatcgttggtatttatagtttttcgtagttttgttttagtgaggtagttttttggtttgttatcgtattatcgtatatattggtatatgtaaattttgggacgggttttggaagtttttgggggtattagtatagtgatgtaggtaaggatagttagggtattcgatatagtcgttaggaggtgttagtagagttaggtgtaatttcggttatgggttatatggtaggaggtggtgtcggttattttgggtaggggattagttgggagagggatagttggatatggtttttttagagaaattagggaaggtggttttggagtgtagggtagggaggtgataaggatatgtgtttaggattggggttaggggaagaaagtttggggttttttttggagttgtcgtagttaggtttggtatttggaagttgtaaggggtttaataaattgtttttgttttttttggttttgtatggtttttatgtttttggtaagaggttgtttgaggtttttagggttattgtttcggggaggtatttgtagaagttattgggtatataggtttgatggaggtgggtagcgttaggaggcgcggataagggtaggcgtggacggtatgtgggtattagtcgtggggttttgttataatgttgtgttttttatgttgttgtttagtagtttttttttgggatttttttaagatattggtatttagttgttttttttagtttggtttattattttttaatatttttgatttaggattgagtttttagaattatgattttaggtttttttgtttttcgggttggtttaggggtttgagttttaatttttagttttattttattttttttatattcgttttgttaatgttgtatgttaaagttaggggtagggtaggtttgtaggagtaggttttagttttttgttttttatttatttttttaagggaggtttaggaggttaggggtagtttttagttttacgttggggattagtgggttaagaggttttaaagtttggtaaattttggtttgcgtgaaaggattttatagttaagaggttttatgttatagcgtttacgagtatattgttacgaagttttgttattgtttatttatttattaatgaattatatttataaaagtaataataataaaataataataggtgttatttatttaataaatgttatttttaatttcgattattattttgtaagggagtatgtttatttttattttatagaagaggagattgagggttaaagagggtataagatttgtttaggtaaggaagtagtggagttaggattcgaatttagggttattttagtagagtttaggattttcggttttttgtttgatagaggtatgtttcggttgggttttttgtaggtagagggtagttttattatgatttgtgtttgatatttagtaagtgtggaatggaattgtttatatttagataagtagggtttttatttttagtttgtagatgaggaaatggaagttttttttttgagagttgggttatgtttaggggatagaaattatttatagagtgtagagagtggattagatgtaatttgttttacgttatatcgtaaaagggatagagttggggtttggatttaggtagttaggttttggaaattgaggttttagtttttttatattattattttttaggagtttaggtcgggttttattttagtcgattttgtattatttttgttttttattttttttgagttttagttgtatagttgaatttgaggtgttttttgggttaagggtggtaaatagttattgttatttgtttttgttttgtgagtaagaggaagtagagttttttgtttaatagaggaagtttttgggtggggtatagagggtttgtttaggggtttttagtttagttcgaggtttaggaaggggttatttttagtgttttagtttagggttaggtgttatttgtaggatacgtaattttttttttatttattaggttggtaggtatcgtttttttaagttgtaggtagtcggttggtatgtttagcgggtgagttagtatttagtgttcgttgatttatcgtcggaagttttcgttgtttcggttttttttttatacgggttaattgagaattttgttttttttgggcgttgggttatgggttggttgatagagagttttttgtgcgttataagaggggtgggggaagttttcgaggtgttatttttagttttttcgatagttaggggttgggggggtggttatagtaggtagggttaggatataatagtgttttatgaaattttagtgttattatcgggtagttaggagttttatagttatagtttaagttgtgtgaagattagttatgaagtgtttttataggtggtatttttagggtagaaggggtagaatttatgttttgaacgataataggatacgtgtggtattttttaaggataaatgtggtttgtatatatgtttttatttattggttttagcgttagttatttggtttttaattttagttagagatggttatgtgggtaaggaggttaggggaaaattagtagagttgtgggtttgagggttttatatatttatagaaaattttttaggtttatggtatggaaatagtgtagggtatttgttgttaggtaggaagtttaaaggtaaagttttagtaaggttaagcgttagttattttttgttttgtttaaatttttttgagaaggtggagaagggattagtgttgggaggtttagtgtttaggatggggtgggtatagagtgaggttttttatttatgggggtagttcggttatttttttatttaagttgagttttgtatttgttaaatgagtgggattttgtagcgagaatgtaataggtttagtgtaaagcgttgtgtataggagaggtattatttttgttttagtttgttttttaggtttgacgtggttatgaggataggtttattgtatatgttttgagtaaggttaggggtgggggtattttattagtttagtttaggtatttagtatgggaggggtatataggggagtacggggaaggttattgtggaaatatagttttagggggaattttagtttcgtttgttatagttgtgtggttttaggtaaggtatttaacgttttagtttttttattagtaaatggggttatgaggaataaatgagaaaatgtatggtatatggaaaaaaagaaggagtttatagggtttttggtgaagggtattgtggttttgttattatatttttttttagattttaaagagattatagagtttttgggtttgagggaggtttttgattttttatttagtttttttaattttatttaggatttgggtttatatttagaagtttattttggtttttttatagtatttttattgtatttatgatttttttttttttataattttgtaattggaatttttattttgatgaggtattttttgtttggagagttaaaaagtttttaaaataaatagtgttttttattttttttcgagttttttagagtggagaagtgtttgattttttggtttttaagttttacgaggtttgtgtagtgtaagtttttttttagatatttttttcgtcgagtgtttttcgagttatttatagtggttgggtaatggttagggattcggttttttatttatgtaaggtataatta

SEQ ID NO: 247 - DNA, 6239 bp, Artificial Sequence
  chemically treated genomic DNA (Homo sapiens)
gttttggcgtgtagtggtattattatagtttattgtagtttggaatttttaagatttttttattttatatttttgagtagttgggattataggtatatattattatgtttagttattgttatttgtttagtttttttgtagagatggggggtttattatgttttatttatatatggtgtaaaattaggcgaaaatttatttatgttgttagtgttagaaggtaagatagtgattagttatttttagcggagtggggttagggggaagcgtcgtgattagaaggaatatgaggacgtgatttttttttgatttggattttggttgaatgagtgtatttattttgtgaaaattattttaattgtgtatagtagataggggaaatttgcgtagtcgggtcgttatgtatggttaaggttgggcgcggttgagtattggagttcgggagaagtaggagtaggcggggatatttaaggcggaagggttaggggaagaatcgggttcgaagcgattattaatttttaaagttaagaattttatttaatataatcgtttaagaagcgagggcgatagagttaaattagcgaggtcgagttaaggaaagggattgcggaagtggaggaggaggaaggttttacgtggtggagtaggtcgaataggaagttagggggtaagagattagttagcgcggtagttaaaggggggagaaataagcggaaatcgcgttagcgaaaagtagattacgaagtggaagaattgtaaaaagagagatagagaggggcgtaggggagggaaaaaataatcgaggaacggtaaagaggtcgaaaaggaagtggagagttagagttttataaaaaggtagatattggatgattttatttatatgaggtatttagagtagttaaatttatagaaatagaaagttgattggtggttgttaggggttggagggaaggggaagtgggtagttgtttaatgaatatagagttttagttttgtaagatgaaaatttggagattggttgtataataggatgaatgaatgtatgtaatattattgatttgtatattttaaaatgagtataatggtaaattttatgtgtattttattataaggaaaaaaattattagatatttaattttttagtaatgtgtttatttttagttaaatttgttagttaattgaagttaatataggttagtttttatattttttagtgttattatattggtgtatttattgttttattatttttttttttgattttatttttttgttagtatttattattatttaatatatattttatttatttgtttgtgttttttattagaatataattttatgaggggagggattttttattatatttagtgaaaagtaaattttttaagtaggaatattataagtaagtatagttttttttttatagtaagtttgtttaatggttagtaaattattttagttagtatttgagtgattattttgatttgtattatttaataagaaaaaaggtttggcgcgttgttttacgtttgtatttttagtattttgggaggtcgagacgggtggattatttgaggttaggagttttagattagtttggttaatatggtgaaatttcgtttttattaaaagtataataattagttgggcgtggtggtatatatttatagttttagttatttgggaggttgaggtaggagaatcgtttgaattgggaggtggaggttgtaatgagtcgagattgcgttagtgtattatagtttgggtgatagagtaagatttcgttttaaaataaataaataaaataaaataaaatgaaaaaaagtattaaatgtaaattttttaagattatatgtaatttcgatgttaaatattaaatattttttaaatttagatagtatttaatttggtaaagattagaaagttatattttgttatttatgatattaagtggaatgtattattagtgattatgatgtttttcgtaatgagagttataattttttggaaaaatttttgtttaaattattaaagttaagattttttattatataaaggttatgaagagttgacgtgtaattatattggttttgtaaatattggaatagaaatatgagtttgttattagtgtaagaaaagttttagaatatgtatgtaaatttggtaaattgagttggttttttttacggtatttcgaataaaagagatattttaataaattataggtttatagaaaatttttagtttcgtggtttattttttaaaataataggaaatgaatttttaataaaagtatatgaggatttttgatgaacggtttattttttatagaagtgaagtgtaggtgaaaaggggaaatttttagaatatttgaaggatttgattaaatgaatttttatttaagttattgatttatagtaatttaaaatgtgataatttattttttataatggttttttaaattaaatataaaagtaatttagagtaaagtatgtagaaaaaattttggtattgtaattgaaaatgattaatattaattttttttttttatattaattaagtattttattgttagaagggaaattgataagtttttttaatcgagtttatataaaatttaattttagaaagtaaagttaattcgtgtatttttataagaaagaaataaaggacgaatttatatattataatttgtaaagaaatttttgtagaggtattatcgttttataattttatgtattttaaaatttgaggtaataaggtatttgaagataattaaggttggtcgggcgcggtggtttatatttgtaatttttttagtattttgggaggttgaggtgggcggattacgaggttaggagtttgagattagtttggttaatatagtgaaatttagtttttattgaaaatataaaaatgagcgggtacggatggcgtacgtttgtagttttagttattcggtaggggttgggggttggtgggggtggtagtgttgaggtaggagaatcgtttgaattcgggaggttgaggttgtggtgagtagaggtcgcgtcgttgtattttagtttgggcgacggagcgagatttcgttttaaaaaaaaaaaaaaaaaagataattaaggtttattgttattttcgtgatattattatattattaattgcgtaagtaggttatttagttgaaaatatatggattagatcgaatatttttgtaatagtttaataagagacgatgatgcgattattgtagttgtttttaggtaattaaatttttcggcgaatttttttattattgaatttgaataggggattgttttgttatttttagggtattcgtgcggtaaaagaatttttattggaaaaattgttaaataatggttttgtttaaatgttgggaggaaaagaatgaatgaattttttttgagagttttgtgaattttggaaaaagggggggagtaaaaaataaggaattaaattttttttggaaatttttcgtttttttgcgttttttgttggaattttcgaatgcgaatataaaattttttatcgaaataatttttttagaatttaaaagggtttttgaatttaaaaagtgggggggataaaattcgggggagttttgtaaagttttcggttttttttggaaaagtttttttttgttaaaaagggttaaaaaagcggtttttttttaaaaaggtttaaaaagtttttttaaaaaaatagggttttttttttggttcgggatattttttaagttttttttttaatttttttttttcggtttttggggaaaaaaaagggttttttaaatttttttcggcggggtaattttataaatttaaggggggggttatcggaaaaaattttgaaaaaggggttttcggtgaaatttcgggggttttttttttttcgggggggttttttttgtttgtgggggtataaaaaaaaagggggtttttttttttaaggtcggggggtaaaaaatttaaaagtttttttttttttttagagattttcgtataaaagggggtataaaaagggttcgtgggttttttcggggtttttttttcgggggttttttatatagcgaaacggattgtattgttaaattttaaattggtttttggcggattttagttttttatttttcgtttggtagatgtttttatttcgttgttattaagtagggttaggaaatggaagggtcgtgatcgggtcgtcgcgggcgttttgtgggcgatgagggttttttgagcgagtaagattagttttttttcgattcgttacgcgttacgcgtcgcgcgtcgcgcgtcggtttttcggttttttacgtcgggggcgtattttttcgggagttgttgtttttttttaatatggcgtcgcgggaggcgggtttcgttcgtcggttttcggggtttcggcgtcgcgcgttttggtttcggagtaatagtgtcgtcgtcgttttttttttttttttttcgtcgttatcgtcgtcgtcgtcgtcgtagtcgtcgttagttcgcgcggtttcgggtggtcggagtttagtttgcgcgcgtcgcgttttgtgttttcgggtggggtagaagattcgttttttgaatttttcgcggggatttttcgtggtgtggcggttttggggtttttttttaatagtttcggattgagttttttttagtcgaggatttttttttagtttattgacgagcggtggatatttgtcgttgtattttttttaaatcgagtttttgttttgttgtttttttatatttatacggcggtagagatttttattatagcgttcgtttaattttagaatttttcgattttcgttagtttttgcgggtttttgttcgtttttcggtgtatttttttcgggagatattttagattttcgatagtttgggtaggttcggtgtttgcgggtgcgtttttgattattttttttttttttttttttttttattttttatttttttgtttttattttttgttttttgttcgttattttttttgttattttttggagtttttttttaattagcggttagtgggttttttatattttaggatgtgagtttttttaatttgtaatgttgtggttagtttttggttttttttttgttatggagaattaggtgttggtaattcgtattaagattttaaatagtggcgcggtggattggatagtgtatttcgggtcgtagttattttttagggatgtgttggtgagtggtaattttagtgttcggatgttagtaagggggatttagggatttgagtagttagtattttgattattggtgatttgagttagtggtaatggttattgttggttttttgtggaggtagttttattgttttaggtatagtattgataaattgtaattattaaaatttggtaaatgtttaggattttggggagatagattaatttgattgaatttttgtttttagagagtttatggttcgggttgggatatatatatagatataattacgtaaatgtaaattgttgaatttagaagagaggttttttttttttaagtgtttcggggaatgtttttggatagattttagttttgtttttttattgagttttttgaatttggtgattagttgagaaagggaaaaaggataattttaatttattatgtttgagtatattgttttattaatttattttgagatagggttttattttgtcgtttaggttgtagtgttgtggtacgatttcggtttattgtagtttttgttttttgggtttaagcgatttttttattttagttttttaagtagttggtatatgttattatatttggataatttttgtattttgtagagacgaggtattgttatgttgtttaggttggttttgaatttttgcgatttgtttgtttcggtttttttaaagtgttgagattataggtgtgagttattgtgtttagtttgagtaaatttaaagtattattgaatgtaagatattttatttagaaaaaaatgttaattatgatagtatgatatattattcgttattaaaatgagtttagttttagagacggtaaaagtaagggaaaatgtgtattttagaattggtgatattttatatttagattttttagaatatattttaaataaaatgatggaattttagagtagagtgtaatattgtaggtggtttgtttagttgatgttttttttttgtagatagttattgaggagtagtgaggtgaaat

SEQ ID NO: 248 - DNA, 6239 bp, Artificial Sequence
  chemically treated genomic DNA (Homo sapiens)
attttattttattgttttttagtaattatttgtaaaaaagaaatattagttgaataggttatttatagtgttatattttgttttaaaattttattattttatttgaaatatattttgaaaaatttgaatgtaaaatattattaattttaagatgtatatttttttttatttttatcgtttttgaaattggatttattttaataacggatgatgtgttatattgttatggttagtatttttttttaagtaaaatgttttatatttaatgatgttttaagtttgtttaggttgggtatagtaatttatatttgtaattttagtattttgggaaggtcgaggtaagtaaatcgtaggagtttaagattagtttgggtaatatggtaatatttcgtttttataagatataaaaattatttaggtgtgatggtatgtgttagttatttgggaggttgaggtaggagaatcgtttgagtttaggaggtagaggttgtagtgagtcgagatcgtgttatagtattgtagtttgagcgatagagtgaggttttgttttaaaataaattaatgaaatagtgtgtttaaatatggtaagttaaagttgtttttttttttttttttagttggttattaagtttagagaatttagtagaaaaataaggttggaatttgtttaaggatatttttcgaaatatttggggggaaaaaattttttttttagatttagtagtttgtatttgcgtggttgtgtttatatgtgtgttttagttcgggttatgagttttttgagggtaggggtttagttagattgatttatttttttagggttttagatatttgttaggttttagtggttgtaatttattaatgttgtgtttgaagtaataaaattgtttttataggaagttagtagtagttattgttattggtttaggttattagtggttaaggtgttgattatttaagtttttgagttttttttgttggtattcggatattgagattattatttattagtatatttttgaagagtaattgcggttcggagtgtattgtttagtttatcgcgttattatttgggattttgatgcgaattattagtatttggttttttatggtaggaaaggggttaagggttagttatagtattataggttaaagaggtttatattttggggtatgggaaatttattggtcgttggttaggagggggttttaagaggtgataaggggagtgacgggtagaggatagagggtgaaaataagggaatggaggatgagggggagggaagaggggaggggtgattaggaacgtattcgtaggtatcgagtttgtttaggttgtcgggggtttgaggtgtttttcggggagggtgtatcgggaagcgggtaaaggttcgtaggaattagcggaggtcggaaggttttggagttgagcgaacgttatggtgaaggtttttgtcgtcgtgtgggtatgaggaggtagtagggtaaggattcggtttgggggagatatagcggtaggtgtttatcgttcgttagtggattaggagagggttttcgattggaggggatttagttcggggttattaagaaagagttttagggtcgttatattacggagagttttcgcgggaggtttaaggggcgagttttttgttttattcggagatatagggcgcggcgcgcgtaggttgagtttcggttattcgaggtcgcgcggattggcggcggttgcggcggcggcgacggcggtagcggcgagaggaggaggaggaaggcggcggcgatattgttatttcggaattaaaacgcgcggcgtcggaatttcgggagtcgacgagcgggattcgtttttcgcggcgttatgttggaaaagggtagtagttttcgggaggatgcgttttcggcgtgggaagtcgaggaatcggcgcgcggcgcgcggcgcgtggcgcgtggcgagtcggggagagattggttttgttcgtttaggagatttttatcgtttatagagcgttcgcggcgattcggttacggtttttttattttttgattttgtttaatgatagcgaggtgaaaatatttattaaacgaagggtaaaaggttggagttcgttaaaagttaatttaaggtttaataatgtagttcgtttcgttgtgtggaaaattttcggaagggaaatttcgggggggtttacgggttttttttatgtttttttttgtgcgaaaatttttggggggggaaaaaaatttttgggttttttgtttttcggttttagaggggagggttttttttttttttgtgtttttataagtagggagggttttttcgggggggggggaattttcggggttttatcgggggttttttttttaaaatttttttcggtgattttttttttgggtttataaggttatttcgtcggggggggtttgaaaaatttttttttttttttaaaaatcgggaagggggggttaaaaaaggggtttggagagtgtttcgggttaaaaaaaaggttttatttttttaaaggggttttttaaatttttttgggaagagatcgtttttttggttttttttaataaaaaagggtttttttaaaaggaatcgggggttttgtaaggttttttcgggttttattttttttattttttgggtttaagagtttttttgaattttgggaaaattgtttcggtggggggttttgtgttcgtattcggaaattttagtaaagggcgtaaaagggcgaggaatttttaagggaaatttagttttttattttttattttttttttttttttaaggtttataaggtttttaggagggatttatttatttttttttttttaatatttaggtaaaattattatttggtaatttttttagtgaaagtttttttatcgtacgagtgttttaaaaatagtaaaatagttttttgtttaaatttaatagtaaagaaattcgtcgaagagtttaattgtttggggatagttgtagtagtcgtattatcgttttttattaaattgttgtagaaatattcggtttagtttatgtatttttaattaaatagtttgtttacgtagttggtgatatggtgatattacggaagtagtaataaattttggttattttttttttttttttttttgagacggagtttcgtttcgtcgtttaggttggagtgtaacggcgcgatttttatttattataattttagtttttcggatttaagcgatttttttgttttagtattattatttttattagtttttaatttttgtcgagtaattgggattataggcgtgcgttattcgtgttcgtttatttttgtatttttagtagagattgggttttattatgttggttaggttggttttaaatttttgatttcgtgattcgtttattttagttttttaaagtgttggggggattataggtgtgagttatcgcgttcggttaattttggttatttttaaatgttttgttattttagattttaaagtgtataaggttgtagaacgatggtgtttttatagaagtttttttataaattgtaatgtgtaggttcgttttttattttttttttatgaaggtgtacgaattggttttattttttggggttgaattttgtataaattcggttgaggaggtttgttagttttttttttaatagtaaggtgtttgattaatgtgagagaaaaaaattaatgttggttatttttagttataatattaaaattttttttgtatattttattttgagttatttttatatttaatttgaaaggttattgtaggagataaattattatattttaagttattgtaaattaatagtttaggtagaaatttatttagttagattttttagatattttaggaattttttttttttatttgtattttatttttgtgaaaaataaatcgtttattaaaagtttttatgtatttttattaaaagtttattttttattattttagaaaatagattacgaaattagagattttttatgaatttgtgatttgttaaaatgttttttttattcgaagtatcgtggggaaaattaatttaatttgttaaatttgtatatatattttgaagttttttttatattaatggtaaatttatatttttgttttaatatttgtagagttaatataattatacgttagttttttatagtttttatgtagtaagaaattttaattttgatgatttgagtaaggatttttttagaaagttataatttttattgcgagaagtattataattattgataatatattttatttgatattataaatgataaaatataattttttgatttttattaaattgaatattgtttaaatttaaggaatatttagtatttaatatcgaagttgtatgtgattttaagaagtttgtatttagtatttttttttattttattttattttatttatttattttgagacggagttttattttgttatttagattgtagtgtattggcgtagtttcggtttattgtaatttttattttttagtttaagcgatttttttgttttagttttttaagtaattaggattataggtatgtgttattacgtttagttaattgttgtatttttagtagagacgaggttttattatgttggttaggttggtttggaatttttgattttaagtgatttattcgtttcggttttttaaagtgttaggaatataggcgtgagatagcgcgttaggtttttttttttgttaaatgatataagttagaatagttatttaggtattggttgagatagtttattagttattaagtaaatttattgtaaaaaaaaaattgtgtttatttgtagtgtttttatttgagggatttattttttattaagtgtaatagaaaatttttttttttatgaagttatattttgatggggaatatagataaatgagtaaaatatatgttagatagtagtaaatgttaatagaaaaatgaaattagaagggaaaatggtaaaatagtaagtgtattagtgtgataatattaaggaatatgaaaattggtttatattggttttagttaattggtaaatttaattgaaaatagatatattattgaaaagttagatgtttagtgatttttttttttgtgataaaatatatataaaatttattattgtatttattttgaagtgtgtagattagtagtgttatatatatttatttattttgttgtatagttaatttttagatttttattttgtaaaattgaaattttatatttattaaataattgtttatttttttttttttttagtttttggtaattattaattaattttttatttttatgaatttgattattttagatattttatataaatagaattatttagtatttgtttttttgtgaagttttggttttttatttttttttcggtttttttgtcgtttttcggttgtttttttttttttttgcgtttttttttgtttttttttttgtagtttttttatttcgtggtttatttttcgttggcgcgattttcgtttgttttttttttttttggttgtcgcgttggttggttttttgttttttggttttttgttcggtttgttttattacgtgggatttttttttttttttattttcgtaatttttttttttagttcggtttcgttggtttggttttgtcgttttcgttttttgggcggttgtgttgggtggggtttttggttttgggggttggtggtcgtttcgagttcggttttttttttggttttttcgttttgggtgttttcgtttatttttgtttttttcgggttttagtgtttagtcgcgtttagttttgattatgtatggcggttcgattgcgtaagttttttttatttattgtgtatagttaaaataatttttataaagtgaatatatttatttaattaggatttagattaagaaaggattacgtttttatgttttttttaattacggcgtttttttttagttttatttcgttaagggtaattaattattgttttgttttttaatattaatagtatagatgagttttcgtttgattttatattatatataaatgaaatatagtgagttttttatttttataaaaaaattaaataaataataatagttgagtatggtggtgtgtgtttgtagttttagttatttaggagtgtgaggtaggagaattttagaagttttaggttgtagtgagttatgatggtgttattgtacgttagagt

SEQ ID NO: 249 - DNA, 10872 bp, Artificial Sequence
  chemically treated genomic DNA (Homo sapiens)
cgtggttatttatatatttatttttatggtttgtattagtttttggtttaagttttttggtattagttttaagattgaatattttatttttattttgggtaagtgtttcgattttttatggattattagggttttattcgaggtattcggggagaattagaagggtttagtagttatcgaacgggttgcggttattatagtggttatggtagggatcgggtcggggaaggtaggggagggtgagaaggagaaagtgttggcggaatcggagaaggtggtgatcgagtttttagttgttattttgttggataagaaggagggtgagtaagttaaagttttgtttgagaaggtgaagaagtttcgtatgtacgtggaagagggcgatattttgtatattatgtatattcgatagacggtgttgaaagtgtgtaagtttttggttattttggtttataatttggtttatgtggagaagattagttttttggtggtttgtagggtggagacgttagaggttacgggttacgttagtttttgttgtaattatattaaggtttattttttttttaagttggttttttgttatattttttttgtgtgtatttacggatttatttgtatttatacgttttattggtttttttatcggttttttaaggagtatttttttcgtttcgtgcgggaggagattggtatgggggatatttttgacgttaagaatgatttcgtttttatgttgtattttatcgattagtacgattttttttattttaagcgtttcgtcgtttttttgttcgaggttagcgaaagtcgtttaaagtagtttaattttaattacgagtggacgttcgagaagtttcgatagaagttgtagcgtaatgtcgcgggtcggttggagttggttttttgtatgttgtcgggtttgttcgatatcgtttttgagtttagtgaggtggagttatttaggttggaggttatttgcgatattatttttttttcggggttgttatagttggtgtatttgtaggagtttagtttgttttattcgttcgttaggttatttttttttttgtaggtttttttgcgggattatttgaaggtgatgcgcgttaaatgcgaggagtttcgcgaggtgtcgttttgggtgtttgggttgcggggtttggaggagttgtatttggaggggttttttttttaggagttagttcgggtagttattttggagagttttcgggagttgaagtagtttaaggtgttgttttttcggagtaacgtcgggaaggtgttagttagtgtgatcgacgttgttggttatttgtagaggtttagtttgtataacgatggggttcgtttggttgttttgaatagttttaagaagttggcggtattgcgggagttggagttggtggtttgcgggttggagcgtattttttatgtagtgtttagtttgggtgcgttgtaggaatttgattttaaggataattatttgcgttttatcgaggaaatttttagtttttagtattgtcggaagttggttacgtttaggttgtggtataattagatcgtttacgtttttgagtacgtgcggaagtttaggagtttggagtagttttattttagttataataagttggagattttgtttttttagttcggtttgtgtttaggttttcgtttgttggatgtgttttataatgggttatattttttgttattcgaggtgggttttttgtagaatttatagtatttggtttttttttataatgttttggaggttttgttcgaagagttttttttttgtcgtaagttgcggacgttgtttttgggcgataattagttgagttagttttcgttttacgtgggtgtttttagagtttttagtcgtttggagtttaaaggtaatcgtttagaggcgttgttagaagaatttggtaattgtggggggtttaagaaggcggggtttttggtggaagatacgttttattagggtttgtcggtagaagtgcgggataagatggaggaggaatgaagttggggtggggtcgttttaggtagagttttaaaaatgtttttgttttggaattttaattattgttttttaagataggaagttaagtgggtttaggttaggagatggggggggcgggggtagttgtgttatttttttggggtttaggaggatttgggttggtttgtttggggagatagataggatgttgtggagttggggtggaatttggtatggagggattaatttagttatggtatttttcgattaaaattatatttgtgtttttggtaggttggttggttttgtttttatttttagaattgttgtttttttttggatattttagtttaattagtgttatatatgggggaaacgatatattttagtgggatttttaatattttttttttttatgtaataaagtaatttatttttggagtttttttttaaggagaggatatagatatagttgtttgttgtgttatatgttagtttcgaataatggtttttatttggttaagtattaaaattatttagggagtcggtgtaaaataaaatattttagtttttttttttgaaatattgatttaggaggtttggttgggggttaggagtttgtttttaaatattttaggtagttttggtgtaggtaagtggttttgagatagtatgttgggaaatgttgacgtaaaggtattagggtcgggcgttgtggtttatgattataattttagttgtttgagaggttaatgtaggaggatggttgagtttaggagttcgagattagtttgggtaatatagcgagattttatttttgttaaaaaaaaaaaaaatagggtatttaaatatttagattttgattttttttgaggttttagattttttgagaaattgatgaagttaggtatttttttttttaggaaaatgttggtgtataaatatatataaagttttttaggtagttgatagattttttttagagagttatttaaggattttttaaggtgggtggattgtagggttaggatatttgttatagaggtgatatttttttaaggataagtagggattttggttttgattgttttttgggtgtttaataaataatattaattatgtaagttttagttttgattttttatgtgtatttttgttattgtttaatatcgtttattagggttagatatagtggtttatgtttgtaattttagcgttttgggaggtttaggtgggaggatcgtttgagtttaagagtttgagattaaattgggtaatatagtgagattttatttttataaaaatatataaaaaaaagttggttaggtgtgttgatgtgtgtttgaggttttagttattaggtaagtagaggtaggaggattgtttgagtttaggatttaggaggttgaggttgtagtgagttgtgattatattattttattttagtttgagtaatagaataagattttgttttttttttttttttttttttttgagacggagtttggttttgttatttaggttggagtgtagtggcgtaattttggtttattgtaattttcgttttttgggtttaagtaattttttgttttagttttttaagtagttggaattataggcgtttgttattatgttcggttaattttcgtatttttagtagatacggggttttattattttggttaggttggtttttttttgatttcgtgatttattcgtttcggttttttaaagtgttgggattataggcgtgaattattatgttcgtaattttttattttatgtgattaagtaatattcgtgtgttagaattaaggatgagttttatgtttttagagtagaggtatagaaggttgtttggaagacggaaaggtaaagattttagttataattttatatttgtgtgtgttttatttataaatcgttattagaggagtttcgataagtcggtaatttttattttaaagtgttttttcgttggattagaagttggaagggtatttggtagagtttgtttggttttggttatttttcgggtgttcgtaaaattagaatttttttttcgtatttaagagtagagggaagtcgtttttggggggatttttgggttttagatgggatatttttttagtattcgtcggattatttaaaggagtggtttaggttgtcgggggtttaagtattggtatttaattttagcgtttttttttagataggaattttttacgtttaggcgttgggtttacgtttcgggtgcgagagagataaggggggtgttttgaggttttatgtgggtttggttaataattttggttttgattttggtttcgtcgtcgagggtaggggttatatcgttgggtttttatggtcgtttttttttttttggtttcggttaattttgagtttgttggggttggtaagaagggaaagggttttcgacggagtttaattacggtgaggaggcggtatttcgttgttagtaggaggttaggaggtaattaagtataagaggaattttaataaagtattattagtgaggaaggtatttcgaagggacgtttaagtcgatcgtgaaaagcgaggaggttgaggttgtatcgtcgtggagattagggatcgattgtcgttttgggaacgaggttttaggaatgcgtatgcgtaaaagttacgcgggcgaatacggtttcgtttcgttaagtatgcgcgtcgtttttttcgtttatcgtttttagaagaatggtgttttttcgtagcgttttttttaggagcgatcgggaattggcgtatgcgtattacggtggtggtggcgacgaaggcgggggttgtacgttgtttgtttcgagttttaggtggcgttatttttcgggttgagtcgaagtacgtacgcgcggaggttcgtacgcggagaagggcgggtgcgcgtcgcgggtatgcgcggtgcggggcgagacggcggttcgacggggttattcgggcgtaggcgtagtgcggtgtttgtttgtcggattgacgggcggtcgggcggtgcgcggcggcggtggcggcggggaagatggcggcgttttttttggaatagaagttgtttcgtttggaagtaaagttgaagtaggagaatcgggaggttcggcggaggatcgattttaatttggatattagtttttagcggtttaggtttagtaagtacggcggcgtgggggagggggcgggcgggcggggcggggcgcgcgtcgggaggtttcgtttttattataaggtttcgttttcgttttcggggcgttcgttttttttttcgtttttttcgttgcgggttcgcggggcgagggttacggtgattcggggggcgtggagtcggcgagtttcggggggttcgtatttttagggtttgggagtttagttttcggatttaggcgaggtttttagttgatgattcgtttttatcgtcgtgattttttgggtcgggttttttcgattttacgcgatagtgattatatttaggtcgtttcgaaaatatagatacgtttttgttgatttgatgttattattttcgttattttagggattgtttggcgtttttttttttcggtttgggggtttgttagtttcgtgtagcgacgatttacgtatacgcgtacgtttggttcggggatatttgaggttatttgattatatagagtttttttttattttttttgattcgaggattttttttttcgttttttttgtgatcgtgtttgaggtggggggacgggagggggtttttttttttttttttggcgatagtgattatggtattgggtttagtagatttttttttatatatattaggtttcgtaaatttttgtgattagttttattgttattattttggtgagcgtgtggtgtttgatttttagaaatgtatatcgatttttagttagttcggtgattttgttatttgtgtttaagtgatggttttttttttttttatatttatatttatttgatttggggatatttggggttagtgtgattttaggtttgttttcgtcgcgttttagtatatatttatttgttttttgattagttttattatttcggtatttatttttttgatattttgttattttagattagtatttttcgttttatatatatttggtttgggaatattgattatatttagtttttcggttttttttttaagattttggtttttaaattttttgggttggaggaaattagatttttaaattttgtgaatattatttttgatttatgattttttttgtgttttttttgatttagtaaaatttttttttgttttttttgatgtgattttcgtagtttatttagttttttttatggagttattatggtaggcgagaaaggtattttcgtatttgggtattttatttattttttggttatttagtttgatttttatagtttgatatttttttgttttttttttttttgatttgagttagcgtgggtttttttttggggagttttttgggggtttagagaaattatggaggtggggattttggtgtaggatattgtttgagataagaagtttagttaagatacgggtttttgttagtttttgggggtcgttttttttggtttttgagtggatgagatagggttgagtttaggatttcgggtgtttttaggggtggtcgtttttatgtagagttaggaggtcggtggtaggtaggttttcgaggagttttttttaggcgtttttgtttgtgttaattttattttatttttttcgttttttttatttttgtcggtttttagttatttttgtagttcggtgtttttttttttttttcgtttatgatttgatttttttttttttggacgaattagtcgtttttgttgtgatttatcgtggtgttgttttttttttttttttttttatttagttattgtgattattttaagttttgtttttgtttcgttttaacgagtaggtattagtttttttattatcgttgtttggatatttgtattattgatttaatcgttgtttcggtcgtagaatggcgttttttagtttttatgttttgtgtgtgtttttatgttttttttttttatttttatttttttttttattttatttaagtagcggttagtttagtttagttttttttgcgtttttttttttttttttttttttttatttttagttttattttggattttttggaggaggaggtgggtttttttattgaatgggagtttgtggttttcgggggtggggggggtgtacgtttgtgtgtgtgtaattgagagaacgagaaagttgggtttggtgggtgggtggtttgtgtttatggattttttttaataattaggtgaatatatagtatttttcgggttttatattagttttgggcgttagggatatagtagtgaatagaatagatggagttttttttttttgtagcggggggttgtaataggggggtttattggataaggagtatatttttattagagagaatattttagttgggtgagcggttttgtagggggttagtttgggggaatttttggagacggtgggaattgaataaagtttttggggaggttaggtacggtggtttatatttgtgattttaatattcggggaggttgaggttatagggagttatgattatattattgtattttagtttgggtgatagcgagattttgttttaaaaatttaaaaattgggttaggcgtagtggtttatgtttgtaattttagtattttgggaggttaaggagggtggattatttgaggttaggagttcgagattagtttggttaatatggtgaaattttgtttgtattaaaaatattagagattaggttaggtatagtgatttatatttgtaattttagtattttgggagatcgaggcgggtggtttatttgaggtcgggagttcgagattattttgattaatatagagaaatttcgtttttattaaaaatataaaattagtcgggtatggtggtatatatttgtaattttagttattcgggaggttgtaattttagttattcgggaggttgaggtaggagaatcgtttgaattcgggaggcggagattgtagtgagttgagatcgtattattgtattttagtttgggtaataagagtaaaattttattttaaaaaaaaaaaaaatataaaagattaggtggaggttgtagtgagttgagatcgcgttattgtattttagtttgggtaatagagtaagatttcgttttaaaaaaaaaaaaaatttaaaaagcgttttgaaggagttggggggggagagaagatagggtcgttagggttttgagcgtagcgttagtttgtgtggggtatgtaggttgtgttttacgtttgtgttgggagagagagtagatggggtgtttggttttgtgagtggttgtgagtatgtgtgttcgagggtaagggggattttgtttcggttgtatgggtgttaggtttacggtatgtttcgggtgtgtgttgtgcgtgcgtgtatttgtacggtatgtgcgtgtatgttgatatggtagtcggtgtatttgtggtttttgtcggtagatacgtgttttttagtttttcgtttttttttattcgtttttttttttatttttatttttttgtttttattttatttttttgagttgttatgtggttattattatttttgtggtttttgtttttagggtttttgtgtattttttttttttagtgtttatttgaatttttttttttatttttttatgttttagtttgtggttcggtagttttttttttaggtttcggggttattttcggaaggtttggtgggttttgttagggaaggggtttataggatttttcgagggttgtggtcgttaatcgttgagtgtagggtgtgagcgggattcggatattttttgagggcgggaattaggtagtgttttaagagatgttaggtgtataggggttgggggttgggttggggggagtataggttttcgggagttagaaggggattggggttgtggtttaggttatggatagagtagaggcgtagggatttgaagaagtagagggagaagtttggttaatatagcgagattttatttttatttaaaagataaaaattagttgggtgtggtggcgtgtatttataattttagttatttaggaggttgaggtaggagaattatttgaatttgggagggggatgttgtagtgagttgagattacgttattgtattttagtttgggtgatagagcgagaatttattttaaaaaaaaaaaaaaatagtgggaggtgacgtggtgttgtagaggcggtagtggttaggatagcgggaggggtacgggaggtgaggtttttaggttagttatgaacgttgggtttggttgtgttttaaggtttttagagttttttttttgtttttgtttggttttttaggaggggagttagggggtatagtttttgtaggggttggtaggattagataggggtaatgttgggttttttgtattgggattgaggcgtttttttgttttttttattggttgagattagggttttgggtatacgggagggacggggtttagttgttagtatggagcgggtttgtttgtttatattagtttttgggtattagttattaggagtttgtagaattgtggggagaaaaggtggacgaggtaggaggaaaagaggggagaggggtttgttggttgagggttttggagagcggtaggttttagtttttgtgggaggggtattttggtaggtgtgtgtagtcgttgttagggtttttaggatgtgacgtgttaggattggtttttttggaggttacgttagtatttcggtttttgtttttgtattttgttgttagtttagttagggagattttagttttttcgggaagttgtttttttgttttaggtttttttttggtttgtttttgtagcgttttttttgggtatttgggttttagttttggtttttgtttgtttgtttgttttttgtttttttatttttaatgtcgtttgtttattttagggtgtttgttgtttgttcgtcgtttgtttattcgttgtagtatgttcgagttgttcgtatgtaggttgttggatgagttaattttcgtttggtttagtattggttttatttggtttcgttagtttttgtaggagttgtgttttcgagttttattttttagaggatgtaggttttattgaggttttgtatttgtttttatgggttttagttttgtaggttaggttaggaggtttttatgttagtttattggttcgaggggggttttttttgatttcggaatagaagatagggtaaggtagtttgaagtttgggtttcgtgttcgttgtttttttagcgtggttttgttcgtttttgtttgggagttaattttagtgttattagtagagttatagtttgggttagttttggtaggtatttcgttttggtttatttattttgtgggtgttgtggttttgggtttgttttttgggtagaagtgggaggaagtgtatatatttgttagggaggttttttggtcgagggatattttaggtttttatttcgttttttcgttagcgtagatttggggtttttttttttttgttagttttttttatttttttttaggttaggggatgagataagggattttgagaatagtttggggtgggagggagattttagtttttttagtttagtagggtagggggttgtgttagtttagttcgggaaatttaggaggggaaggtgagggtttcgatttttttttggagtgttagatgtggagttgatattagttgggcgttgatttttttttttgttattggtttttatttttttagt

SEQ ID NO: 250 - DNA, 10872 bp, Artificial Sequence
  chemically treated genomic DNA (Homo sapiens)
gttaggggggtgagaattagtggtagggaggggggttagcgtttagttggtgttagttttatatttggtattttagggaggggtcgggatttttattttttttttttgggtttttcgagttaggttggtatagttttttgttttgttgggttggaggagttggggttttttttttattttagattgtttttagggttttttgttttattttttgatttggaaagagatggaggaggttagtaggggagagggagttttaagtttacgttgacggagaaacgagatggggatttgaggtgtttttcggttagggggtttttttgataggtgtgtgtatttttttttatttttgtttaggaagtaggtttagggttatagtatttataggatggataggttagggcggagtgtttgttagggttggtttaggttgtggttttgttggtagtattgaagttggtttttagataagagcgagtagggttacgttggggaggtagcgggtacgagatttaggttttaggttgttttgttttattttttgtttcggggttagggagggtttttttcgggttagtgggttgatatgagggttttttggtttggtttgtagagttggggtttatgggggtaggtataggattttagtggggtttgtattttttgggaggtagagttcgggggtatagtttttgtaggggttggcgggattaggtggggttaatgttgggttaggcgggggttggtttatttagtagtttgtatgcgggtagttcgggtatgttatagcgggtgggtaggcggcgggtaggtagtaggtattttggggtgggtaggcggtattaggggtgggagggtaggagatagatagatagataggaattaagattagggtttaggtgtttagaggaggcgttgtagagataggttagagaggggtttgggataggagggtagtttttcggaggagttagggtttttttggttgggttggtaatagggtgtaggaatagaggtcgggatgttaacgtggtttttagaggagttaattttgatacgttatattttagaggttttgataacggttatatatatttattaaggtgttttttttataggagttggggtttgtcgttttttaaagtttttagttaataagtttttttttttttttttttttttgtttcgtttattttttttttttatagttttgtaggtttttggtgattggtgtttagggattaatatgaatagataaattcgttttatgttggtagttaaatttcgtttttttcgtgtgtttaggattttgattttagttagtaggaggggtaggaagacgttttagttttaatgtaggaggtttagtattgtttttatttggttttgttagtttttgtaggagttgtgttttttagttttttttttggaggattaggtaggagtaggggaagggttttggggattttgggatatagttaggtttagcgtttatgattggtttagaggttttatttttcgtgtttttttcgttgttttggttattgtcgtttttgtagtattacgttattttttattgtttttttttttttttgagataggttttcgttttgttatttaggttggagtgtagtggcgtgattttaatttattgtaatattttttttttaggtttaagtgatttttttgttttagttttttgagtagttgggattataggtatacgttattatatttagttaatttttgttttttgagtagagatggggtttcgttatgttggttaggtttttttttttgtttttttaggtttttgcgtttttgttttgtttatggtttgagttatagttttagtttttttttggttttcgagggtttgtgttttttttaatttagtttttaatttttgtgtatttggtattttttgagatattgtttagttttcgtttttagagagtattcgagtttcgtttatattttgtatttagcggttgacgattatagttttcgaggagttttgtgggttttttttttgatagagtttattaggtttttcgagggtggtttcggagtttggggaggaggttgtcggattatagattggagtatggggggatggaagggagggtttaggtaggtattgggggaaggaggtatataaaggttttgagaatagaggttatagaggtggtgatggttatatggtagtttaggagggtggagtgagagtaagagggtgaggatgagaaagagaacggatgagagagagcgagaggttggagggtacgtgtttgtcgataggagttataggtgtatcggttgttatgttaatatgtacgtatatgtcgtgtaagtgtacgtacgtataatatatattcggggtatgtcgtggatttaatatttatgtagtcgggatagagttttttttgttttcggatatatatatttataattatttatagggttaggtattttatttatttttttttttaatataggcgtggggtatagtttgtatgttttatataggttggcgttgcgtttagagttttggcggttttgttttttttttttttttaatttttttaagacgttttttaaattttttttttttttgagacggagttttgttttgttgtttaggttggaatgtagtggcgcgattttagtttattgtaatttttatttaattttttatgttttttttttttttgagatggagttttgtttttgttgtttaggttgaagtgtaatggtgcgattttagtttattgtaattttcgtttttcgggtttaagcggtttttttgttttagtttttcgagtagttaggattatagtttttcgagtagttgggattataggtatgtgttattatgttcggttaattttgtatttttagtggagacggggtttttttatgttggttagggtggtttcgaattttcgattttaggtgagttattcgtttcggttttttaaagtgttggaattataggtgtgagttattgtgtttggtttaatttttagtatttttaatgtagatagggttttattatgttggttaggttggtttcgaatttttgattttaagtgatttattttttttggttttttaaagtattgaaattataggtatgagttattgcgtttggtttagtttttaaatttttgagataggatttcgttgttatttaggttggggtgtagtggtgtgattatggttttttgtagttttaattttttcgagtgttgggattataggtgtgagttatcgtgtttggtttttttagaggttttgtttaatttttatcgtttttagaggtttttttaggttggttttttgtagggtcgtttatttagttagaatgttttttttggtgggaatgtgttttttgtttagtgggtttttttattgtagtttttcgttatagaggagaggggttttatttgttttatttattgttgtgtttttggcgtttagggttggtatggaattcggggggtgttatgtgtttatttagttgttgagagagatttataggtataggttatttatttattaggtttaattttttcgtttttttagttatatatatataggcgtgtattttttttattttcggaggttatagatttttatttagtgggggagtttatttttttttttagggagtttaaagtggagttgggagtaagggagggggaggaggagggaggacgtagaggaggttgggttgggttgatcgttgtttgagtggagtgagagagaaagtgagagtgaggggaagggatatggggatatatatagagtatgggggttgggggacgttattttgcggtcggggtagcggttaggttaatggtgtagatgtttaagtagcgatgataaaaaggttggtatttgttcgttgggacggggtaggagtagggtttagagtgattataataattggatggggaaaaggaagaaaaaaataatattacgataaattataatagaaacgattgattcgtttaaaagaaaagaaattaaattataaacgaggaggagggggaggtatcgaattgtagagatggttaggaatcgatagagatggggagggcggggaggatgggatggagttgatatagatagagacgtttggaggggatttttcgggggtttgtttgttatcggttttttagttttgtatgggaacggttatttttgaaggtattcgggattttggatttaattttgttttatttatttaggggttagggagggcggtttttaggggttagtagggattcgtgttttggttgggttttttgttttaggtagtgttttgtattagaatttttatttttatgatttttttggatttttaagagattttttaaggaggaatttacgttgatttaggttaggagagggagggataggagggtgttaggttgtgaaggttaggttgggtgattagggaatgggtggggtgtttagatacgggggtatttttttcgtttgttataatgattttatagagagaattaaataaattacgaaggttatattagaggagataagagagaattttattgggttaagaaagatataaaaaggattatgggttaggggtggtgtttatagggtttgaaaatttaattttttttagtttagaggatttagagattaggattttggggaaaaagtcgggagattagatatggttagtgtttttaggttaggtgtgtgtgaagcgagaggtattgatttaggatgataaggtgttagggaggtaggtatcgaggtggtgggattgattagaaagtaggtggatgtatgttggggcgcggcgggagtaggtttagagttatattggttttaggtgtttttaggttaggtgggtgtgggtgtgaagggaaggggagttattatttgaatataggtgataaagttatcgggttggttgggggtcgatgtgtatttttggaggttagatattatacgtttattaagatggtggtagtgaaattggttatagggatttgcggggtttggtgtatgtgggagggggtttgttgagtttaatgttatggttattgtcgttaagagggggagaagggattttttttcgtttttttattttagatacggttatagggagagcgagagggagaattttcgggttagaagagatggggaggggttttatgtggttaagtaattttaggtgttttcgagttaggcgtgcgcgtgtgcgtagatcgtcgttgtacggggttgataagtttttaggtcgggggaggggggcgttagatagtttttgagatgacgagagtggtagtattaggttaatagggacgtgtttgtgttttcggggcgatttggatgtggttattgtcgcgtggagtcggggaagttcgatttagaggattacggcgatgggggcgggttattagttgggggtttcgtttgggttcgggaattgggtttttaagttttgagggtgcgaatttttcggagttcgtcggttttacgtttttcgggttatcgtgattttcgtttcgcgagttcgtagcggggggggcggagaggagagcgagcgtttcggaagcgggggcggggttttgtggtgggggcggggtttttcggcgcgcgtttcgtttcgttcgttcgtttttttttttacgtcgtcgtgtttattgggtttgggtcgttgggggttgatatttaggttgaggtcgatttttcgtcgggtttttcggtttttttgttttagttttgtttttaggcgggatagtttttgttttagggaggacgtcgttatttttttcgtcgttatcgtcgtcgcgtatcgttcggtcgttcgttagttcggtagataaatatcgtattgcgtttgcgttcggatgatttcgtcgagtcgtcgtttcgtttcgtatcgcgtatgttcgcggcgcgtattcgttttttttcgcgtgcgaattttcgcgcgtgcgtgtttcggtttagttcgaaggatgacgttatttagagttcgaggtaggtaacgtgtaattttcgttttcgtcgttattattatcgtagtgcgtatgcgttaattttcgatcgtttttgagagaggcgttgcgaggaaatattatttttttgaggacggtgggcggggaaaacggcgcgtatgtttagcgaggcgaagtcgtgttcgttcgcgtggtttttgcgtatgcgtatttttggaatttcgtttttaaagcggtagtcgatttttggtttttacggcggtgtagttttagttttttcgttttttacggtcggtttgggcgttttttcggaatgttttttttattgatggtgttttattaggattttttttgtgtttaattattttttagttttttgttggtagcggggtgtcgtttttttatcgtaattaggtttcgtcgagagttttttttttttttgttagttttagtaggtttagagttggtcgaagttaggggggaggggacggttatgggaatttagcggtgtgatttttgttttcggcgacggggttaaggttaaggttagagttgttggttagatttatatagaattttaagatattttttttatttttttcgtattcggaacgtgagtttagcgtttggacgtggagaatttttatttgaggaggggcgttggggttaggtgttagtgtttgggttttcggtagtttaaattatttttttaagtggttcgacgggtgttggggaaatgttttatttggaatttagggatttttttaagagcggtttttttttgtttttagatgcgagaaggaagttttgattttgcggatattcgggaggtggttagggttaggtagattttgttaagtgtttttttagtttttggtttaacgagggaatattttgggatgagagttatcggtttgtcggaatttttttggtgacgatttgtgggtggagtatatataagtgtagagttatagttgaggtttttattttttcgttttttaggtagttttttgtgtttttgttttgagaatatgagatttatttttgattttggtatacgggtgttatttggttatatgaaataaaaggttacgggtatggtggtttacgtttgtaattttagtattttgggaggtcgaggcggatggattacgaagttaggagaggattagtttggttaagatggtgaaatttcgtgtttattagaaatacgaaaattagtcgggtatggtggtaggcgtttgtaattttagttatttgggaggttgaggtagagaattgtttgaatttaggaggcggaggttgtagtgagttaagattgcgttattgtattttagtttgggtgatagagttagatttcgttttaaaaaaaaaaaaaagaaagaaaaatagggttttgttttgttgtttaggttggagtggagtggtgtgattatagtttattgtagttttaattttttgggttttgggtttaagtaatttttttgtttttgtttgtttagtagttgggattttaggtatatattagtatatttggttaatttttttttgtatgtttttgtagagatgagattttattatgttgtttagtttggttttaagtttttgagtttaagcgatttttttatttgagttttttaaagcgttgggattataagtatgagttattatgtttggttttaatggacggtgttagataatgataggagtgtatataagagattaaaattagaatttgtataattagtattatttattaagtatttagagaatagttaagattaaagtttttgtttgtttttggaaaaatgttatttttatagtaggtgttttaattttgtagtttatttattttaggaagtttttgaatagttttttgggggaaatttattagttgtttgaagagttttgtgtgtatttgtatattagtatttttttgaggaaggaggtgtttggttttattagttttttaaagggtttaggattttaaaagggattagaatttagatatttggatattttattttttttttttttggtagaggtggggtttcgttatgttatttaggttgatttcgaatttttgagtttaattatttttttgtattggttttttaaatagttgggattatagttatgagttatagcgttcggttttgatatttttacgttagtattttttaatatattgttttagggttatttatttgtattagaattatttggaatatttaggaatagatttttggtttttaattaaattttttgagttagtgttttaggggaggggattgggatattttgttttgtatcgattttttaggtgattttgatgtttagttaaatgagaattattgttcggagttaatatataatatagtaaataattgtgtttgtgttttttttttgggagagaattttagaagtaagttgttttgttgtatggggagggggagtgttggaaattttattgggatgtgtcgttttttttatatgtggtattaattgagttggaatatttagggagaggtagtagttttagggatgggagtaaggttagttagtttgttagagatataggtgtggttttggtcggagaatgttatgattgagttaatttttttatattaggttttattttagttttataatattttgtttgtttttttagataaattagtttagatttttttgggttttagaaagatgatatagttgttttcgttttttttattttttggtttggatttatttggttttttattttggaagataatggttgagattttagggtagaagtatttttaaggttttatttaaaacggttttattttagttttattttttttttattttgtttcgtatttttgtcggtagattttggtaaagcgtgttttttattaggagtttcgtttttttgagttttttatagttgttaagtttttttggtagcgtttttaagcggttgtttttgagttttaggcggttgagggttttgagggtatttacgtggggcgagagttggtttagttggttgtcgtttagaagtaacgttcgtagtttgcggtagaagaagagtttttcgggtagggtttttagggtattgtaggagagggttaggtgttgtaggttttgtaggaggtttatttcgggtggtagggagtgtagtttattgtgggatatatttagtagacggaggtttgagtataggtcgagttgggagggtagggtttttagtttgttgtagttgaggtagagttgttttaggtttttgagttttcgtacgtgtttagggacgtaggcgatttggttgtgttatagtttgagcgtgattagttttcggtagtgttggaagttgaggattttttcgatggagcgtaggtggttgtttttgaggttaagtttttgtagcgtatttaggttgaatattgtatgggggatgcgttttagttcgtaggttattagttttagttttcgtaatgtcgttagttttttgaggttgtttagggtaattagacgggttttatcgttgtgtaggttgagtttttgtaggtggttagtaacgtcggttatattggttggtattttttcggcgttgtttcggagggataatattttgagttgttttagttttcggaggttttttagggtggttgttcgagttagtttttgggggaaaagtttttttaggtgtagtttttttaagtttcgtagtttaaatatttaaagcggtatttcgcggagtttttcgtatttgacgcgtattatttttaggtggtttcgtaggaagatttgtaaggagaagggtagtttggcgggcgagtggagtaagttgagtttttgtaagtgtattagttgtgatagtttcggggggaaggtgatatcgtagatggtttttagtttgagtgattttattttattgagtttaaagacggtgtcgggtagattcggtagtatgtagagggttagttttagtcggttcgcggtattgcgttgtagtttttgtcgaagtttttcgggcgtttattcgtggttgagattgagttgttttagacggttttcgttgatttcggataggaagacggcgaagcgtttggagtagagggagtcgtattgatcgatgaggtgtagtatgaaggcgaagttatttttgacgttaggaatgttttttatgttagttttttttcgtacggaacggaaggagtattttttgaggggtcggtggaagagttagtagagcgtgtagatgtaggtaagttcgtagatgtatataaaggagatgtaatagaaggttagtttggagaagaggtgggttttggtgtggttgtagtagaagttggcgtagttcgtgatttttgacgtttttattttataggttattaggaaattgattttttttatatagattaggttgtagattaggatggttaggaatttatatatttttagtatcgtttgtcggatgtatatggtgtataggatgtcgtttttttttacgtgtatgcggaatttttttatttttttaaatagggttttggtttgtttatttttttttttgtttaatagggtgataattggaggttcggttattatttttttcggtttcgttagtatttttttttttttatttttttttgtttttttcggttcggtttttgttatggttattatggtggtcgtagttcgttcggtggttgttgggtttttttggtttttttcggatatttcggatagggttttggtggtttatggagagtcgaaatatttgtttaggatggagatgaagtgtttaattttggagttggtgttagggaatttgaattagaaattggtgtagattatgaagatgagtgtgtgaatgattacg

SEQ ID NO: 251 - DNA, 7110 bp, Artificial Sequence
  chemically treated genomic DNA (Homo sapiens)
tgttttttgtgatgttttagaggttagaaggatgttttgaaggggaaaattgtaggagttaggtagagtagggttttggtttttttttaatgtttttttatttagataaattcgggttattttgtagaggttgtagtgagttatgattacgttattgtattttagtttgaggaatagagggagatttcgttttaaaaaaaaaaaaaaaaaaaaaaaaaaaaaaaaaaaaaatttcggtttattttatgaagtatttggtaggtgttttaatattttttggtatatgggaattatttttttttattattggaaggtttaaaaagtaaataatgtgttttatatggttagagttagtattaaggggattaagtagaataattggtagttagtgttagtttggagattaatatagttaaagttgttttgttatgttatgttttttttatttgtattgttttacggtttaagataaaatttttgaacgttatttggatatagtgagtatttggtttgttttattgtttttaggagtaattaatttaatttttatttttttgagaatgatgattttatatagtatatttttttattaagatgtgaaagatgatattatggtatttgaaatagttttaggagagatttgggatatgggaagtttgtagataataatggaaaatttttttttagaatatagttatttgtatgatttatagtagcgttttttggagaatgttttaaaattatttttattgaaagaataataatgtttgttattaggataaatgaaataaggggaaaattttagatttttggaataatgggtttatatttaatttaatgattattatgtttttatattttgtattatttagaaaatagtagttaaatagatagaaatatagaagattgtttaaaaattaaagttattgagttagatttttttttgaaaggttagcgtatgggagatgagaaaggtattatagagattagagtgtttatataaaagatattttagtagatgatttataaagagtatattaagtatttatattatttatattaagttgttggttatttcgtttattaaagaaaataagaaagaaattttttttcgatattattttggtgtagtaataatagagttttggaattagttgttagaagcgataattaaagttagtttattatgtttattaattaatttatatagttattttgaagttttatataattgtttttttgttataagtttttatttttttttatggtattttggttttgaatttagataggtaaagaattaagtatggtcgggcgcggtggtttacgtttgtaattttagtattttgggaggtcgtggcgggtagattacgaggttaggagatcgagattattttgattaatatggtgaaattttgtttttattaaattataaaaaattagttcggtatgatggtgtgcgtttgtagttttagttattcgggaggttgaggtaggggaattgtttgaatttgggaggtagaggttgtagtgaatcgagattatgttattgtattttagtttgtgagatttcgttttaaaaaaaaaaaaaaaaaaagaaaaaaaaaaaaagaattgaagtgtttggagattagtgtattgtaatatttatatagttaagtaggtatttttaattgaattttaaaaaagtattatttttgaaattttttttagtttagatagggttagttatttgggtagaaaggaaaagaaaaataaaaaattggaaaaggatgtattagtattttttttagaaataatttaatattaggaatagaaggaggattttatttattaatttttaataattatttgatgttgttgttgggttggttaaatatttgttaatattgatgatttttttatttattattagagagaagtagagggatttgatgtttagagaagtagtaaaatttattttttattttttttttttagtcggatggaagtatttggaggttggttttatattttagtattttagtgttggtgatgtagattatttttgttttagagtaattttgtgttatggaatttaagaggattttgtcgtattaggataggaatgtatttttgttttatttgtttttatgaaagtagattttagagatttttagatgttatgagattaattgttatttagggtaggttttaggggagggatagagaagggtagtgttaataatagggattttggagataagattagtaatttaagaaataaatgtgagatattttatttttttttaatttattttttttttaaaagtttatttttattttttttttttttattacgtagtaattgataattaaatatagttttggtttttattatgtaatttagtagaatatttagatattaggaattttttatttttggttatttatataataatgaaatttgtagtttacgttaggttgtgtggatagtatttgtatttttggaaattaattggaggttttttttttattttttttcggttgttttttatttttttttttattgtggtttttgttttttttaagttgattagaattatgtataaaattagtttttaataaatattaatattgaagttttagtaggttgttaatttttgtatagttattttaaatgttgtatataagtgtaaagttttatggagttttagaggtttttaagaatattgtaaatattttaggtttaattagtagtttcggagttaggtaatggtttgtggttttttgcgttaggttttttgaggtttttagtttttagaggttgtttgtaattatgatgtgtatatatatagtatttttttttaaatatagtataaattttttttagattttgttaggtatttataattattgaatatatatgtagattgatttttatttttttaaagtttgaaaaataatttagtgttttaatttaggtttcgttagatattttttgatttaaattgtcgtttgtagttttattttttaagggaaatgaaaaaataataaatttttagattggtgttgatgtttattttttttaagcgggtcgattatttgttttgtagatttttgacgggtggggtgcggggtaggagtgcgatttaatttttagtattttcgaattagtttttttacggtgataggttagtttaatcggggttgtaaatagatttgataggtttgttttgggttgacggttattgattaggtttttagattagataagttatttggttgagtttatagtaggtggggcgcgtttattagtttaggggtagtgattggacgtttgttgtaatatcggagaatgtacgttttgggttgtagtaggagatatttttaagtatagaattaaaagggtttattttaagcggtagggtattagcgatggagaggttcgagagttttagcgtttagtttttttttttacgtttgggaaggcgtagaataggtcgatgtagagtaaggagtgagttttaggttttagttttttggtttgtttttagggtagtaggcgaggagtggtattagtttggggatttttttttcgcgttttgtaagaatcggcggtagttagtaggcggggaggcgggggtacgtgtttggatgtgggtgtttgtgtaattagttttttaagcgttagtttcgatagcgttttttcgggaggttggttcgagtttttgttttcgtcgcggcgtaggaagggttggggtttcgttgtttgtattaggtaagagtatttcgagtaaaggaagaagacgatttgttttcggagttattattggggagtgggaatttggaaagttttttaattagggatatacgtgatttttttcggaaagtagtttcgattgtggttcgtgtatttttttatttttttttgaatttttttaggttttttcgtttcgtttattcgttgggttgtagttttttatcgtttcgtattttttatttaattcggtaattttaaacgtgtacggttcggtcggggcgcgcggagtttggtttcgggcgatttattttgtcgggtttttacggcggttaagggggggcggggttaggtggtttttgagaatcgagtttgatttcgacgtcgcgaatcgatttggagttcgaggggaaagatgttcgatttttttgggggtatcggagcgggcgtaggagaggtttgcggggtgcgttttatttatagggatttttttttagtttatttagataggtgttttttgggtttttgaaatttaacggttatgtgtttacgtttagtacgttcggttgagagtttttatttttagggtaaacgagtcgagttatcggggaagcgagaggtggggcgttgtaagggagtcggatgaggtgatatacgttggcgatataatagtaggttgttttttgtgttaagattgatattatgaggatatagatttgggggaagggggaatttttaggtaaaggttgttatagttaaatttttgcgaacgattgtgattcgatagcggtgtaaaaggaaagagcgaatgtagtttacgtcgcggaaatttaggggtagaggtaaggggggagggtattttttttgtagggatcgtttttgtatttttttttatattgagtagcgtggttatttggttttttttatttgtgtataggtaattttagattcgagttagtgatattgtttaacgtatttattttagtttttattattagttttttattttcgttttataatagtttattttgttttcggttgggtttttgggtagaggtcgaggtttagttcgttattttcgtttcgcgttgttgtaaaagtcgtagtaagtgtagttgtaggttggcggttgggaatcggttcgagtaagttttaggtagttatattgggtatgtttagtagagtttgcggtttggggattttgcgttcgtatttagagttatcgttttgtttttttttatcgttttttgttttgttttgtttttttttcgttcggcgcggtttcgttcgtttttcgttcgtttttcgttttttttcggtttttcgaggcgttcgggttttcggcgcggcggcggagggggcgggtaggtcggcgggcggtgatgtggcgggattttttatgcgttgcggtaggatacgcgttcggcgttgggacgcgattgcgtttagtttttttttttcggaagttgtagttatgatggaagtttgagagttgagtcgttgtgaggcgaggtcgggtttaggcgagggagatgagagacggcggcggtcgcggttcggagttttttttagcgtttgtgagtagtcgcgggggtagcgttttcggggagtcggtcggtttgcggcggcggtagcggcggcgtttttcgtttttttttcgttttttttaatcgtgtagtttttttttcggttttttttgaaagggaaggtggaagtcgtgggttcgggcgggagtcggttgaggcgcggcggcggcggcggtatttttcgtttttggagcgggggggagaagcggcggcggcggcggtcgcggcggttgtagttttagggagggggtttgagtcgtttgttattatttttagggttgggaacgtcggagagttggtttttttttttttattgtttttaatacggcggcggcggcggcggtatatttagggattcgggtcggttttaaatttttcgttcgtcgtcgtcgtatttttcgtggttcgggtttcggaggtcgtcggcggaggtagtcgttcggaggattattcgttttttttttatttcgttgtcgtcgttgttaggtttttggttgttgaggagaagtaggtttagtcgttgtaattatttagtagtcgtcgtagtagttattattcggttgcggtttagagttaagcggcggtagagcgaggggtattagttatcgttaagtttagagttatttttattttgtagaagaagtttcgttattagtagtttttgttatttttttttttttttttttttagttataggtttttagatatgatagttattattaaagagatcgttagtagaaataaaaggagatattaagaggatggattcgatttagatttgatttgtatttatttttgcggttgtttttttttatttttttgttatttttttagaacgtgggagtagacggatgcgaaaatgttcgtagtttgggtgattataatatttaattttggttaggttgttaggttatatattttgtgttttttttttgtgtatttaatttagggtgtgtttggttagacggaatttttgtttggttgtaagtgttaagttatcgattgtttttttaggttatttatatggtttttttttgagggttattgttcgttaatatagaatatagtatattgttagtggattagcgagttcggtaattcggttttttaaatgaataaaaaagtagacgttttttgaggttgagtatatttcgattaaattttggtttaggttttagattaagggtttagattagaataaaatgaaaattagtgttgtacgtacgtatattgtattagaattttgtagtgattgttttagttttttgagttgtattgatagatttttttaaaatatgattgatttgtataattttagaagtagaattatttttagtatatatggtgtatattgagggtaaaaagtagttttgttaatgtttaaatttaagttatttataattttgaattgtatgtagaagttttgtagtttgaagttaatagtgttataatatattttataaggcgtttttattagatttttgttatatttatttttttttttttttatggggtgatgtaggatagtgtttgaaatttgtattttagtagtatttaatgtttagtgtttttgttataaatatagaatggatattgagtagtttttgattttagatggtaatgtgtaggtttaagggtattgtgtgtagtaagtgaagattgtagaaataaaattttagtttatgtttgaaatttaagtattgttgtgatgttagaattgttgtttatcgtttttaggttttaggttttttgatattttttggtatcgttaattttattgatttg

SEQ ID NO: 252 - DNA, 7110 bp, Artificial Sequence
  chemically treated genomic DNA (Homo sapiens)
taaattagtaaaattaacgatattaaaaggtgttagaggatttgaaatttaaaaacggtgagtagtaattttggtattataataatatttaaattttaagtatgaattgaagttttatttttgtaatttttatttgttatatataatatttttgaatttatatattattatttgggattagaaattatttaatatttattttatgtttatgataagagtattgaatattaaatgttattgaagtgtaaattttaagtattattttatattattttatagggagagaaaaaggtaaatataataaagatttagtaagaacgttttataaggtatattatggtattattgattttaaattataaaatttttatatatagtttaaagttgtaggtaatttaagtttaaatattaataaaattattttttgtttttaatgtgtattatatatattgaaaatgattttgtttttaaagttatgtaaattagttatattttaaaagaatttattaatgtaatttaggaaattaaaataattattgtaagattttgatgtaatatgcgtacgtgtaatattaatttttattttattttgatttaaatttttgatttagggtttaagttaagatttaatcgaaatatgtttaattttaaaaagcgtttatttttttgtttatttaggagatcggattatcgagttcgttaatttattaatagtgtattgtattttgtattaacggataatagtttttaggaagagattatatagatagtttaagaaagtaatcggtggtttgatatttgtaattaggtaagagtttcgtttagttaaatatattttaggttgaatatatagaaaggaaatataaaatatatgatttagtaatttgattagggttaaatgttatagttatttaaattacggatattttcgtattcgtttatttttacgttttaagagagtgatagaaaggtaaagaggagtagtcgtagaaatggatataggttaagtttaagtcgaatttatttttttgatatttttttttgtttttgttaacgatttttttgatgatggttgttatgtttgggagtttgtggttgaagaaaaaggaggagagagatggtagaagttgttggtggcggggttttttttgtaggatggaaatggttttggatttggcggtagttgatgtttttcgttttgtcgtcgtttggttttggatcgtagtcgggtaatggttgttgcggcggttgttggatggttgtagcgattgggtttgtttttttttagtagttagaggtttggtagcggcggtagcggaatggggagaagacgaataatttttcgaacggttgttttcgtcggcggttttcggagttcgggttacggggggtgcggcggcggcggacgggaggtttaaaatcggttcgggtttttggatgtgtcgtcgtcgtcgtcgtcgtgttggaggtagtagaaggggagagattaatttttcggcgtttttagttttggaaatggtgataggcgatttagattttttttttggagttgtagtcgtcgcggtcgtcgtcgtcgtcgtttttttttttcgttttaggagcgggaggtgtcgtcgtcgtcgtcgcgttttagtcggttttcgttcgagtttacggtttttatttttttttttaggagaagtcgaggaagaggttgtacggttagaaaagacgaagaggaggcgagaaacgtcgtcgttgtcgtcgtcgtaggtcggtcggtttttcgagggcgttgttttcgcggttgtttataggcgttgagaggggtttcgggtcgcggtcgtcgtcgttttttatttttttcgtttgagttcggtttcgttttatagcggtttaatttttaaatttttattatggttgtagttttcgagaggagagaattgagcgtagtcgcgttttagcgtcgagcgcgtattttgtcgtagcgtataaagagtttcgttatattatcgttcgtcggtttgttcgtttttttcgtcgtcgcgtcgggagttcgggcgtttcggaagatcgaggggaggcgggaggcgagcgagaggcggacgggatcgcgtcgggcgaggggagggtagggtagggtagggggcggtaggagggggtagagcggtagttttgggtgcgagcgtagagtttttaagtcgtaggttttattgagtatgtttagtgtagttgtttggggtttgttcgggtcggtttttagtcgttagtttgtagttgtatttgttgcggtttttgtagtaacgcgaggcgaggataacgagttaagtttcggtttttgtttagaaatttagtcggaggtagggtaggttgttgtggggcgggggtggaggattgatgatgaaagttgagatgggtgcgttgagtagtgttattgattcgagtttgaggttatttgtgtataggtgaaaaggattaggtgattacgttgtttagtgtagagggaaatgtagggacggtttttgtaaggggaatattttttttttttgtttttatttttagattttcgcggcgtggattgtattcgttttttttttttgtatcgttgtcggattataatcgttcgtagagatttgattgtaatagtttttgtttagagattttttttttttttaaatttgtgtttttatggtgttagttttagtataaagagtaatttgttattgtgtcgttagcgtgtattattttattcggtttttttgtagcgttttatttttcgttttttcggtaattcggttcgtttgttttaaaaatgaaagtttttagtcgagcgtgttgaacgtgaatatatagtcgttgaattttaagggtttaaagggtatttatttaaatgaattgaaagaggatttttgtgagtgggacgtatttcgtaggttttttttgcgttcgtttcggtgtttttaagagagtcgagtattttttttttcgggttttaggtcggttcgcggcgtcggagttaagttcggtttttagagattatttagtttcgtttttttttggtcgtcgtgaaaattcggtaggatggatcgttcggggttaggtttcgcgcgtttcggtcggatcgtgtacgtttggggttatcgggttgagtggaaagtacggaacggtaggaagttgtagtttagcgagtgggcggggcgaggagatttaggagggtttaaaaggaggtggaaggatatacgggttatagtcggaattatttttcgaaggaggttacgtgtgtttttagttggggaattttttaaatttttattttttagtgatagtttcggaggtaagtcgttttttttttttgttcggggtgtttttgtttggtgtaggtagcggaattttaattttttttgcgtcgcggcggaaataggggttcggattagtttttcgaaggagcgttgtcggggttggcgtttggggaattggttatataagtatttatatttaaatacgtgttttcgttttttcgtttgttggttgtcgtcgatttttatagaacgcggggagagagtttttaaattggtgttatttttcgtttgttattttaagagtaagttaaaggattgagatttgagatttattttttgttttatatcgatttattttgcgtttttttaaacgtgggaaaaggagttgggcgttagggttttcgggtttttttatcgttgatgttttgtcgtttagggtgaatttttttggttttgtgtttgagggtattttttgttgtagtttagagcgtgtatttttcgatgttgtaataaacgtttagttattatttttgagttggtgagcgcgttttatttattgtggatttagttaagtgatttatttggtttgagaatttagttaatggtcgttagtttagaataaatttgttaagtttgtttatagtttcgattgggttgatttgttatcgtgagagagttgattcggaaatgttgagagttggatcgtatttttatttcgtattttattcgttaaggatttataaagtaagtagtcgattcgtttaaagagaatgagtattaatattagtttgggaatttattgtttttttattttttttaggaagtagaattatagacgataatttgagttaaaaaatatttaacgagatttaggttgaagtattgagttgttttttaaattttgagagaatgagaattaatttgtatgtgtgtttaataattgtaagtgtttagtaaagtttaaagagggtttatgttgtatttgagaaagagtattgtatatgtgtatattatagttgtaggtaatttttgaagattagaaattttaagagatttagcgtagaaagttataggttattatttaatttcgggattattaattaaatttgggatatttatagtgtttttagagatttttgaggttttataaaattttgtatttatatatagtatttaagatagttgtgtaggagttaataatttgttgaagttttagtgttgatatttattgaagattggttttgtgtatagttttggttagtttgggaaaggtaaggattatagtggaaaaggaaatggaaagtaatcggaaaagagtaagagaaaggtttttagttgatttttagagatgtagatattgtttatatagtttagcgtgaattatagattttattattgtataaataattaaagataaggagtttttgatgtttaggtgttttattagattgtatggtaaaaattagagttgtgtttaattattaattattgcgtggtagaaaaagggaaaatgaagatgaatttttaaaaggggagtagattagggaggggtaaaatgttttatatttgttttttagattgttgattttgtttttagagtttttgttattagtattgtttttttttgttttttttttggagtttattttaagtgataattagttttatagtatttgagaatttttgaaatttgtttttatggaagtaaatgaaataagggtgtatttttgttttggtgcgatagaatttttttggattttatggtatagagttattttggagtagagataatttgtattattagtattaaagtgttagaatatgagattagtttttaagtatttttattcggttgaagaaagaaaatgggaaatgggttttattgtttttttaaatattaggtttttttatttttttttagtggtgaatgaaaggattattaatgttggtagatatttggttagtttaatagtaatattaggtggttattaggagttggtgaataaaattttttttttgtttttagtgttaagttgtttttgaaagaaatattgatgtatttttttttaattttttgtttttttttttttttttatttaaatggttggttttatttaaattaaagaaagttttaaaaatagtatttttttaaagtttagttgaaaatatttgtttggttgtatagatattataatatattggtttttaagtattttagttttttttttttttttttttttttttttttttttttgagacggagttttataggttggagtgtagtggtatgatttcggtttattgtaatttttgttttttaggtttaagtaatttttttgttttagtttttcgagtagttgggattataggcgtatattattatgtcgggttaattttttgtagtttagtaaagatagggttttattatgttggttaggatggtttcgattttttgatttcgtgatttgttcgttacggttttttaaagtgttgggattataggcgtgagttatcgcgttcggttatatttagttttttatttgtttggatttagaattagaatattatagggagaagtagaagtttgtaataaagggataattatataaagttttagggtgattatgtagattgattagtaagtatggtaaattagttttaattatcgtttttaatagttgattttaaaattttattgttattatattaaaataatgtcgaaagaaaattttttttttattttttttgataagcgaaatgattagtaatttgatgtggatgatataaatatttgatgtgttttttgtaggttatttgttaagatgttttttgtgtaaatattttgatttttatagtgttttttttattttttatacgttgattttttaaaaagggatttaatttaatagttttaatttttaaataattttttgtatttttgtttgtttaattattgttttttaaataatatagaatataaaaatataataattattggattgaatgtaaatttattgttttaagggtttgaggttttttttttattttatttattttaataataaatattattgtttttttaataaagataattttaagatattttttaaaaggcgttattgtgggttatataagtaattatattttaaaagagaattttttattattgtttataagttttttatgttttaaattttttttgaagttattttagatgttatggtgttattttttatattttggtagagagatgtgttgtatgaaattattatttttagagaaataagggttgagttggttgtttttgagaataatagagtagattaggtatttattgtgtttaagtggcgtttagaaattttgttttggatcgtggagtaatataaataaaaaagatataatatgataagatagttttgattatgttagtttttaggttaatattagttattaattattttatttggtttttttaatattaattttagttatatggagtatattgtttgttttttagattttttaataatagaaaaaggtaatttttatatattagaaaatattgggatatttattaggtgttttatagagtaggtcgaaattttttttttttttttttttttttttttttttttttttgagacggagtttttttttgttttttaggttggagtgtagtgacgtgattatggtttattgtaatttttgtagaatagttcgaatttgtttaggtagagggatattgagaaggagttaaaattttgttttgtttaatttttataatttttttttttaaaatatttttttggtttttaaggtattataaaaaata

SEQ ID NO: 253 - DNA, 6226 bp, Artificial Sequence
  chemically treated genomic DNA (Homo sapiens)
gtgtttatgtataggagtttgggtttgtggatggtgagtggtgagggtttggggaaggggttgtggggaagaaaagaaatttagattaaaggtcgggggttaggttatagcggtttttagggggagttagatttttttagtttagtttgttagtttttgggttttggtttttcgatattgtttagtttttatttttaatttttttattttatgtattatttttagatgattataagtttatttggatgtatgtagaggagcgggaggaaatgagtaaagtgagtggggggaaggggggttagtttggggagtttaaggttatcggggtttttgttttattttttgtattagtttaatttttattttttattttagtattagttttagatgtatggtgttttttttagtttagtttgtattttagttttatgttattttgtattttagtatttttgtatttttatatttggttttttttgtttttttttttggtttttttttgttttgtagagtcggtattatgagggtgggatattttatgttgagtatggaggttggtataaggtttgtaaagtgagtaggtgagttgatagtgaaaagttagtttggttttcgatgttttttatttagtttttgtttttagttttttagattttttttttttttttcgtagatttttttttagttttagttttgtttttttttttatttttttattttttttttttttgttttgtttggaagataaatgttttgttttttgaatttatttttttttttttttttggttttttttttattatagttttatagtgaatattattttgagaaatttgggagttttgtataggcgttagggaaagttggaggttgttgagattttggaggaatgtgttttgcggtttcggagataggttagaagtttagaggggaaggaggttttagagggaagggttttggggatgagagagtgtcgaggttttttgggagttttttaagaataagcggaaaggttgatgaagttaggagggagaggaaagtgaggtagtgttgtgattgtggttgtttttaagtatgtttttattttttatttgtattttgtggttaggattttagttttaagatttattaaatggggatatgaaggagaaattttgtttttttataaggaggggatttgggtggtatgggtgagaggagtgaggttggggagagtttaaattaagaattttttagattgtgggttttaatagtaggttgtgaaattaatttagtatgggttatggggataaaaatatatatagatttatatatagtaatgtattgtaaatagaaaaggtaagtattattttagtaggtataaattgagatattataaggaaaaatgttttttttttagtggttgatggtgaaaaaaatttgaaagttttattttgaggagttaaggagtaggaagttttaggtttttttttttttttttagggtattgattttattagttagacgaaggtggtagagttgtttggggagagtgatggtagaaggattttttaggagggttttggagatagtgtgaaattcgagggaggtgaagatgtttttgtggttgtggagtggttcggggtaagtttgattattgtttttttattttttttgtttatttttgttggtggtggtgagaggtttttggttatgttgttttagtttaggtagtgtatttttttaggggtatttttgggagttagtttttgataggatttttatttttagttattgggttttgggggtgggggatgtgtgtagaataaatgttaggagtagatttagaaatttatttgtgtgggatttttgtagtttttattgtttatttttttttgttaggatggtagtgggattttgtagaggagtggtttttttggtaagattcgggatgtgtttcgtagaagtagtgaatttttggtgaggaagttttaggggattgagtttcggttttttaggtatatatggaagttaagatatagtaaagtggtcgggtgtagtggtttacgtttgtaattttagtattttgggaggtcgaggcgggtggattatttgaggttaggagtttgagattagtttggttaataaggtgaaatttttttttaaaaatataaaaattagtcgggtgtggtggtaggtgtttgtaattttagttatttgggaggttgaggtaggagaattgttggaatttaggaggtagaggttgtagggagttaagattatgttattgtattttagtttaggcgataatagcgagatttcgttttaaaaaaaaaaagaaaaaaaaaaaagatatggtaaagtaggtaagtaaagtaagtttttgtttttaattttttttggtttttgatttttggagaagtatttcggagagaaatagggaggaagttaacgggttagttatggagagagagtttgggtagaatgggtgttttagtgtggtagtgtttaagaggtttatagttttaaggttatttaggaggaagagaggaggttttaattttttcgttttttattgtagtagtaatatgaagcgagtagtttttttgaattatttgaattaatttagtgtagtatttttttaggtgagagtagtgtttgtgagtatattggtgggtgaggaaaaaaggatagttagtgagtaagtttagtggagtaagggaagagggaagggagaggagttatttgggatgaagatgagttaggggattgtagttattaaggaattaggtagatagtttgtggtgagtgttgattattaagggatagttttaggttagatatagtagtaaataagttaataaggagggaaataggaatattttgtaaattggtattttggaattatgaataatttaagaattatttggagatacgaattatttttttattttgtagtcgttttagtagtagatgagaatggaaaaagaaaagtattaaataatttttatttgagaaaatattagtgatattttaatggtaaatgattttttgtattaatatataagtatatgttagtatttatgtggtttttttaggtagtttttttattagattgtggttttttggaaaattttagtagaggttaaataaagttttaggtttagagatagattggtttagagatagatgtgattttaggtttagagatatattgtgattatgggatggatggattttaggagttagtttttgggaggtcgaggtttttgagttgatggggtagtgttgtttgttttaggtttttcggggttttagtgttagtattatggatttttttttaagtagttgatatttaattcggtttttaggtttgttgggtttttttatttttatagtttttatagtattttttattgtttttggtttttttttatttttaggtgggatagtgaaggggagtagtttaattagaagattgttgttgtttttagggttttagttttttttttaggaattttttttaggaaggatttttaggatattttttttgtattttgtggttttttagagtagttagttttgaggttttaaggtgggtataaagtaggtatggtttttagagatgtagtttgttgttggttttttagttagagggttgggggttggttagttaagttgttttgttttggtcgtttttattttttttttttgttgttttattttaggtttatgtattttattttttttaaataaaagaattaggtaatttttttgtgatttgagttttgattgaagagggtatgaagtagggtttgtgttggggttttttatagaaggtgaggggtagtgatggatggagtagtaggaggagtgttgatttttggattttttttttttttttttcgttgtttgtattatttttagtagggtttgtaggaaggtatttgggggatggggaagaaggaggtttataatttaaggagaaggtgttgtggattgggttgttagggatatgtggtggttatgtggtaggattttggagttttggcgttattttttttggttgtgaggttttttgtggttgttatttttttttttagttgtttgggggaagggaggtttaaataggtttggggggtttttcggaattagaggggagataaggtattatttatttttttttagtatattttggaggtttgagtagtagttggggtttattttttaaagtttgattttttttgattcgttttttatattttttgttgtttttataataaagaaagaatgtgggggtggtggcgttgggggtgggggtgtttggaataagggttgtgttgggtttttttatagttggagatttggttatattttgatatagtttagattgtttggagatggatttgggatgaatttgttagttagtagattttagtttggtttttagagtttagcgtgtttttatttttgggtttagattggtttatagttaaattagattttagttatgtatattttagttttttttcgggttatatagtatttttaggttatttggggatattaaggatattttgttgttttgggtttgtcgttaagattttgggttgttgaagagttggcggggttcgtttttttttttgtttttatttggagaattttgggggaattgttggttagagtttttaggtatgtttagaatggattattttttttagggtttacggaatcgtataagttatttaggttttttcggatttttgtagagtcggtggtgggtatagtaaatatttaggttttttgtatttttttgagttttgttttttttattttttatttttttttagatttttttttttattgagttttttttcgtttcggcgaggagggggcgtcgagggggcggggcgtcgtgcgggggtcggaggggagggggcgtcgtggggcggggtttggcggcggcggcggcggcgcgcggggattcggaggtattgggcgcgcgcggtttcggttcgggacgtttcgggacgtttcggggtcgggtttcggttgcggttgttgttgcggcgttcgcgtttcggtgcgtttcgttttttgtgttcgtcgcggagcgtagtttgcgcgttcgtcgtgcgtttttagtttttttttttgagttcgtcgcgatgggagttgcgcggggattttcggttagatttcgtcggttgtttttgtttagcgttttgttgttgtcgttgttgggcggtgagtattcgagagttgggggtatagagtttgggaagcgcgggagtttcgtgggtaaaaggttgcgttcggggcggtgggtttgggcggttggaacggttttggagtagtggagaggttcgttgggggtgtaggtttgcggcggaagggcgtaaggagttcgggtgtcgggaggttggcgaagtttttagggacgcggttagggtattttttttattcgcgtcgcggggacgtatttttagtttttttgagtttttttggtttgagtcgagagtttgttcgagaattgtcgagagttgttggttttcgggtttagatggggagttttttgtcgggggagaaaagattattcgtatttatcgtggggagcgcgatggagaaaaaggaattttttattttattcggtagggtcggtttaggtaagagttgttggtttggggttcgatgtcggatagatttgcggcgcgtaaagcgcggagttttgttatttacgtcgattcgacgttttcggtttttttttttcgagtttttgggtaaagttgagattttagatggttttgcgggtgagggcggaagaagggaagagttaggggtcgtttttatttatggtttttagttattggtttggaattttgcgtttatttcgtgttagggtcgaattcggggattcgagggttttaggttgtcgcggtgattaatgtgtgaaggtcgttgttaaaatcgggtatggtttggttgtaaaggtgcggacggggtttgttttgtttttttttggatttttattttgattgtttttatagaggaaaggaagtatttttaagggaagaaaggtaaaaagagtttattttggttttttttgggggggggttttagtattttaacgagggtgtggtttttattattagggtagatagtatcgtttttttaattttcgtagtttttattttttggtttggttatatttaagagttattattgaggtgttgaagtgttttatagg

SEQ ID NO: 254 - DNA, 6226 bp, Artificial Sequence
  chemically treated genomic DNA (Homo sapiens)
tttgtaaggtattttaatattttagtgatgatttttaggtgtgattaagttaggaaataaaagttgcgggagttgggggggcggtgttgtttgttttggtgatgagggttatattttcgttaaaatgttaaggtttttttttaagaaaagttagaatgagttttttttgtttttttttttttagaaatatttttttttttttgtgaggatagttaggatggaaatttaggaaggagtagaataaatttcgttcgtatttttgtagttaggttatgttcgattttggtagcggtttttatatattagttatcgcgatagtttgggattttcggattttcggattcggttttggtacggagtgggcgtagggttttagattagtagttagaggttatggatgggggcggtttttaattttttttttttttcgtttttattcgtagggttatttggggttttagttttgtttaggaattcggaggagggaagtcgggaacgtcgggtcggcgtaggtaataaagtttcgcgttttgcgcgtcgtaggtttgttcggtatcgggttttaaattagtaatttttatttgggtcgattttgtcgggtggggtggggaatttttttttttttatcgcgttttttacggtgggtgcggatggttttttttttttcgataagaaattttttatttgggttcgagagttagtaattttcggtagttttcgagtaaattttcggtttagattagaaaaatttagggaggttggaaatgcgttttcgcggcgcgagtgggaggggtattttgatcgcgtttttggaggtttcgttagtttttcgatattcgggttttttgcgttttttcgtcgtaagtttgtatttttagcgagtttttttattattttagggtcgttttagtcgtttaaatttatcgtttcgggcgtagttttttgtttacgggattttcgcgttttttaagttttgtgtttttaattttcgggtatttatcgtttagtagcggtagtagtaggacgttgagtagaggtaatcggcggggtttggtcggggattttcgcgtagtttttatcgcggcgggtttaggaaaaggagttgagggcgtacggcgggcgcgtagattgcgtttcgcggcgggtataggaggcggagcgtatcggagcgcgggcgtcgtagtagtagtcgtagtcggagttcgatttcgaggcgtttcgaggcgtttcgagtcggagtcgcgcgcgtttagtattttcgagttttcgcgcgtcgtcgtcgtcgtcgttaagtttcgttttacgacgttttttttttttcggttttcgtacggcgtttcgttttttcgacgtttttttttcgtcgaggcggggaggagtttagtagggggaggggtttggagagggatggagaatagagagagtaaggtttagggaagtgtaggggatttgagtatttgttgtatttattatcgattttgtagggattcgggagaatttaagtgatttgtgcgatttcgtggattttggggagaatggtttattttgggtatatttggaggttttggttaatagtttttttagaattttttaggtgggggtaggggaagaggcgggtttcgttaattttttagtaatttaaaattttaacggtagatttagaatagtagggtgtttttaatgtttttaagtaatttgaagatgttgtgtagttcggagaggggttgaagtgtgtatgattggggtttggtttggttgtagattaatttgaatttaaaggtagaaatacgttgggttttgaaagttaggttgaagtttgttaattgataaatttattttaagtttatttttaggtagtttgggttgtgttagggtatggttaagtttttagttgtggggaggtttagtataatttttgttttaggtatttttatttttagcgttattatttttatattttttttttgttgtgaaagtagtaaggggtgtaggaggcgggttaggaggagttaagttttagaagatgggttttagttgttgtttaggtttttaagatatgttgagaggggatggatagtgttttgttttttttttggtttcggagggttttttaggtttgtttagatttttttttttttaagtagttgggaggaggaatggtagttatagagggttttatagttaggagaagtggcgttaggattttagggttttgttatatggttattatatgtttttgataatttagtttatagtattttttttttgggttgtgagttttttttttttttattttttagatgtttttttataggttttgttggagatgatataaataacgggaggaagagaggagagatttaagaattaatattttttttgttgttttatttattattgttttttattttttgtgaagggttttaatataagttttgttttatattttttttaattaggatttaagttatagaaaggttatttgatttttttatttaagaaaagtgaaatatatggatttgaagtgagatagtagagggagggagtaagagcggttagggtaaggtagtttggttggttagtttttaattttttgattgaaaagttagtagtaggttgtatttttgagggttatatttgttttgtatttattttggggttttagagttagttattttagaggattatagggtgtagagagggtgttttgagggttttttttaagagggatttttgaggagggagttgagattttaagggtagtagtaattttttggttaaattgtttttttttattgttttatttaggggtggggaagagttaggagtaatggggaatgttgtgagggttgtgggggtggggggatttagtagatttgggggtcgggttgaatgttagttgtttgaagagaggtttatggtgttggtattgaggtttcgggagatttgaaatagataatattattttattagtttagggatttcggttttttaaagattggtttttagagtttatttattttatggttatagtgtatttttggatttaggattatatttgtttttggattagtttatttttggatttgggattttgtttagtttttgttagggttttttagaaggttataatttggtggagaagttatttggaagaattatatgaatattggtatatatttgtgtgttgatataagaagttatttgttattaaaatattattagtgtttttttagatggggattatttaatatttttttttttttatttttatttattattaaggcggttgtaggatgaaaaaataattcgtatttttaaataatttttaaattatttataattttaaagtattagtttatagaatatttttatttttttttttattaatttatttgttattatgtttggtttgaaattgttttttggtggttagtatttattataagttatttgtttgattttttaatgattgtaattttttggtttatttttattttagatgattttttttttttttttttttttttattttattgggtttgtttattggttgtttttttttttttatttattaatatgtttataagtattgtttttatttggaggggtgttgtattaggttggtttagatagtttaaggaggttgttcgttttatgttgttgttataatggaaaacggaagaattgaggtttttttttttttttttgagtggttttaaggttgtgggttttttgagtattgttatattggggtatttattttatttaaattttttttttatggttggttcgttgattttttttttgttttttttcgagatatttttttagagattaggagttaagaggagttggaggtaagggtttattttatttgtttgttttattatattttttttttttttttttttttttttgagacggagtttcgttgttgtcgtttgggttggagtgtaatggtatgattttggttttttgtaatttttgttttttgggttttagtaatttttttgttttagttttttaagtagttgagattataggtatttgttattatattcgattaatttttgtatttttaggagagagttttattttgttggttaggttggttttaaatttttgattttaggtgatttattcgtttcggttttttaaagtgttgggattataggcgtgagttattgtattcggttattttattgtattttgatttttatgtatatttggagggtcgaggtttagttttttggagtttttttattaagagtttattgtttttgcggagtatatttcggattttgttaagagagttatttttttgtagggttttattgttattttggtagaaaggagtgagtaatgaaagttataaggattttatatagatgggtttttgagtttatttttagtatttattttgtatatattttttatttttaaggtttagtgattggaaataaaagttttgttaaaaattggtttttagagatatttttgaaggaatatattatttagattgggatagtatggttaagagttttttattattattagtaggagtgggtaggagagatgaaaaggtaatgattagatttatttcggattattttatagttatagaagtatttttatttttttcgaattttatattgtttttagggtttttttgggaggtttttttattattattttttttaagtagttttgttattttcgtttggttgatagggttagtgttttggaaggaaaaggaaggatttgggattttttattttttaattttttaggatggggtttttaaattttttttattattagttattggaaggaaaatatttttttttgtgatgttttagtttatatttattggaataatatttattttttttatttgtaatgtattgttatatatagatttgtatatatttttatttttatggtttatattgaattgattttataatttattattgagatttataatttaagaaatttttgatttaggttttttttaattttattttttttatttatattatttaggttttttttttatgaaagggtagggttttttttttatatttttatttagtgaattttgaaattagagttttgattataaaatgtaggtggggggtaagaatatgtttaaaaataattataattataatattgttttattttttttttttttttggttttattagttttttcgtttatttttaggagatttttaagaaatttcggtatttttttatttttagggtttttttttttaggattttttttttttttgggtttttgatttgttttcgggatcgtagggtatatttttttagggttttagtagtttttagttttttttggcgtttatatagagtttttaggttttttagagtagtgtttattgtggggttgtggtgagaaagagattagagaaggaagagagaatgagtttagaaaataaaatatttgttttttaagtaagataagaggaaaaaaaataagaaaataggagagggaatagagttaaagttgagggaaagtttacgggaggaagggaaaaggtttgggaggttgggagtagggattggatggagggtatcggaggttaagttggttttttattgttagtttatttgtttattttgtaggttttgtattagtttttatatttagtatagggtgttttatttttatggtgtcggttttgtaggatagagagaggttagaaagaagggtagggagagttaaatataagaatatagagatgttgagatgtaaggtggtatggggttagggtgtaggttgggttggggaggatattatgtatttggggttggtgttgggatgggaagtgagagttgggttaatgtaaggagtaagatagagatttcggtagttttgagttttttaggttggttttttttttttttatttattttgtttattttttttcgtttttttgtatgtatttagatgggtttgtggttatttaggggtgatatatggggtggggaggttagagatgggagttagatagtgtcggagagttaggatttagaggttgataggttggattgaaggggtttggttttttttgggaatcgttgtggtttaattttcgatttttggtttgaatttttttttttttttatagttttttttttaggtttttattatttattatttatagatttaaatttttgtatatgggtat

SEQ ID NO: 255 - DNA, 8991 bp, Artificial Sequence
  chemically treated genomic DNA (Homo sapiens)
gattaggggagtttaatgtgtatttgttaatggagtttaatggtattattagtgttattttttggtttagtgttttagggttttggggagggtaaggatatattaagatttgaagttgggaaatttttttttagattttggttttttttgaaggtttttgttttttatgtggtttttaggaaggtttagagaatgtttgtttagtaatttgtcgtaattttagaagatttgagtttagaaggggagcggaatttatttatagtggagttgatttgtatgatagggtttgttattgttgaggatttggggagttattattttcgattttgtaaggtttttgttgtgtgattttgcgtagttgattggagttttataattttttaggatatggggtttatgtttattttttttgatttttagttagttataatatgttgtttattttttgtggagtttgacgttgtattgtttttttttttttttttttttttttttaattttagtttaagttttgggatatatgtgtagaacgtgtaggtttgttatataggtatatatgtgttatggtggtttatagtttttattagttcgttatttaggttttaagtttcgtatgtattaggtatttgttttaatgttttttttttttttgttttttattttgcgataggttttcgtgtgtgatgtttttttttttgcgtttatgtgtttttattgtttaatttttttttatgagtgagaatatgtagtgtttggttttttgtttttgtgttagtttgttgagaatgatggtttttagttttatttatgtttttgtaaaggatatgaatttattttttttttttttttttgagatggagtttcgttttgttatttaggttggagtgtaatggtgttatttcggtttattgtaatcgttattttttaggtttaagtgatttttttgttttagtttgttgaatagttgggattataggtgtttattattatgtttagttaatttttgtatttttagtagagatggggttttattataatggttaggttggtttcgaatttttggttttaagagattttttcgttttggttttttaaagtgttgggattataggcgtgagttatcgtgtttggttgagttttatattttatattttagaatataaaggttaattttttttttttcggtttttaagtagaaaaatattttgtttagtatatattagtggtttttaaataagggtgggggtaatgttgtttattagaagatatttgataataaaggtatttttggttgtcgtggttaggagtaggggtgttattagtatttattaggaatgttggaggttaggaatgttgttaatttttttataatgtttagggtagttttttatattgtagtattatttagtttaaaatgtgaatatgttgaggttaaagttgaagttaggaaattttggtttataaagatagatttttgttttatttttaaagtttttttaggagattatatttttttttattgttttaaagttttggtaattagaaatttttaatttatttatttttattgttatttataattttttttttttttaattttaagagagatagaaaataagttttttaatttttattttttttttgggttaattggtatttttttttcgttattttatgttttgttgattttttttttttttattttttttttattagggtttaaattaagagaagtaggggtttagttttggtttttggggtttgagaatgagttttagtttttgttttgtggagaggtaggttagggagataggagttgataaggatgagtagggagtttattagatgattaataaatatttgaattatggggggtaggtagtttttttttgttatttttttttggatgtttttgtttggttagaaaagaaggttaggtgtggtggtttatgtttgtaattttagtattttgggagattgtggtaaacggattgtttgattttaggagttttagattagtttgggtaatatggtgaaattttttttttattaaaaaatataaaaattagttgggtgtggtggcgtagttatttgggaggttgagatgggtgaattatttgagtttagggaggttgaggttgtagtgagttgtgatcgtattattgtattttagtttgggtaatagagtgagattttattttaaaaaaaaaaaaaaaaaaaaaagggaaagaaaatgtttagaagtttttattttttaagtgtttttattttttaggtgtttgttgtttgattaaggaggtatatataaatttttagttttgtaggaatttttgttttttaaatggtggtggtgaggagtttaaatatttagattgggggtttttagtattttttttttgaagagtgaagagaaggggtttggggtagtaggagaggagttgttaagagtaataataatagtttttatttattattgagtatttttattaggtgttaggtattgaggaaggttttgtttattttttattatttggttatataagttttttgggttttttgttttttgttttttgtttttgagatagagtttcgttttgttgtttaggttggagtgtagtggtgtgattttggtttattgtaattttcgttttttgggtttaagtgatttttatgttttagttttataagtagttggaattataggtacgtattattatgtttagttaatttttatatttttagtagagatgaggttttattatgttggttagtttggttttgaatttttgattttaagtgatttatttatttcggttttttaaagtgttgggattataggcgtgaggtatcgcgtttagttattttggtttttttttgagagagagttattttgtagtttaggttggagtgtaatggtacgattttggtttattgtaattttcgttttttaggtttaagtgatttttgtgttttagtttttcgggtagttgggattataggcgtgtattattatgtttggttaatttttgtatttttagtagagataacgttttattacgttggttaggttggtttggaatttttaattttaagtgatttgtttattttggttttttaaagtgttggaattatagttatgagttattgtgttcggttaattatataattttttgtagtaaaatatatatataaaatttattattttggtcgggtgcggtgttttatgtttgtaattttaatattttgggaggttaagatgggtggattatttgagattaggagtttgagattagtttggttaatatggggaaatttcgtttttattaaaaatataaaaattagttaggtatggtggtgcgtgtttgtaattttagttattcgggaggttgaggtaggagaattatttgaatttaggagacggaggttgtagtgagttgagattatattattgtattttagtttgggtaatagagcgagattttgttttagtaaataaataaataaataaaataaaaatttgttattttagttatttttaggtgtatattttattggtattaagtatttttatagtgtggtatagttgttattattttttacgtttagtatttttttattattttaaattttgtatttattaaataataattttttatttttttttttttagtttttgggaatttttgttttattttttgtttttatgaattttgggtagagtttttagtaatatattattttttattgttaatatgtttttgttattttatgttaaaaatttttattttatagataggaaaataggtttagaggagttaagtaattggttttaaagttatataattagtaagtgatagaattaggatttgaatttaggtttgtttggttttaaaggttagagaaaggaggggtaaagagggagaatggaggagttgtttgaagtgaggaacgggtgaggaatggaggaggtttgtatttttttttttttttttttacggatagtttgtttaggaacgttgattgggtgtttttttttttttttgatttatttaatttaggtttggagttttgaatgagaataggtgggttttttttttgtttggtgtttttgtttttttaattttatttgatattttttttagttgtgataaggaggagttagtagtgggggaaatttgaattttgggttttgagtaaaatttggtagagtttttttcggaatttttttttttttaggtttttttgtttttggataagttgattagtgtgtgagtttatttgagtagtttttttgtgttggttgttttgtagggtataataataagataaggtttgataatagggaatgaggttagttagaatgtgtatagggattttgtatagtagtgagtataaggaatttagggatgtaggtattcggggtgggttggaatagttaggggagaatttttagaggaagtgggttttaagaggtgggtagggttgggatgaaagaaaaagtaaagagtgtttttggagatgggaataatttagaagttttggagagtacgtttttttttggagttttgggaattttaatgatggaggaattttattatttatttatttatttttttatttatttatttaataaatatatattaaatatttattttatatttagagtggtgatggtcgggtgcggtggtttatatttataatttgtattttggaaggtcgaggtgggcggatcgtttgagtttaggagtttgagattagtttgggtaatatggtgaaatttcgtttttataaaaaatataaaaattaggtaggtatggtgatgtacgtttatagttttagttatttgggaggttgaggtggtagattgaggtaggaggattatttgagtttgtgaggtagaggttgtggtgagtttagattgtgttattgttttttagtttgagtatagagtgagattttatttcgaaaaataataagagtagtgataagattttttggagtcgtcggtcggggtcgttggttgtatttagcgtcggagtcgggagttagcggtcgtcgttatgttttattagatcggtatttaagtaagtgaagatgttaaagagatttttgttagagttagaaatggaaagtatagatttttgaaaatatttattgaaaatgagtaatttgtgattggattatatagttagtttttagatttttgggataaggattatgatttttttgttttatttttgttggaggataaataattatgttatatattatttaggttagatttttagaatgtttagggatatgaatggatatttattgtatggtttttagattatttttatgttcgttaaaaaatgttgtatgtagtaataagagtaattttgaagaaggaatttggaggtggttatattaaagatgaaatatttggaatagtaaaggaagatgtattattatatggatataaaaaatatttgttgttataatttttttttgttttattgattgtagttgaggaagaattacgatagattaaaattaatgaggtatagattgacgtgggtgtggatattaagtattaaatattataaggagtagtattttttatttttcgagaagttttttaggttttggaaaaattgaataatagatagtttaattatgtgtagttggaaatagatataaaaaatgaaattataattttggttaatataataaatatagaattgaaagatttgttaaagaggatttttaaggatttagttcgttattatttttttttgtataaatatttttatgaaggagattatttagagtttatagttttatttatttaatgtttggatatatatgtagtataagagagcggatgttgtattttagttgtaagagttttttgttagaaattgtagaaagataattataaatggatgtaattagaaagatcgagatagataatggggatgagttgattgtagattttttttatgaagaagtatattttaagtagtaggtatataagtaaagttttgtaaaattaaaaggttttgtaggaaaaagaggaattcgaagattaattaggggtttagcggaaattgaagttattattgattaaagtcgttatattaaatattgtaatattagttttttaaaagtttagtttttagtataggagaattgaaattattttatgttgatataaagtagggaaaaatattgtattttttggaaaatagtattttttatttttgtgtgtttttaaaattaatgttatagaagatttatgatttttatttttgagttaaagttagaaaagggtttaatataatgtttaattttgttatattgtttttatagtgttgattttatattttaaatattttttaaaattttatatagttgggttagttttagaaagtttgatgttttaaagggtaaatttattatttttttgtgggatagaaggattttaaaatatttatattatttaatgaatatgttaaggattaggttagagtattttttaagttggaaatttagtgtgtttcggaaaaggtcgtaagttgtttatttcgagtagttgtgttagttttgttagattgtaggattatgtttgtaatttttagaaatagtgttttatattgtagtagttttttatatttgattttttttttaatagtattaaaattgtagattagtttattttgaaattttaagggtattagatattttttatattgtaggatttttaatgatattgaaagatttttaaatagttttagtaaattatttttttaatgttttgtgaggttaaatatttatgtttagattgaaatttaaattaatattatttaaaaggaaataaaaaatgttgagttttaaaaattaggattgatttttttttttaaaattatatatttataggtaaattgtgttttttattatttttgagtaaatatttagatttaaaattattttaaagttttggtatttaataggttaacgtagataaatattttaataattttagttaatattgtattttaaaatatatttaattgttttttaatgttttgtattattagttataatttagagagattttgagttttatatttttttgatatttgaaatagagggagttagaatatttaatgtttaatttgttaaatttgttgtaagagttataattttgaggtattttttaaatgaattgtggggatttaggatttgtaattttttgatttaaattttatgttgtataaattatttatcggaaatgtatattttatagtgtgaagtatttatttttaaattttattatttaaggtaatatatgtattttttagaaatttgtgttcgagtaagtaaagtatattagaataattatgggttgatagatttttaaaatagaatttagagtatttgtgtggggttttgtttgtttataaataattagattataatatttaaatatgtaaaataattgagaataatgttgtatttgtttattaaagatataagttgttttatgggtgtatacgtagatagatatatatatatttaaattattgtattaagaattttggagtagattatagttgaagttgttatttttagttaggaagattatttgttatgaaggtatataataatttagaagtgaatgtttttttgtattatttatgtgtaattatattttaaattttattatattatattaaagtaaatggatattttagaatatagatgtgattatagttttaaattaattattaaattaatgattgttgaaaattagtgatgtatttgttatagagtataatttatcgtttatagtatgttttagttggtagtattatatttagatggtgaataatatatttttagtaaatttatatagtagtgaagaattatatgttttttggtggatattttataagtgtattttatattataataaaattttttttttttataaaaaaaaaaaaagagtagtgataaataagatatagtttttgttattgaatgattcgtagttaagtaatggagataatttttatgttttaaatgaaatttgtttataaatggaaattatagatattatgtttagtagataatgtattaagtaggagattattatgggtatggttagttttttttgggataggattaggaaatttttttggagaaggtattgtttgaattgaatgttgggaggtaagtaagaattggttggaagatagtggggttggataggtagaggaagagggtgagtgattgtttaggagtatgaagttgtttgtaggtgtgtagggtttttaggaagtttgagagttgaagggtaaggaggatatagatggggttggaggtgtaggtagagattagattagagagggttttatatgtttttttggggagttaggttttattttaaggataatggaagttattggagagtgagttgtttatttatttatttatttatttatttatttattttttttgagataggtttttattttgttattaaggttggagtgtagtggtatgattttggtttattgtaatttttattttttaggtttaagtgatttttttattttagttttttaagtagttgggattataggtatgtattattatatttagttattttttgtattttttgtagagacggggttttattgtgttgtttagattggttttaatttttgagattaagtgatatatttattttggttttttaaagggttggaattataggcgtgagtttttgtacgcggttgagttttgatgagggagatgaaattatatgtataattagatatgtattttaggaatgtagttatttagttaggtgtggtggtacgtgtttgtagttttagttatttaggaggttgaggtaggagaattgtttgaatttaggaggtgaggttacggtgagttgagattatattattgttttttagtttgggcgatagagtaagattt

SEQ ID NO: 256 - DNA, 8991 bp, Artificial Sequence
  chemically treated genomic DNA (Homo sapiens)
gagttttgttttgtcgtttaggttggagagtagtggtgtgattttagtttatcgtaattttattttttgggtttaagtaatttttttgttttaattttttgagtagttgggattataggtacgtgttattatatttggttaaatggttgtatttttaaaatgtatatttggttatgtatatggttttattttttttattaaaatttagtcgcgtgtaaaggtttacgtttgtaattttaattttttggaaggttaaggtggatgtattatttgattttagaagttgagattagtttgggtaatatagtgaaatttcgtttttataaaaaatataaaaaatagttgggtgtggtggtgtatgtttgtaattttagttatttgggaggttgaggtgggaggattatttgagtttgggaggtggaggttgtagtgagttaagattatgttattgtattttagttttggtgatagaatgagagtttgttttagaaaaaataaataaataaataaataaataaataaataaataatttattttttaatggtttttattgtttttgggataaagtttaattttttaagaaggtatgtaagattttttttaatttagtttttgtttatatttttagttttatttgtgttttttttattttttagtttttagattttttggaagttttatatatttgtagatagttttatgtttttgagtagttatttattttttttttttgtttgtttagttttattgttttttagttaatttttatttattttttaatatttagtttaagtagtattttttttaaggaagttttttgattttattttagaaaggattgattatgtttatggtggttttttgtttagtgtattgtttgttgaatataatgtttgtaatttttatttataaataaattttatttaaaatataagaattatttttattatttgattgcgaattatttaatggtagaaattgtattttatttgttattattttttttttttttttgtaaagagaaaaaattttattgtgatataaaatgtatttataaaatgtttattagaaggtatgtaattttttattgttatataaatttattgggaatatgttatttattatttaggtatgatattgttaattaaaatatattgtaaacgatgagttatattttataataaatgtattattgatttttagtaattattggtttaataattagtttaagattataattatatttatattttggaatgtttatttattttaatgtagtgtagtggaatttagagtataattgtatatagatggtatagaaaaatatttatttttaaattattgtatatttttatgataggtagtttttttgattgaaaataatagttttagttatggtttgttttaggatttttaatgtaataatttgggtgtatgtgtgtttgtttacgtgtatatttatggaataatttatatttttagtaaataagtgtaatattatttttagttattttgtatgtttaaatattatagtttgattatttgtaaataaataaaattttatataaatattttaaattttattttaaaaatttgttaatttataattattttaatatgttttatttattcgaatataaatttttgaaaggtgtatatattattttagataataaggtttagaaatgagtgttttatattatgaaatgtgtattttcgataagtgatttatgtagtataaagtttagattaagaaattataaattttggatttttatagtttatttagaaaatgttttaaagttatggtttttgtagtaggtttaatagattaaatattaagtgttttagttttttttattttaagtattaaagaaatatgaggtttaaaatttttttaggttgtaattgataatgtaaagtattagaaaatagttaaatgtgttttgaaatatagtattaattgagattattaaggtgtttatttacgttagtttgttaagtattaggattttaaagtaattttaaatttgagtatttgtttagaagtgataaagaatataatttgtttataaatgtatggttttggagaaaaaagttaattttgatttttaaaatttaatattttttgtttttttttgaatgatattaatttaaattttaatttgaatataaatgtttggttttatagagtattagaaagataatttattaaggttgtttaaaagttttttaatgttattagaaattttgtagtatagaaaatatttggtatttttaaagttttagagtgagttgatttgtaattttaatgttattaaaaaaaaagttaaatataaaagattgttgtaatataaagtattatttttaaaagttgtagatatgattttatagtttgatagagttagtatagttattcggagtaagtaatttgcggtttttttcgaggtatattaagtttttagtttagaaaatattttagtttggtttttaatatatttattaagtaatatgaatattttaaggtttttttgttttataagaaagtagtaagtttattttttgagatattagattttttagagttggtttaattgtataaaattttaagaagtatttgaagtgtggaattaatattatgaaaatagtgtgataaaattaaatattatgttgaatttttttttagttttaatttaaaaatagaaattatgagttttttataatattaattttaaaaatatatagaagtgaaaagtgttattttttaaaaagtataatgtttttttttattttatattaatatggaatgattttagtttttttgtattaaaagttggatttttaaaaaattagtattgtaatgtttaatgtgacgattttaattagtagtagttttagttttcgttgggtttttaattagttttcgaattttttttttttttgtaggattttttggttttgtaaaattttgtttgtgtgtttgttgtttgggatgtatttttttataaaggaagtttgtagttaatttatttttattgtttatttcgatttttttaattatatttatttgtagttgtttttttataatttttagtagagggtttttgtagttagaatatagtattcgtttttttatattgtatgtgtatttaggtattgaataaataaaattatggattttaaatagttttttttatgggaatgtttatatagaaagaaatggtaacgagttgaatttttgggaattttttttggtaaattttttagttttgtatttgttgtgttggttaaaattataattttattttttatatttatttttaattgtatatagttgagttgtttgttatttaatttttttaaagtttgaaaggtttttcgagaaatgggaaatgttattttttgtagtgtttgatgtttagtgtttatatttacgttagtttgtattttattgattttaatttgtcgtaatttttttttagttgtagttagtggggtaggggaagattgtgatagtaagtattttttatatttatgtaatgatatatttttttttattgttttaaatattttatttttaatgtggttatttttaaattttttttttagagttgtttttgttgttgtatataatattttttgacgaatatgagaatgatttggagattatgtaatgaatatttatttatatttttgggtattttgagaatttaatttgaataatatatagtatggttgtttgttttttaataggggtaaaataaaggaattataatttttattttaggaatttgaaggttgattatatgatttaattataagttgtttatttttaatagatatttttagaagtttgtattttttatttttggttttggtaaagatttttttaatatttttatttgtttggatgtcggtttggtgggatatggcggcggtcgttagttttcggtttcggcgttgagtgtagttagcggtttcggtcggcggttttaggaagttttgttattatttttattatttttcgagataaggttttattttgtatttaggttagaaagtagtggtataatttggatttattataatttttgttttataggtttaagtgatttttttattttagtttgttattttagttttttaagtagttggaattataggcgtgtattattatgtttgtttaatttttgtattttttgtagagacgaggttttattatgttgtttaggttggttttaaatttttgggtttaagcgattcgtttatttcgattttttaaagtgtagattataggtgtgagttatcgtattcggttattattattttaaatatgaagtaagtgtttaatatatgtttattaaatgaatgagtgaaagaatgaatgggtagatgatagaatttttttattattggggtttttagagttttagagagaggcgtattttttaagatttttgaattatttttatttttaagaatattttttgtttttttttttattttaattttatttattttttgagatttattttttttaggaatttttttttgattattttaatttatttcgaatgtttgtatttttgaattttttatgtttattgttatgtaggatttttgtgtatattttggttggttttattttttgttattaagttttattttgttgttgtgttttatagagtagttagtataagggagttgtttagatagatttatatattggttaatttgtttaggaatagaaaggtttgagaggagggaggtttcggaggaagttttgttagattttatttagagtttagagtttaaattttttttattgttggtttttttttattatagttaggaaggatattagatgaaattggggaaatagaggtattaggtaggaaaaaaatttatttgtttttatttaaagttttaggtttaaattaggtaggttagagagagagagggatatttagttagcgtttttgagtaagttgttcgtggaagggaaagaaagaaaatgtaagttttttttattttttattcgttttttattttaggtagtttttttattttttttttttgttttttttttttttggtttttggagttagatagatttgggtttaaattttggttttgttatttgttagttgtgtggttttggggttaattatttaatttttttgggtttgtttttttgtttgtgaagtagagatttttaatatagaatgataaagatatattgataatgagagataatatattattaaaaattttgtttaaaatttatagaggtaggaagtagaatagaggtttttaggggttaggagagggggaatggggagttattatttaatgggtgtagagtttgggatgatgagaaagtgttgggcgtggagagtgataatagttgtgttatattgtggagatatttaatgttaatgaagtgtatatttaaaaatggttagaatggtaaatttttattttatttatttatttatttattgagatagagtttcgttttgttgtttaggttggagtgtagtggtatgattttagtttattgtaattttcgttttttggatttaagtgatttttttgttttagtttttcgagtagttggaattataggtacgtattattatgtttggttagtttttgtatttttagtagagacggggtttttttatgttggttaggttggttttaaatttttgattttaggtgatttatttattttggttttttaaagtgttgggattataggtatgagatatcgtattcggttagaatggtaaattttatatgtatattttattataaaaaattatataattggtcgggtatagtggtttatgattataattttagtattttgggaggttaaggtgggtagattatttgaggttaggagttttagattagtttgattaacgtggtgaaacgttgtttttattaaaaatgtaaaaattagttaggtatggtggtgtacgtttgtagttttagttattcgggaggttgaggtataagaattatttgaatttgggaggcggaggttgtagtgagttaagatcgtgttattgtattttagtttgggttatagagtgatttttttttaaaaaaaaattaaaatggttgggcgcggtgttttacgtttgtaattttagtattttgggaggtcgaggtgggtggattatttgaggttaggagtttaagattagattggttaatatggtgaaattttatttttattaaaaatataaaaattagttgggtatggtggtgcgtgtttgtaattttagttatttgtgaagttgaagtatgagaattatttgaatttaggaggcggaggttgtagtgagttaagattatattattgtattttagtttgggtaatagagcgagattttgttttaaaaataaaaaataaaaaataaaaaatttaaaaagtttatataattaaatggtggggggtgggtaggattttttttagtatttggtatttggtaggggtgtttagtgataaatagaagttattattattgtttttagtagttttttttttgttgttttaaattttttttttttattttttaggaagaaaatattagaaatttttagtttgagtatttaaattttttattattattatttaggaagtagaagtttttgtagggttggaagtttatgtatgtttttttggttaggtagtaggtatttgggagatggaggtatttgggagatggaggtttttgggtatttttttttttttttttttttttttttttttttgagataggattttattttgttgtttaggttggagtgtagtggtgcgattatagtttattgtagttttaatttttttggatttaggtgatttatttattttaattttttaagtagttgcgttattatatttagttaatttttgtgttttttgatgaagaaggggttttattatgttgtttaggttagtttggagtttttgggattaagtaattcgtttgttatagttttttaaagtgttgggattataggtatgagttattatatttggtttttttttttggttaagtaaagatatttaggagggggtggtaaaaggaaattatttgttttttatggtttaaatatttattaattatttggtgagttttttgtttatttttgttagtttttgtttttttggtttgtttttttatagagtagaggttggggtttatttttaaattttaaaagttagaattgagtttttgttttttttgatttgagttttggtgggagaagggtgaaaaagagagaaattaataaggtatagaatagcgagggggaaatgttagttagtttaagaagagagtggggattgaggagtttgttttttattttttttgaagttagaagggaaaaaagttataaataataataggagtgaatgagttagaagtttttggttgttagagttttaaggtaatggaagagaatatagttttttaggagaattttgaaaatggggtagggatttatttttataggttagggttttttaattttagttttaattttagtatatttatattttggattagataatattatagtgtaggaaattgttttgggtattgtaggagggttagtagtatttttggtttttagtatttttggtagatgttagtagtatttttgtttttggttacgataattaaaaatgtttttattgttaaatgttttttgatggataatattatttttatttttatttgagaattattgatatatgttaaataaagtgtttttttgtttggaaatcggggagaaaagaattgatttttatattttaggatgtgaaatgtaaaatttagttaggtacggtggtttacgtttgtaattttagtattttgggaggttaaggcggggggattttttgaggttaggagttcgagattaatttggttattatagtgaaattttatttttattaaaaatataaaaattagttgggtatggtggtgggtatttgtaattttagttatttagtaggttgaggtaggagaattatttgaatttgggagatggcggttgtagtgagtcgagatggtattattgtattttagtttgggtgataaagcgagattttattttaaaaaaaaaaaaaaggaatgagtttatgttttttgtagggatatggatgaagttggaagttattatttttagtaaattaatataggaatagaaaattaaatattgtatgtttttatttataagagggagttgaataatgagaatatatggacgtagggaagggaatattatatacgggggtttgtcgtagggtggggggtaaggggagggagagtattaggataaatatttaatgtatgcggggtttaaaatttagatgacgagttggtaggagttgtaaattattatggtatatgtgtatttatgtaataaatttgtacgttttgtatatgtattttagaatttaaattaaaattaaaaaaaaaaaaaagaaaaagaaaaaataatataacgttaaattttataaggggtaaataatatgttgtgattggttggaagttagggagaataaatataggttttatattttaggaaattgtgaagttttagttagttgcgtaaagttatatagtaaggattttgtagggtcgggagtggtgattttttaggtttttagtaatgataagttttgttatgtaaattagttttattgtggatggatttcgttttttttttaaatttagattttttggggttgcggtaggttgttaagtaagtattttttgggtttttttaagagttatatggaaaatagaagtttttaagaagagttaaggtttggaaggaagttttttagttttagattttaatgtatttttgttttttttaaagttttagaatattgggttagagaatggtattgatggtgttattaagttttattaataagtgtatattaagtttttttagtt

SEQ ID NO: 257 - DNA, 6136 bp, Artificial Sequence
  chemically treated genomic DNA (Homo sapiens)
tgttattgtagtagattgagtggaggtttttaaaaagatatgtttaagtttttatatttgtaaatgtgatttatttggaaaaagggtttttgtatatgtaataaatttaagaattttgagatgggattgttaaatcgttttggataggatgagttttgaatttaaagagaggtatttttgtaggaatagggtagagggaaatggggtaggtagaataggagatatagagaagaaagtttgttaagatagaggtagggattagagtgaggtagttataagttaagtaatgattggagttattagaagttggagaatgtaaaggaggatttttttttggagtttttagagggagtacggtattgttaatattttgattttggattttgggttttaagaattgtgagagaataaatttttgttatttgaagttattaaatttgtggtaatttgttatagtagttattggaaataagtatagtttttaaatagtttaaatttggattttgtttgaggttgtttttaattttttttttttttattaagattttgtgtatagtttcggttttatttaaaggttattttaggttgggtgtagtggtttatatttgtaattttagtatttcgggaggtcgaggcgcgcggattatttgaggttaggagttcgagattagtttggttaatatggtaaaattttatttttattaaaagtataaaaattagttgggcgtggtggcgtatatttgtaattttagttattaagaaggttgaggtaggagaatcgtttgaattcgggaggtggaagttgtagtgagttaagattacgttattgtattttagtatgggtgatagaataagattttaatttaaataaaataaaataaaataaaataaaataaaataaaataaaataggttattttagttattgggtagtattttttgtaggcgtgagggttatttgggtttgggatgggtatttatttatttatttagtttgatatatagggataggaatgaattagttttgtttttgttttaggatgtttttaggattgtgagttttagataaattagaatttaaaaagtataagggtttaagggcgggaggagtataggagtttggatagttatttaaaggaattaagattttaattaggtagtttttaagtgtggtagtttttatagtttttattggaatgggtatttttgttaattttttttttatggaatgtttattttttaaagatattgttgattaagttaattgtatgtatttaataatattttatttattttttttatttgttattatttaaagatatgtagtaatgatagttaatatttattgagttatttagtatattaagagtatgatatgtatttatttaatttttatattagttttatgaggtgggtatttttattatttttgttttataaaggagagtagagattaatgaaaatttgtttaagtttgtattattagtatttatttagttggaatttggatttacgaagtttggttttaaagtaggttttggaaattaggttagaatgtaggtttttatattaatgtgtaatgttattttggataagtaattttgtttttttgtgttttagtttttttatttattttttttttttaagatagagttttgttttgttatttaggttcgagtgtagtggtgtgattttggtttattgtaatttttgttttttaggtttaagtaatttttttgttttagtttttcgagtagttgggtttataattatacgttattatggttggttaatttttttgtatttttagtagagatggggttttattatattgattaggttggtgtcgaatttttgattttaggcgattattcgttttagttttttaaagtgttgcgattataggtatgagttatcgtattcggttttttttttatttaattttttatttttattttaatttaatttattgtatttatttatttattttttgagatggtatttttttttcgtcgtataggttggagtgtagtggtttaatttcggtttattgtaatttttattttttaggtttaagttattttttttttttagttttttaattagttgggattataggtgtgtattattatatttatttattttttgtgtttttagtagagataggtttttattatgttggttaggttggttttgaatttttgattttaggtgatttatttgttttagttttttaaagtgttaggattataggtgtgagttattaggtttggtttatttttatttatttattttttttgagatagtgttttattttatcgtttaggttggagtgtagtgatatgattatggtttattgtagttttaattttttaggtttaagtgatttttttattttagttttttgagtatttgggattataggtgtacgttattatagtcggttaatttttttttttttttttgagataggattttgttttgttgtttaggttggagtgtagtggtgtaattttagtttattgtagtttttgttttttaggttgaagtgatttttgtgttttagtttgtcgagtagttgggattataggtatgtattattatattttgttaatttttgtatttttagtagagttgaggttttattatgtttgttaggttggtttcgaatttttgattttaagtgatgtatttattacggttttttaaagtggtgggattataggcgtgagttattatagttagttagttttttcgtttataaaatgggaataatagtatttgtattgaagggttgttgtggagattgaatgggaatgtgtatttagaattttaggtatagtgtttgttataagtatttaaggaatgagttggagtttagttgataatattaggtagtgtttttgggtaatacggaatgaagataatttttttttttaggtttttaaattttttggaatttataacgtttatatgatatgttaggtttagagggggatggtttaaattggagtttgtaggaaggtaatttgattaatttgtttatgggtgttttaaggattataggtacgagaattagttggagttgttggtgaaaatgtagatttcgggttttatttttagattaaagatatttgaattatttggcgatgggtttaggaatttgtattatttaatatattttttaggtgatcgtaaatgttaaaagataaaattataataaatttaaatattttaattggttttatttatgattttagaatcgggtaagattttattttttaaaatagtataagtgttttaatgagttgagtagaggaggttggttttatagatagaaaagggttgaaaaaagtagaaataaagaataaaaagtagattggttattttaaagttattttttttgtaaggtaggaatagggaaatagaataagagagaaataattgattggtcgtatcgggttattttaggttattttttgttgtaaggattaaagtaaagggaattttattatgttgattaaaacggtttgtttgggaaattagggtgtgtattttttttttgattttgtgaaaggttattagtttgatgatgtagaattttagtatgagtgattttattttgatttttagtttagtttgttgagattttaatgttagaattttttttgtttgtttgtttcgtttttgttgtttaggttggagtgtagtggagttattttggtttattgtaatttttgtttttagggtttaagcgatttttttgttttagttttttaagtagttgggattataggtatgcgttattacgttcggttaatttttttttttttttttttttttagtagaaatcgagttttattatgttggttaggttggtttcggatttttgattttaggtgatttatttgcgtcggttttttaaagtgttgggattataggtgtgagttattatatttagttttttttttttaagatagggtttttttttgttatttaaggtggagtgtagtggcgttaaaatagtttattgtagtttttattttttgggtttaggtgatttttttgttttagtttttttagtagttgggttttattatatcggttaattttttaatttttagtagtgacgaggtttgattttgttatttaggttggtttggaatttttggttttaagatattcgtttgtttttgttttttaaagtgttgggattatagatgtaagttatcgcgtttgggtttttatgatttttatttaatataatgtattatggaatttgtgttttgtttagtttagtttgagtaggagttttttgatatttcgggaaatattgaaaattattttatttttatttatttatttttgtagtatttaagtggaaattttgcgttttagatagggatattatttttagagagtagtgggtttttttagtagcgtagtgaaatatgatatttttgagttttatgaaaaaagggtagatatttggttagagttgggaggtaggaaatagagtacggtgttttttttttatattttagtttggattattgaggttggggtttaggttttgtaggaaaggaggtgtatgattattttaaggttatttattttgtgatttaacgggtcgggtcggggttggaatttaatgttttttcgggtttggagagtttacgcgtcgtgggcggggttttcggggtcgtttaggtaataggcgcgcgtcgcgttcgagtttagagttttaaagcggaggagggaacgcgcgttattagatatttcgcggtgttggggttattttttttagtatcgttttcggttttttttcgcggaagtgtttgtcgaaattttcgatcgttgattggtttttttgttttaggggcggagtttttggtaggcgtgatgcgtagtttcggttgtcggttgatatgaagaagtagtagcggttagggcggcggtagttgtaggggtcggggattgtagcgggtttcggggttaagagcgcgacgcggtttagagcggtagacggcgtagtgggtcgagaaggaggcgtagtagtcgttttggttcgttatggagatggaaaaggagttcgagtagatcgataagttcgggagttgggcggttatttattaggtgcgggagcgtttcggagcgtggcgggtttttcgtttaggtcgtttgaatatttttttagatttttaggttttagattttttttgggttttgttttttgtttcgtttttattgtttgaggattcgatgggatagcgacgtattgcgtttttttattttttgttttcggggcgggcgtgtttttcgtcgtagcgtcggagtttttttcgattttttattttttttttgttttttagttcgggtgattttttaagtcgggggatcgtcggtttgtgtttttaacgcgaatttttcgtatttcgatttcgttttttgtttgtttattttttgttttttggggtgatttagtatttttattatttttttttttggagtggattattttagattttttttttttgtttttttgggggaaaaggttatttttttcgttttttttttatatttttttttttttagttttagtgtgcgtcgagttttagagatgatagtttttttttttttttttgtttatttatttattggataggagttggtaagtttattttgtgttaggtatcgtttaggtattggaggtggtgtttgttaattaggataggtaagattttagttttagtggggtttagagtcgaatagggtaattaaatataaaagtaaataattttagatagtgataggtgttgtgaagagaacgattttttaacggggtatagggtgattgtatagaaggtcggttgttttagagaaggggattagggaaggtttgttaaaggaggagatatttgttttgtgagttgaattaagaggagtagaaagtcgtgagaatatggggttaaagaattttttagttaggaggtttgcggtatttattttattggggttatgatattatttttttaggtagggatttaggaaggttaacgttttaattttttttaaaatagtatttttttttaatgagtagtttagtttttggtcgtggtagagatgattttgtttta

SEQ ID NO: 258 - DNA, 6136 bp, Artificial Sequence
  chemically treated genomic DNA (Homo sapiens)
taagataaggttatttttgttacgattaaagattaagttgtttattgaggaaagatgttattttagagagggttaaaacgttaatttttttgagtttttgtttgaaagaataatattatggttttaatggagtgggtatcgtaggttttttggttagaaggttttttagttttatatttttacggttttttgttttttttggtttagtttataaagtaaatgtttttttttttgataggttttttttgatttttttttttaagatagtcggttttttatgtagttattttgtatttcgttaggaagtcgttttttttatagtatttgttattatttgaaattatttgtttttgtgtttgattgttttattcgattttaggttttattaaggttaggattttgtttgttttgattagtaaatattatttttaatgtttaagcggtgtttagtatagaataagtttgttaatttttatttaataaatgaatgaatagaaaggggaaaggggattgttatttttgggattcgacgtatattgagattaggggaaaggaaatgtgaaggagggacggggggagtaatttttttttttagggagataaaggaagagagtttgaggtggtttattttagaaaaggaaatagtgggggtgttaaattattttaggggataaagagtggataggtagggggcggggtcggggtgcgagggattcgcgttgagagtatagatcggcggtttttcggtttgagagattattcgagttggagaatagaagggaggtgggggatcgaagggggtttcgacgttgcggcgagaaatacgttcgtttcggggataaagggtggggggacgtagtgcgtcgttgttttatcgaatttttaagtagtaggagcgaggtagagggtaagatttagagggagtttggggtttggaggtttgaggggatgtttaagcggtttaagcgaagggttcgttacgtttcggggcgttttcgtatttggtaaatggtcgtttagttttcggatttgtcgatttgttcgaattttttttttatttttatgacgggttagggcggttgttgcgtttttttttcggtttattgcgtcgtttgtcgttttaggtcgcgtcgcgtttttagtttcgaggttcgttgtaattttcgatttttgtagttatcgtcgttttagtcgttgttgtttttttatgttaatcggtagtcggaattacgtattacgtttgttaggggtttcgtttttgaagtagaaggattaattagcgatcgagaatttcgataagtattttcgcggggaggagtcgggggcggtgttaggggaagtggttttagtatcgcgagatatttaatagcgcgcgttttttttttcgttttggggttttgggttcgggcgcggcgcgcgtttgttgtttaggcgatttcgggagtttcgtttacggcgcgtgggttttttaggttcgggagggtattgagttttagtttcgattcggttcgttgagttatagagtgagtggttttaaagtagttatgtatttttttttttgtagggtttgggttttagttttagtaatttaagttggagtatgggaggagggtatcgtgttttattttttgttttttagttttggttagatgtttgttttttttttatgaaatttaggagtattatgttttattacgttgttggggaagtttattgttttttaagggtagtgtttttgtttgaaacgtagaatttttatttgggtgttgtaggaatgaatggatggggatggaatgatttttagtgtttttcgaagtattaaggaatttttgtttagattgaattaagtagagtataaattttatggtgtattatgttaaataaaaattataggagtttaggcgcggtggtttatatttgtaattttagtattttgggaggtagaggtaggcggatgttttgaggttaggagttttagattagtttgggtaatagaattagatttcgttattattaaaagttaaaaaattagtcggtgtggtggggtttagttgttggggaggttgaggtaggaagattatttgagtttaggaggtggaagttgtagtgagttgttttggcgttattgtattttattttgggtggtagagagagattttgttttgaaaaaaaagggttgggtgtggtggtttatatttgtaattttagtattttgggagatcgacgtaggtggattatttgaggttaagagttcgagattagtttgattaatatggtgaaattcggtttttgttaaaaaaaaaaaaaaaaaaaaaaattagtcgggcgtggtggcgtatgtttgtaattttagttatttgggaggttgaggtaggagaatcgtttgaattttggaggtagaggttgtagtgagttaagatagttttattgtattttagtttgggtaataagagcgaaataaataaataaaaaaagttttggtattagggttttaatagattagattaaaaattaaaatggagttatttatgttaaagttttatattattagattgataattttttataaaattagaagagagatatatattttgattttttaagtagatcgttttaattaatataatgaagttttttttgttttaatttttataataaaaagtaatttgaagtaattcgatgcgattaattagttattttttttttgttttgtttttttgtttttgttttataaggaaagtaattttgaaatgattaatttgttttttgttttttgtttttgttttttttagtttttttttgtttataaaattaattttttttgtttagtttattgggatatttgtgttattttgaggaatgaagttttgttcgattttagaattatgaatgaagttaattaagatgtttaagtttgttgtaattttgttttttgatatttacggttatttgggaagtgtgttgaataatgtaggtttttggatttatcgttaaatgatttagatatttttggtttagggatgagattcggaatttgtatttttattaataattttagttgattttcgtatttatgatttttaaagtatttatgagtaggttggttaggttgtttttttgtaggttttagtttaaattatttttttttgggtttggtatgttatgtggacgttgtgaattttaggaggtttgaaaatttggaagagagaattgtttttatttcgtgttgtttagagatattgtttggtattattagttgaattttagtttattttttgagtgtttgtggtaggtattatgtttggaattttaagtatatatttttatttaatttttataataattttttaatataggtgttattatttttattttataaacgagaaaattgattggttgtggtggtttacgtttgtaattttattattttgggaggtcgtggtgggtgtattatttgaggttaggaattcgagattagtttgataagtatggtgaaattttaattttattaaaaatataaaaattagtagggtgtggtggtgtatgtttgtaattttagttattcggtaggttgaggtataagaattattttaatttgggaggtagaggttgtagtgagttgagattgtattattgtattttagtttgggtaatagagtaagattttgttttaaaaaaaaaaaaaaaaattagtcggttgtggtggcgtgtatttgtagttttaggtatttaggaggttgagatgggagaattatttgagtttgggagattgaggttgtagtgagttatgattatgttattgtattttagtttggacgatagagtgagatattgttttaaaaaaaataaataaataaaaataggttaggtttggtggtttatatttgtaattttagtattttgggaggttgaggtaggtggattatttaaggttaggagtttaagattagtttggttaatatggtgaaagtttgtttttattaaaaatatagaaaatagatgggtgtggtggtgtatatttgtaattttagttaattgggaggttgaggaaggagaatggtttgaatttgggaagtggaggttgtagtgagtcgagattgaattattgtattttagtttgtgcgacgggagaaagatgttattttaaaaaataaataaataaatataataaattaaattaaaataaaaataaaaaattagatgagggggggatcgggtgcggtgatttatgtttgtaatcgtagtattttgggaggttaaggcgggtgatcgtttgaggttaggagttcgatattagtttgattaatatggtgaaattttatttttattaaaaatataaaaaaattagttagttatggtggcgtgtgattgtagatttagttattcgggaggttgagataggagaattgtttgaatttgggaggtagaggttgtagtgagttaagattatattattgtattcgggtttgggtgatagagtaagattttgttttaaaaaaaaaaaatggatgaggaaattgaagtatagagagataaaattatttgtttagagtagtattgtatattggtatggaaatttgtattttagtttggtttttagagtttgttttggagttaggtttcgtgggtttaggttttagttgaataaatattagtggtgtaaatttgggtaaatttttattagtttttgtttttttttgtaaaatagagataataaaagtgtttattttatagggttgatgtgaaggttggatgagtatatattatgtttttagtatattgagtggtttaataaatattaattgttattattatatatttttaaataatagtaaataaaggagataaatgaaatgttattgaatatatgtaattagtttgattagtagtgtttttagaaagtgagtattttataggggaaaaattaataaaaatgtttattttagtgaaaattgtgggagttgttatatttggaagttatttaattgaagttttagtttttttaagtgattgtttagatttttgtgtttttttcgtttttaaatttttatattttttgggttttggtttgtttggaatttataattttgagagtattttggaataaaaatagggttggtttatttttgtttttgtatgttaagttaagtaagtaaataaatgtttattttaagtttaagtggtttttacgtttgtagggggtgttgtttagtgattggagtagtttgttttgttttgttttgttttgttttgttttgttttgttttgtttgagttagagttttgttttgttatttatgttggagtgtaatggcgtgattttggtttattgtaatttttatttttcggatttaagcgatttttttgttttagtttttttagtagttgaggttataggtgtgcgttattacgtttagttgatttttgtatttttagtagagatggggttttgttatgttggttaggttgatttcgaatttttgattttaggtgattcgcgcgtttcggtttttcgaagtgttgggattataggtatgagttattgtatttagtttggagtagtttttgaatggggtcgaagttatatatagggttttggtgggggagaggggagttggaggtagttttaagtagggtttaagtttgggttgtttagaggttgtatttgtttttagtggttgttgtaataaattattataaatttggtggttttaagtaatagaaatttatttttttatagtttttgaggtttaaagtttaaaattaaggtgttgatagtgtcgtgttttttttgaaggttttaggggagggtttttttttgtattttttagtttttggtagttttagttattatttggtttgtggttgttttattttgatttttgtttttgttttggtagatttttttttttgtattttttgttttgtttgttttatttttttttgttttgtttttataaggatgtttttttttggatttagggtttattttatttagaacgatttggtaattttattttaagatttttaaatttattatatgtgtaaagattttttttttaaataggttatatttataggtatggggatttggatatatttttttggaggtttttatttaatttattatagtggta

SEQ ID NO: 259 - DNA, 6025 bp, Artificial Sequence
  chemically treated genomic DNA (Homo sapiens)
tttataagttaattgtgttcgatttagagagaaagttatcgtaataagatgataagtttgatgtgttattttaatatacgtgaacgtagattagatttagtatagtaaaggtcgggttatttttagataagttacgtagatgtaattattttatgaggtatattgagatatagacgagattgtttttttagtatgattagtatatatagattataggaaaagatgatagacgatattttgaagaataatttgtttgatatttgggtgatgtgattcggtatacgatcggtagtgtggagtaattaattgattataattgagtgtttttatagagggagatttggtagggttatagaataatagtggaggtaaggttagtagataagtaagtgtataaaggtttttggtttttataggtagaggattttacgattttttatagcgattgtgtttttgggtgtttgagattagggagtggtgatgattattaatgagtatgttgtttttaagtatttgtttaataaagtatattttgtatcgttttttatttatttaattatgagtggatatagtatatgttttagagagtatagggttgggggtaaggttatagattaataggattttaaggtagaagaattttttttagtatagaataaaatgaaaagttttttatgtttatttttatatagatacggtaattattcgattttttaattttttttttattttttttttttttttattttataaagtcgttattgttattttggtcgtttttaatgagttgttgggtatattttttagacggggtggtggtcgggtagaggggttttttattttttagtaggggcggtcgggtagaggcgttttttatttttcggaagggacggttggtcgggcggggggtcgatttttttattttttattcggacggggcggttggttaggtagaggggttttttattttttagtaggggcggtcgggtagaggcgttttttatttttcggacgggacggttggtcgggcggggggttgatttttttatttttttttcggacggggcggttggtcgggtagggggttgatttttttatttttttttcggattgggcggttggtcgggcggggggttgattttttttatttttttttcggattgggcggttggtcgggcggggggttgatttttttatttttttttcggacggggcggttggtcgggtagagggattttttattttttagtaggggcggtcgggtagaggcgttttttattttttggacggggcggttggcgggcggggggttgatttttttattttttttcggacggggcgattggttcgggcgggggtttgatttttttattttttttcggacggggcgattggtttggacggttgatttttttatttttttttcggacggggcggttggtttggcggggggttgattttttttattttttttcgggatagggtggttgttaggcggagacgttttttattttttagacggggtggttgtcgggcggagggtttttttattttttagacggggtagtcgggtagagacgttttttattttttagacggggtggtagtcgggtaggggcgttttttatattttagacggggcggcggggtagaggcgttttttatattttagacgatgggcggtcgggtagagacgttttttattttttagatgtgatggcggtcggaagaggcgttttttattttttagatgggatggcggtcgggtagagaggttttttattttttagatgtgatggcggttaggtagagacgttttttattttttagacggggtggcggtcgggtagaggttgtaatttcggtattttgggaggttaaggtaggcggttggaaggtggaggttgtagcgagtcgagattacgttattgtattttagtttgggtattattgagtattgagtgaattagatttcgtttgtaatttcggtatttcgggaggtcgaggttggcggattattcgcggttaggagttggagattagttcggttaatatagcgaaatttcgtttttattaaaaaaatacgaaaattagttaggcgtggcggcgcgcgtttgtaattgtaggtatttcgtaggcggaggtaggagaattaggtagggaggtttttttttttttttagagatagagtttcgtttttgttgtttaggttggagtgtaatggcgtgatttcgtttaatgtaattttcgttttttgggtttaagtaatttttttgttttagttttttgattagttgggattataggtatgcgttattacgttcggttaattttttgtatttttagtaaagacggggttggttttattatattggttaggttggttttgaatttttgattttaggtgattcgttcgtttcggttttttaaagggttgggattataggtgtgaattatcgcgtttggtttttttatttttattttttgagatagattttcgtttttttatttaggttggagtgtggtggtacgatttcggtttattgtaattttcgttttttaggtttaggcgatttttttgttttagtttttggagtatttgggattataggcgtgtattattatattcggttttgtatttttagtagagatagggttttattatatcggttaggttggtttcgaatttttgattttaagtgatttatttaattcggtttttcgaagtgttaggattataggtgtgagttattgtatttggtttgaagtgtatatttttggagtggatgtattagttggattattttaatagaaatatttttttttttttgaagaagtaaataaattatattttgttatatttattttttttttttttttttttttttgagatagggttttattttcgtcgtttaggttggggtgtaatggtgtgattatagtttattgtaattttcgtttttcgggtttaggtgatttttttatttcggttttttaaagtgttgggattataggcgtgagttatcgcgttcggtttatatttattttttttaatgagttttttattaaattttatagtgtttttaatttttatttgagaaagtattttattattgatattttttattataattaaattcgttgattaatttgttttgtaaaaaaaggtttgtgggtataaatgacgaaagttagtttatggattaaattttttagttttgttatattgtgagaggttattgttgtgaaagtaaaataatttttagttacggttttgttaagaatacgttgggggatgttaggaagtcgttttatttgtaaaatgatgagttagattagaatatattttttgatagaagtttataaagatgaataaagatttataggttaggcgcggtggtttacgtttaaaattttaatattttcggaagttgaggatttttagtgtataggaattcgagattagtttgggtaatttggtgagatttttttttttattaaaaataaataaataaataaataataaatttttaaaatgtattagttgggtttggtgacgtagtgaggtaggaggatgttttgagtttaggagtttaaggttgtagcgagtcgtgattatagtattgtattttggtatgggagatagagtaagattttagttttaaaaaaaaaaaaaaaaaaaaattaatagatttataaagtttattttatggaggaaagttttttatttagttatgaattgttgcgaatttaaaggtaggaaggtaaattttttttagttcggtaaatacgaagattttatattcgcgtcgtttgtgaagaaggtatttcgaattttaggcgtttattcgttaggtttaagaggatgagtaaagaataaaagtttttttatttaggaagcgtttcgttttttttagttggagttacgttttaaggtgttaaagtttaattgttgtttatttttattaattcgttagtaagatgagtatttatttgttgcgaacgtggcggtgatattattatagtttttagtttgtttttcgttcgtttttatttttggattttatagatcgtgatttgtagttttagtttacggttggcggcggtgcgggatttttgaaaattgttttttttttttagtaggcggtgagatcgtaaattttattagaattttattttgatttattagggtttggttcgtttagagtcgtatttttttttttaaatgaattaattttttttttagcgatatttcgatttttgagtatttcgggcggggttacgtttcggaaatggagttaggtttttaggtcgttcgttgaagtgttttttagttattttaagcggggttggggtcggcggggcgggtttgggggcgtggtcgggaggcgggcggggatgtatttgcgggcgtagcgtttggggcggagtcgtagcgcgaggtcgcgtatttgggtggcggcggggacgcgttcgtggggagaggcggttgcggttgcggttgcggttgttggcggggggtgggggggaggaggaatcgggaagggggggtagggcgagcggagagttagttgtgtttttgaggcggcggcggcggcggcggcggcggcggcgttttcgacggaggaggagggcggggaaggaggatggagtaagttgggggttggggttggcgttagcgtagcggttcgtttggtattgtgggagagcggcggttgtttttggaagttgtggtgtcgggagtttagtcggtgtcgtcgtagtcgtcgtttagggcggtggggaggaggagggagtcgcggggtttggcggggtcgggagggagggacgtgttgggggaacgagttggggaagacggagcgggttttgtgtcgggcgggcgggcggcgggggggttagcgatcgtagtcggggggacgcgggaggatggagtaagtggagattttgaggaaatttatttagagggtttaggttatgaagagttttgattataatggggaggataatttcgttcgggattttatggtgagttttttttttcgttgtcgcgtttttttgtcggcgtcggagtttatcgtcgtttttttcggtcgggtcgttagtgttttgtgtatttttgtgaggagaggggcggagggggcgcgtattagtcgggtgagtcgggtggtttcggaggttagcgggaggcgagagcgttttttttcgtggttttttttttttttttatgttcgcgattttcgcgcgggttttcgggacgcgaagggagcggtcgcgcggtcgagttcgtagtttgtatcgtggttcgcgattatttattgtttatcgggtcgggagtcgtaggtaagtgaggtgtaggtcgggggggggggttcgcgtttttatattttttcgcgtagttcgttttttttaggagggtcgaggtaaggtatttggttgtgatcgggaggagtgtagatcgtggttgatagaggaacgggggtattgaggttggtattaatttttgggatttttttgttttagttggttttaaagcgggtagggtaggatttaggtcgtttttggggtcgtagttatgatttttaacgtttgggaaaggattgtttataaggaattttatgggtttatttaatttttatttattcgcgtttcgtttttttttttttgaggtttaggtttgaggtggttttggggttcgtgtgattataggtttaggggataagtgtgggtgggggaattattttgaaggaagttagtcgatttcggattttttaggggatattgtcgaaggcggaggggatgtgattattattttttattcggggtgggggtggggaatttgggaataatagttttggtggggcggaggcgacgttacgggtcgaagttttgaattgggagataatttttttagcgttttttcgttttcgttattttttatttttcgttttttgtttgtgtaggtagttttgagaggaggtgaaggttaaaagttttgtttatgaaattgttttagatatattattgt

SEQ ID NO: 260 - DNA, 6025 bp, Artificial Sequence
  chemically treated genomic DNA (Homo sapiens)
gtaatagtgtatttagagtaattttatgaataagatttttaatttttatttttttttaagattgtttgtataagtagagggcggaaagtagggggtggcggaggcgggggggcgttgggaaggttattttttagtttagggtttcggttcgtagcgtcgttttcgttttattaggattattgtttttaagttttttatttttatttcggataggaagtgatagttatatttttttcgttttcggtaatattttttggggagttcgaagtcggttggttttttttaggataatttttttatttatatttattttttgaatttatagttatacggattttaagattattttaaatttgggttttaggagaggagaagcgggacgcgggtaaatggaaattaggtaaatttatgagattttttatgggtaatttttttttaagcgttggagattatgattgcgattttagaaacggtttaagttttattttgttcgttttgagattagttagagtaaagggattttaggagttagtgttaattttaatattttcgtttttttgttagttacgatttgtatttttttcggttatagttagatattttgtttcgatttttttgggaggagcgaattgcgcggggaggtgtggaaacgcgagttttttttttcggtttgtattttatttgtttacggttttcggttcggtaaataataggtggtcgcgagttacggtgtaggttgcgggttcggtcgcgcggtcgtttttttcgcgtttcgggaattcgcgcgggggtcgcgaatatgggagaagaaaggaggttacggggggaggcgttttcgtttttcgttggttttcgagattattcggtttattcggttggtgcgcgtttttttcgtttttttttttatagaggtatataaagtattggcggttcggtcgggagaggcggcgatgggtttcggcgtcggtaagaaaacgcgatagcgaggggagagatttattatgaagtttcgggcgaagttgttttttttattgtggttaggattttttatggtttggattttttggatgaatttttttaggatttttatttgttttattttttcgcgttttttcggttgcggtcgttggttttttcgtcgttcgttcgttcggtatagagttcgtttcgttttttttagttcgtttttttagtacgtttttttttttcgatttcgttaagtttcgcggttttttttttttttttatcgttttaggcggcggttgcggcggtatcggttgggttttcgatattataatttttaggagtagtcgtcgtttttttatagtattaggcgagtcgttgcgttagcgttaattttaatttttagtttgttttatttttttttttcgtttttttttttcgtcggagacgtcgtcgtcgtcgtcgtcgtcgtcgtcgttttaggaatatagttagtttttcgttcgttttgtttttttttttcggtttttttttttttttatttttcgttagtagtcgtagtcgtagtcgtagtcgtttttttttacgggcgcgttttcgtcgttatttagatgcgcggtttcgcgttgcggtttcgttttaagcgttgcgttcgtagatgtattttcgttcgtttttcggttacgtttttaagttcgtttcgtcggttttagtttcgtttggagtggttggaaggtattttagcgggcggtttggagatttgattttattttcggggcgtggtttcgttcggggtgtttagaggtcggagtatcgttgggaggagagttggtttatttggaggagggaatgcgattttgagcgggttaagttttagtgggttagagtaggattttgatggaatttgcggttttatcgtttattagggaggaaaagtagtttttaggagtttcgtatcgtcgttagtcgtgggttgggattataagttacggtttgtggagtttaggagtgggggcgggcgggaggtaggttgggagttgtagtagtgttatcgttacgttcgtagtaggtagatgtttattttgttaacggattggtgagagtggatagtaattaggttttggtattttggagcgtggttttagttaagggaagcgaaacgttttttgggtgagaggatttttattttttgtttatttttttaaatttggcgagtgagcgtttgaggttcggagtgttttttttatagacgacgcgaatgtggggttttcgtgtttgtcgaattgaagggaatttgtttttttgtttttaggttcgtagtagtttataattgaataagagatttttttttatagaatggattttataaatttattaatttttttttttttttttttttagagttaaggttttgttttattttttatgttaaagtgtagtgttatgattacggttcgttgtagttttgaatttttgggtttaaggtatttttttgttttattacgttattaagtttagttaatatattttaaaaatttattatttatttatttatttatttttggtagagaagggggttttattaggttgtttaggttgatttcgaatttttgtgtattagggatttttagttttcgaaagtgttgggattttaggcgtgagttatcgcgtttagtttataaatttttatttatttttgtaaatttttattagagaatatattttggtttaatttattattttataaataaagcgattttttgatattttttagcgtatttttagtagagtcgtaattagaagttattttatttttataatagtggttttttataatgtgatagaattgaaggatttgatttatgaattgattttcgttatttatatttataaatttttttttatagagtagattggttagcgaatttggttataataggaaatattagtggtagaatatttttttagatgaaagttaggagtattatggaatttagtgaaaaatttattgaagaaaataggtgtaggtcgggcgcggtggtttacgtttgtaattttagtattttgggaggtcgagatgggaggattatttgaattcgggaggcggaggttgtagtgagttgtgattatattattgtattttaatttgggcgacgggagtgaggttttgttttaaaaaaaaaaaaaagaaaagaaaataggtgtaataggatatagtttatttatttttttaaaaaaaggaaaatatttttgttaaaataatttaattaatatatttattttagaaatatgtattttagattaggtgtagtggtttatatttgtaattttagtatttcgggaggtcgagttgggtggattatttgaggttaggagttcgagattaatttggtcgatatggtgaaattttgtttttgttaaaaatataaagtcgggtgtggtggtgtacgtttgtagttttaggtattttagaggttgaggtagaagaatcgtttgaatttgagaggcggagattgtagtgagtcgaggtcgtgttattatattttagtttgggtgaaagagcgagagtttgttttaaaaaataaaaataaaaaggttaggcgcgatggtttatatttgtaattttaattttttgggaggtcgaggcgggcggattatttgaggttaggagtttaagattagtttggttaatatggtgaaattaatttcgtttttattaaaaatataaaaaattagtcgggcgtggtgacgtatgtttgtaattttagttagttaggaggttgaggtaggagaattgtttgaatttaggaggcggaggttgtattgagcgagattacgttattgtattttagtttgggtaataagagcgaaattttgtttttaaaaaaaaaaaagagtttttttgtttgatttttttgttttcgtttgcggagtgtttgtaattgtaggcgcgcgtcgttacgtttgattggttttcgtatttttttggtggaaacggggtttcgttgtgttggtcgggttggtttttagtttttaatcgcgagtgattcgttagtttcggtttttcgaggtgtcgggattgtagacggagtttggtttatttagtgtttaatggtgtttaggttggagtgtagtggcgtgatttcggttcgttataatttttattttttagtcgtttgttttggttttttaaagtgtcgagattgtagtttttgttcggtcgttatttcgtttgggaagtgaggagcgtttttgtttggtcgttattatatttaggaagtgaggagtttttttgttcggtcgttattttatttgggaagtgaggagcgtttttttcggtcgttattatatttaggaagtgaggagcgtttttgttcggtcgtttatcgtttgggatgtggggagcgtttttgtttcgtcgtttcgtttgggatgtgaggagcgtttttgttcggttgttatttcgtttgggaggtgaggagcgtttttgttcggttgtttcgtttgagaagtgaggagatttttcgttcggtagttatttcgtttgggaagtgaggagcgttttcgtttggtagttattttgtttcggagggaggtggggggggttagtttttcgttaggttagtcgtttcgttcgggagggaggtgggggggttagtcgtttaggttagtcgtttcgttcggagggaggtgggggggttagattttcgttcgggttagtcgtttcgttcggagggaggtgggggggttagtttttcgttcgttagtcgtttcgtttaggaggtgaggggcgtttttgttcggtcgtttttattgggaagtgaggagtttttttgttcggttagtcgtttcgttcgggagggaggtgggggggttagtttttcgttcggttagtcgtttagttcgggagggaggtggggggggttagtttttcgttcggttagtcgtttagttcgggagggaggtgggggggttagttttttgttcggttagtcgtttcgttcgggagggaggtgggggggttagtttttcgttcggttagtcgtttcgttcgggaggtgaggggcgtttttgttcggtcgtttttattgggaggtggggagtttttttgtttggttagtcgtttcgttcgggtgggaggtgggggggtcggtttttcgttcggttagtcgtttttttcgggaggtgaggggcgtttttgttcggtcgtttttattgggaagtgaggagtttttttgttcggttattatttcgtttgggaggtgtgtttagtagtttattgagaacggttaggatgataatggcggttttgtggaatagaaaggggggaaaggtggggaaaagattgagaagtcggatggttgtcgtgtttgtgtagaagtagatatgggagattttttattttgttttgtattaagaaaaatttttttgttttgggattttgttgatttgtgattttatttttaattttgtgttttttgaaatatgtgttgtgtttatttatagttaaatggatgaagggcggtgtaagatgtgttttgttaaatagatgtttgaaggtagtatgtttattaatagttattattattttttaattttaagtatttagggatataatcgttgtggaaggtcgtagggttttttgtttatgaaaattagagatttttgtatatttgtttatttgttgattttgtttttattattgttttatgattttgttaaatttttttttgtgaaaatatttaattatgattaattaattattttatattatcgatcgtatatcgggttatattatttagatattagataaattgttttttaagatatcgtttattatttttttttatgatttatatatgttggttatgttaagagaatagtttcgtttgtattttaatatgttttatagaatagttatatttacgtaatttatttgaaaatggttcgatttttattatattagatttgatttgcgtttacgtatgttagaatagtatattaggtttgttattttattgcgatgattttttttttagatcggatataattaatttgtgaa

SEQ ID NO: 261 - DNA, 6129 bp, Artificial Sequence
  chemically treated genomic DNA (Homo sapiens)
atatggaatatttttaggatttttgaagatttttttatgtttttttttaggtaatatttttattttattagaggtagtttttagttgtttttagaggtaattattattttgttgtttatttttgaattttatataaaatggaaatatatagttatgtttttttggatgtagtattatttattgaagatatattattttaagtttttgtgaaatatatatatataaagatatatatcggatgattatatgtgtgaatttgtttttggattttgtttagttttattggttagtttgttttggttagtttgtttttttttgcgtcgatattatatatttttataagagattttgatatttggagggataatgttttttagatttgttttttttggttatttttggtttttgagtttttttttagattttattttgttttatttttttatttgtttatttttatattaagaatacgttgttttaattatcgtagttttagagtaaattttattatttggtgaggtaaaatttttattttttttttttttaagattattttggttatttttggttttttgtatttttatttgtaaatggtagtattagtttgttaatttttattataaaaatatggtgagattttgattgagattgtattgaatttatatatgattttgagaagtattggtaattttataatattaaagtttttaagatattatatcgtatatttttttatttatttagttttttttttatttttttgagtgatatgttgtggtttttagattagaggttttgttaattttttgttaagaatttttcggaatagtttatattttaatgtttaaaaattttttagttgttgttgttatgtagaaatataattgttttttttgtcgggcgtagtggtttatatttgtaattttagtattttgggaggttaaggtgggcggattacgaggttaggagattaagattatattggttaatacggtgaaattttatttttattaaaaaattagttaggcgtggtggcgggtatttgtatttttaattatttgggaggttgaggcgggagaatggcgtgaatttaggaggtagaggttgtaatgagttgagattgtatcgttgtattttagtttgggcgatagagtgattttattaaaaaaaaaaaaaaaaatataattgtttttttttatattgattttgtttttaaagatatttttaaatttaatttttttttttaatttttttatttttagagatggagttttattatgttatttaggttggtttttaattattggttttaagtgatttttttattttgattttttaaagtgttcggattataggtgtgagttattgtatttagtttaaatttatttattaatttaatagttgatttgtagattattttggattttttatgtgtataatatattggttataatattaattttgttttattttttttaattattatattattttttaattttttttatttgttgttataattatatagtatagaatagaagtgatgatagtggttatttttattttgtgtttaagtttaagtgcgggtgtaattatttagaaaattgtttagtagtgtatgatgaatatatagatatattgtaatttagtaattttatttttagatatatgtttataagaaatgagtgtatgtttattaaaagataaggataaatatgtttttaatggttttttttatgagaaggttaaattggaaataattaaatttagaataaataaatggtagtagatttaaataattatatgttatttagtagtaagaatgaataaattatttttataacgtggatgatttttattaatttgagtaaaagtagttagatattaaaaagtatatattatataattaaataaagtttaaaaaaggtaaaattaatttacggtgttagagggtttggggttggttatttaagggggaggatttaggatggcgttttaggggttttttggaggagagataaattttttgtttttggtttgagtattgatagatagttatgtttattttgtaaaaattttttgagttatgtatttgtgatttgtgtgtatttttgtgtatattttaattaaaagtttattaaaaattatatatatttaattgaagtttatttttattgtaatttgtataatttgaatttgtataataaatgtttgtttagttttataaatgtatagtttttgtagatattaggtttttaggttgtattttgatatgtttgtgtttttgaagttttagttataagggtagtttgtttgtgttgttataatgaaatagttgtaattgtgttatttgtaaataatagaaatttattttttatagttttgaaggttgagaagtttaaggttaaggtattagtaggtttggtgtttgttgaaggtttattttttatggtgttatttaggggtttttatatggtaggatagaagggtaaaaacggtttaagttaattttttttagtttttttatgaggtattaattaaatttatgagagtagaatttttataatttaattatttttttaaatgttaattttttaatattgttattatgaggataaagttttaacgtgaattttggaggggatattattatttaaattataggaggggttatgggtagtaagtagagttttttttgaaaggggtataaattatatattgaggggagagagttttttaaatagtatattaaagtgtagaaggtaggttttgttttagtgaaagaagggattttaaattttcgttatgttttattttttttggtttagagtagtggtttttaaatagggattgaaggggttaaggagtaagttgaagatattgttatgaatttaaatatgtaatttattaagtattatttgtaaaatgagtattttatatatatatgtattattatttaaaaatatattttgttatttaattttataatttttttaaatgaatttgtaattttttaaattaatagattttgtttattatatatttttttaaatatataaatagtatgtatataaaagtatgtttattattaaaggattttgaataatttgggggtaatagggaagtttgatattttaaaattttgagaatttttgattttgattttaaaaggggtaaaagtttatatttggggttttttagaaatagtaagttaggaattagttgggttgggagttatatatgtcggagagattaagttatattttgttagtaggatatttcgaagtaagttaatttttgttttttttttattttcgggttttagtgtagttttgtataggtatttttttggagtaattatttttaaattttgggggggtataggtatttttaggagagtttgtttaagtagttttttggggttttaatattagagattttgatttagtagtttggggtgaggtttttaaatttgtattttaaagaagtttatattggatgtaaatgatgttggtgtgagaattattgttttagatttttcgttgtatttagtaaattaagataggtaaatatagttttcggaattagagaggttgataaatgaattttaaagagatgttgaatatttggcgataagaattgttgttttgagataaagatgttttttttttgtagaatatagtattttttggttggaaagtaatttgatgagtagattaatgcgaatatttataggatattttgggagatattatgtttttaattaaaataattagatttaatgatagaattttagaattaaggattattagatattgtggggtttttcgggggaagtttttttgtatttttaaattatattatgtaagtagaaagtttgttgattgtttttttgttaatacgattttttttagttttcgtagttaatttttttttttttttttttggttagggtttttattattttatgtgattaaggatatttttttgttttaagtattgtaattttttcggtcggttttgtttaaaagaattgttttcgatgatagaaacgttttatatatgtattttgttatatagtagttattagttatatatggttatggtatatttgaaatgtggttggtgttattgaggaattaagttaatatttaaaatttaaattttaatattggatagtacggttaaattttttttaattttttacgttttttatgaagattatatagtaggatattataagtattaaaaaagaattattttaaatttgaagtaagatgatttttttaattagtacgtttgtttggtaaaagaggacgtgttattttttatagttaaatttaattcgtaagttgtagaacgtttttttaataaggtattttttttttaaatttcgggagaggttggttgtttttttttttgttttagcggtttatttggtataaaatttgtaggtttataggagttgatattagggtagaaaagaatgaggaatttgtttttaagttggttataggtcgttaatttgatttagatgatgtttaaaataatatttaaatatagtattttaaaaaattatgaaggttgagaagaaaacgagaaatgggaagtaagaaggaaggcggagcgtgtcggcgattttttaggggatttttttagggagttttattttagtaatttcgcgttatttacggattatcgttttttttttgtcggaagacgtaagtttaaggggcggtttatttcgtgtcgcgcgtagggattacggtcgtcgggtggttttttggtttcgtttttttttatttgggtatttcgagtttcgtttttcgagcgtttcgtttcgtttcgtcgtcgatttcgcgtcgcgttcgggcgtcgagtttgcgcgttgacgttcgacgttttaggtattttttttacggtcgatagggtttggcgtgggggcggggcgcggcgcgtagcgcgtatgcgtcgtagcgttagcgtttttttcggatcgtgcggggtttgagttttttcgtcggcgtaggttttgttcgcgttagttcgttttcgtagttatgtttattattatcgagcgggagttcgaagagttggatatttagcgtcgttggtagtcgttgtatttggtgagtcgcggatttacgcggtagtcgtcgatttttttcgagattcggattcgtgttttgttcgtagggtttttttcgtttttttcgtttttcgtttttagtttttcgttcggggcggaagtggcggcgcggttcgcgttaggggcgcgtttgcgttgatcgtttttttgttttttttggtttaaaaaaaaaaaaaaaaaaagtatatttgagttgagtagtttatggttagcgtaagcgtagttagttttggagggcggtgttatagcggttttttggggagcgcgtggatgcgttattagcgttgcgcggttcgggtttgggggtttttgggaaagtcgtgggggcgttcgggcgcgcgttttcgggtcgtagtttcgtcgtagtttttacgtcgttgtgtttggtttttgttcgcggatagttttttttttggtcgggtgttttgtggtcgggtgggtagttggcgttttcgggagcggtgagggcgggggcgggcgagtcgggtcgcggcgttcgggtttagttggcgttcgcgtaggatttgtgggagtaggtcgttttgggcgtcgggtcggtcgtcgtagttttttgcgaggcgaagttcgtttttttggcggagtcgcggtggttgggggtggttcgtggtttttggcgagggtagcgttttcgggatttttcgtttttattttttttcgtggtttagtagcgtttagcgtgggttcggtttttatagaattttttcggaacgaaagaggttttgtttgtgttcgtttagtgatagcgtgttattttttttatagttttttttattgaggtatattttttttatagtgaaacgtagtttttatgtgtgtttttagacgggtgttataaatgaatttttttttgtaagtttttttaaattaaaatagtttttttttgttttgagaaagtgtttttatttttttttcgggggtacggtgtttcgatgtttatcgttttaatcgtgtttgtttag

SEQ ID NO: 262 - DNA, 6129 bp, Artificial Sequence
  chemically treated genomic DNA (Homo sapiens)
ttgaataggtacgattagggcgataggtatcggaatatcgtgttttcggggaggggatgagggtatttttttagggtaaggaaaggttattttgatttgagggggtttgtaagaggggatttatttgtgatattcgtttgggagtatatatgaaagttgcgttttattgtagggaaagtatattttagtaaggaaaattataaagagaatgatacgttattattggacgaatataagtaaagtttttttcgtttcgggaaggttttatgggggtcgaatttacgttgggcgttgttgggttacgggggaaaatgaagacggagggtttcgagagcgttgttttcgttagaggttacgagttatttttaattatcgcggtttcgttaggagagcgagtttcgtttcgtagagggttgcggcggtcggttcggcgtttagagcggtttgtttttataggttttgcgcgggcgttagttggattcggacgtcgcggttcggttcgttcgttttcgtttttatcgttttcggggacgttagttgtttattcggttataaaatattcggttagagaaagagttgttcgcgagtaagaattaagtatagcggcgtgggagttacggcgaagttgcggttcgggggcgcgcgttcgagcgtttttacggtttttttaaggatttttagattcgggtcgcgtaacgttggtggcgtatttacgcgttttttaagaagtcgttgtggtatcgttttttagaattaattgcgtttgcgttaattatgagttgtttagtttaagtatgttttttttttttttttttttaaattaaaaggagtaagagagcggttagcgtaggcgcgtttttgacgcggatcgcgtcgttattttcgtttcgagcgagaggttagaggcgagaggcgggggaggcgggagggattttgcggatagggtacgagttcgggtttcggaggaggtcggcgattgtcgcgtgggttcgcgatttattaagtatagcggttgttagcgacgttgagtatttaatttttcgaattttcgttcgatggtggtgggtatggttgcgggagcgagttggcgcgagtagagtttgcgtcggcggagaggtttaggtttcgtacgattcggggagagcgttggcgttgcggcgtatgcgcgttgcgcgtcgcgtttcgtttttacgttaagttttgtcggtcgtggggaaagtatttggagcgtcggacgttagcgcgtagattcggcgttcgagcgcggcgcgaagtcggcggcggggcggggcggggcgttcggggggcggggttcggggtgtttaggtgggagggggcggggttaggggattattcggcggtcgtggtttttgcgcgcggtacgaggtgagtcgttttttgggtttgcgtttttcgataagagagaggcggtggttcgtgggtagcgcggggttattggaatgggattttttgaggaagttttttgagaagtcgtcggtacgtttcgtttttttttttgttttttatttttcgttttttttttagtttttatagttttttaaagtgttgtatttgaatattattttaaatattatttaggttagattagcggtttgtgattaatttggaaataaattttttatttttttttgttttggtgttagtttttgtaagtttgtagattttatgttaaataaatcgttggagtaaaaggaaaggtagttagtttttttcggaatttgggagagggatattttgttaagaaaacgttttataatttacgaattagatttaattgtaaaaaatagtacgtttttttttattaaataaacgtattagttagggaaattattttgttttagatttaagatagtttttttttagtgtttgtaatattttgttatataatttttataagaaacgtgaagggttaggaaaggtttagtcgtgttgtttagtattgggatttaaattttaaatattaatttaattttttagtggtattagttatattttaggtgtgttataattatgtatggttagtggttgttatgtggtaaagtatatatgtagaacgtttttattatcgaagatagtttttttggatagagtcggtcgagaggattataatatttggggtagaaaagtgtttttaattatataaaataatgaaaattttagttagaaaaaaaaaaaaaaaagttggttacggaagttagaagaaatcgtattaataaaaaagtagttagtaagttttttatttatatagtatgatttagagatataggaaagtttttttcgaaagattttataatgtttaatggtttttggttttgaaattttgttattgaatttgattattttgattaaaggtatggtattttttagaatattttgtgaatgttcgtattagtttgtttattagattgttttttaattaaaaaatattgtgttttataaaggaggagtatttttattttaaagtagtagtttttatcgttaagtatttagtatttttttggaatttatttgttagtttttttggtttcgggagttgtatttgtttattttagtttgttgagtgtagcgaagaatttagaatagtggtttttatattagtattatttgtatttagtgtgagtttttttgaaatgtaaatttgaaggttttattttaaattattgaattagaatttttggtgttggggttttaggagattatttaagtaagtttttttggggatgtttgtgtttttttagagtttgagaatgattgttttagaagaatatttatatagggttgtattgaagttcgggggtaaaaagaaaatagaggttaatttgtttcgagatattttgttgataagatatgatttggttttttcgatatatgtgatttttaatttaattagtttttagtttgttgtttttaaaggattttaaatgtagatttttgttttttttgaagttaagattagaagtttttaggattttaaaatgttaggtttttttattgtttttaaattgtttaaagttttttgatagtaggtatatttttatgtgtatattgtttatatatttgaggaaatatataatgaataaagtttattaatttaaaaaattataaatttatttaaaagaattatgaaattaagtagtaaagtgtatttttaaataatagtatatatatgtatgagatatttattttatagataatgtttggtggattatatatttggatttatagtaatgtttttaatttattttttggtttttttaatttttgtttgggaattattgttttagattaaaggaaatgaagtatagcgagagtttggagtttttttttttattggaataaggtttgttttttgtattttagtatattgtttaagaggttttttttttttaatgtataatttatattttttttagagaaaattttatttattatttatagttttttttgtggtttgaataatggtgttttttttaaaatttacgttgaaattttatttttatggtggtagtattaagaggttggtatttggggaagtgattaagttatgagggttttgtttttatgaatttgattagtgttttataaaaggattggagggaattagtttgggtcgtttttgtttttttgttttgttatgtgaaggtttttaggtggtattatgaggaatgggtttttagtagatattaaatttgttggtgttttgattttggattttttagtttttagaattgtgagaaataaatttttgttatttgtaaatgatatagttgtagttattttattatagtagtataaatagattatttttatagttagaattttagaggtataagtatattaaaatatagtttaaaagtttggtgtttataagagttgtatatttatagagttgggtagatatttgttatataaatttagattgtatagattatagtgagaatgaattttagttaaatatatgtagtttttaataaatttttaattgaaatatatataaaaatgtatataaattataagtgtatagtttagggagtttttatagagtgaatatagttgtttattaatatttaggttaagaataggaaatttattttttttttagaaagtttttggagcgttattttaaatttttttttttgagtaattagttttaagttttttaatatcgtagattagttttgttttttttgaattttgtttaattatataatatgtgttttttaatgtttgattgtttttgtttaagttagtgagagttatttacgttgtaggaatagtttgtttatttttgttgttaaatagtatatgattgtttgagtttattattatttatttgttttgaatttggttgtttttagtttggtttttttatgaagagaattattaaggatatgtttgtttttgttttttggtagatatatatttattttttgtgggtatatgtttaggagtgggattgttggattgtagtgtatttatatgtttattatatattgttgaatagttttttgagtgattgtattcgtatttgagtttggatataggataaggatggttattattattatttttgttttatattgtatagttatagtaataagtgaggaaaattaagaagtggtataatgattggaaaggatgaaataaagttgatattatagttaatatattgtatatatagaaaatttaaagtaatttataggttaattattagattaataagtgaatttaggttaggtgtagtggtttatatttgtaattcgagtattttgggaagttaaagtgggaggattatttgaggttagtagttggagattagtttgggtaatatagtgagattttatttttaaaaataaaaaaattagaaaaaaaaattgaatttagagatgtttttgaaaataaagttaatataagaaaaagtagttgtatttttttttttttttttgatggagttattttgtcgtttaggttggagtgtagcggtgtaattttagtttattgtaatttttgttttttgggtttacgttattttttcgttttagttttttaagtagttgggaatataggtgttcgttattacgtttggttaattttttagtagagatggggttttatcgtgttagttagtatagttttgattttttgatttcgtgattcgtttattttggttttttaaagtgttgggattataggtgtgagttattgcgttcggtagaaaaagtagttgtatttttatatagtaatagtaattagaaaatttttaaatattggaatataaattatttcgaaaaatttttaataaaagattagtaaaatttttagtttgaaaattataatatattatttagaggaatgaaagaagagttaaataaatggaaggatatacgatgtaatgttttggaaattttagtattgtaaagttgttagtgttttttaaagttatgtatgaatttagtgtaattttaattaaaattttattatatttttgtagtggaaattgataagttgatgttattatttataaataaaaatgtaaggggttaagaatagttaaaataattttaaggaagaagaaaatggaagttttattttattagataataagatttattttaaagttacgataattaaaatagcgtgtttttagtgtgaagatagataaatagaagaatggaatagaatagagtttaaagaagaatttaagggttaaaagtagttaagaagaatagatttggaagatattatttttttagatattaagattttttataaagatatgtggtatcgacgtaaggaaaggtaagttgattaaggtaagttgattagtggaattaaataaagtttagaaataggtttatatatatagttattcggtgtgtatttttgtgtgtgtgtattttataaaggtttaaagtaatgtgtttttaataaatggtgttatatttaaaagagtataattatatgtttttattttatatgaagtttaaaaatagataatagaatagtgattatttttggaggtagttgggggttgtttttggtagggtgggggtgttgtttgggaagaagtatgagagaatttttaggggttttggaaatattttatat

SEQ ID NO: 263 - DNA, 6061 bp, Artificial Sequence
  chemically treated genomic DNA (Homo sapiens)
gaggaggagtttgtagtgagtcgagattacgttattgtattttagtttgggggatagagtaagattttgttttaaaaaaataaataaataaataaaaaaaaaaattgtatttataatagagtttcgtttgttattgtttaaaatattttaaagttataatggatttttaaatttatgtaaagaataagtttggtttttatattataaaatgtattagtagtagttgtaattatttgtgttagagaggttagtatgtttttggttgggttgtggttttgtttagaattaagaggtttataaaggaagttatagaaattttgagttttttaattgttgtagtataggaaatagggtagttagttagtatttattgtttcgattagattgtttaagatgtaattttaagataatttgaaaatattatatggtttaattattgggttatttaatattaggtttatttttattaaggtttgttttaggaattattgtaggaagatttttgtagtttttataaaatatttatttatgatattgttattaggttttaagttttttatgtaataattagagatgggtgtgagaaagggaagtttgttttttttgggttgttggtgggttttattttgttagttagttgtgtgattgtgttggatagtattattgttaattacggtgaaatgaataagttttagcggtatttacgttagtacgagtaggagttgtttaggtgaagtttggaaattagtgtttattattggagtattagtttatgtgatttttatttggaggtatttgttttaaattttagtttttttttgtttggggttattgtgtgattatttttgttttagttgttttatagaataattgtttattttttattatatatagtgaatttatttatatagtgtatggtttagatttcgtagagtttgtattttaaggttatttatttaaaatatattttgaggttttttggaaatttatttttttagttttcgtttttttggttgttattttgagggtttttaaagggaatgtgattttgcgttatatttgaggatgttgaattattattgggggtgcggggataggtaggttttaaaagttttttaggtgattttgatgtgtattttttattaaaattaatttgaaatggttttattgtgttttttgaaaaaaaaaaatgtaatttatttgagatttttagataagaattaaaaaataaaattgatattttaaagttaatgtggttaaagtattatggaatatatttgttgttttttgataattttttgtattatttagaaaatgtatttttgtttttgatgatatttttattggaaagggtaaggcggaggtggtggggtgggtggaattttataagcgattgaataagtttttttgtattgttggttttaggaagttttttttttattagtattttagattttttatttttatttaaggaagaagggaggtttgtttggagttttttaaatataatgatatgagattaagtgtttttttttttggatgtattttttgtatagtttttattattgcggtttttttttttatatttaatcggtgttttttgttattttttgaagtttgttttttagttttttaatttgttttggttatattcgtttaagagttgagttatttattattttttggtattgatttttaaattttttttttagttatgttttgatattaggcgttatttttttaattattcgtgatttgcgtttgttagaatggattttggtagtagtagtttggttattatttgggagataagatgtagatttttgggttttattaagatttatttgaattagagtttgtattttaataagatttttaagtattttgtatgtatattgtagtgtgagaagtattggtttatgggatatttgtttttttttttttttgtattttttttttttttttttgtttgtttttattttttaagagatagagttttgttgtgttgtttaggttgggttttaatgtttgggtttaaatagtttttttattttggtttttagagtagttgggattataggtgtatattatcgtagttagttatattttatttagatttttttttatttttttttgttaaatttgtttattttgttgtattgttatacggtattgttgtattgtagtattgttatatagtttatgttatatagattataaaatttagttttattttttattttatttttttttttatttattcggatatttattaattttattagatttaggtttggaggtataatgagtaaaagtagatttagttttgtggggtttcgtatttagtgggagaagtagatattaaatatatattatgagttttaagtgtgaaatgagggtaagtattagtgagtgaattttgttatataaatttgtgattggttagggagattagggaaggttttttagaggaagtgatgtttgtgttgagtattgacgatgaattggagttaattagatgaagaggagtagaaagagttttgtaagtagaaggaatagtttatgtagaggtttagtttattagagaaagtttgtggagaattaataaaaaaaagttaatttatttttaggttttttatttttatttgtttttttatttaatattgttagagttatatttttatcgttttttgagttaatttgatttgtagaattattttatatattttttttttttttttttttttttttgagatagagttttgttttttttgtttagggagtgtaatggcgagattttagtttattgtagttttcgttttttgggtttaagtgatttttttgttttagtttttggagtagttgggattattggcgtatgttatcgtgtttagttaattttgtatgtttagtagagatgaaattttattatgttggttaggttggtttcgaatttttgattttaggtgattcgtttgttttagttttttaaagtgttgggattagaggtgtatgttattatgtttggttagttttgtatgtttggtatagatgaggttttattatgttggttagttgatttcgaatttttgattttaggtgattcgttcgtttcggttttttaaagtgttgggattataggcgtgaattatcgtgttcggttgttttatgtattttttgtagaagtttagatttttttatttacgtgatatagttatgtttttagttgtatatttttttagtttttttgtttatttttttattattgaaattatcggttaaattagtttttttattgttttttaatattatggttagattttgaatgttttttaattttttttttataaatattatatttttttttttaaaaaagtaaatttgttattaaaatatatatatggaaaagtatataaattataaatgtagagtttggtaaattgttataaagtgagtatattagtgttattagtatttatattacgaaatagaatgttaaaagtattttagaaaatgtattttttttttttttttattatatataaaggtaattattatttttttttttattagtattgattagttttgtttgtttgtaaattttatataaatggaattatgtagtagataatttgttgtgttttatattttttgtttaatgttaaagtaattgatttacgttttgtatgtaatggtagtttattttttttttttgttgtatagtagtatatggtatgattgtattatagtttattcgttttatatttgataaatggggttttttttagtttaggattattatgaatatttttttttgttgttgttataaattatgattttattagatatatattttggtttaaatttttgaattgtcgtgattttaaaaaaaattttttttagtttataagttttgagtatatgtgtaggtttgttatataggtaaattgagtgttttggagatttggtgtatagattattttgttaaatgcgttataagtatagtattcgaaaggtagttttgtaatttttattttttttttatattttatttttacgtaggttttggtagttattgtttttttttttgtgtttatatgtttttaaagtttagtttttataagatgttggtatatgttttttagtgagtgaatatatatttttttgttgggaatgtgtttatgattgaaattgttttattataataaatgtatatgttgagttttagtagatattatttagtagttttttatcgtatagtggttgtattgagttatgtttttattagtagtatgtgagagttttggttgttttatatttttcgtggttttgttagttttgaattataggggttttttggtgggtgtgtggtattattgttttgtgggtttaatttgtatttttttgatagttaatatggttgagtatttgtttttgttttttttttgttttttaaggagttttttgttatttttttttattaggttagtaggagtattttatatatttttggtagatgtatatattgcgattatttttttttattttatcggttgtttttttgttgttttaaatggtgttttttaatgaatagaggtttttaattttaatattagtttattaatgagtttttttatatttgaaattatatttatattatgtttagttttgtaaaattttagaggtagaatataaatatataaaattgtgaaatataaataaaaatttaaaagtttgggaaatataaattagaagatttagattagggagttaataagatatgtaaataagttacgtaattttgtgaacgtataatttagtaatatatattgtttagagtattttagaagttaaaatttaattggaaatatgatttgttatgtagtttttattatttgtgagttcgttagatagtatcgagaggatgggatttgataggtatttgtatttataagtaattgataattcgtatattaaagtattaataggtatattttatgttataggttatttagcgatagttatgatttttcggttacgtgcgttgggtggaagaattaataatatacgtatttcggagttatttaaagagaaaattcgattagaagttatttgtagtatttattttttagatggcgtggtatagatttttaaagttattgtaagttttttattttttttttttattttttttgaattaatgtttttaataaatagtttttattttttggtttataaaatgaagaaaaaaatattttaaaatgaaagtttgagattttagattttgtatgttgagattgtattggaaatatttaaaaatgttgttttaattttatttttgttttgagggtttttttttcgtttttttgtgtggtgtgaattgtttgacgtttagatgtggtttatagggttttttaatttatatattattatattgaaaaaattaattgataagtatttatttaatatttagttttattaaaatttgtaaattgttttaaagatgttttttatttatttttttcgatttataatttaaattaggattatgtttggttttatttgttatatggaaggtattttttttttttttaaagagatagggtatttattatgttgtttaggttggttttaaatttttgggtttaagtaatttttttgttttaggtattttaagaagttgggattataaatgtatattaacgtatttagtttgaagttgtattttaaataaatattttttgatttttatggtaatggtgtagttggtttgagagttatacggtggaaaattttttattagataatttttagagttttttttggttttgtttgtttatgtttatagttagggtttttgttaggtgggtatttttatgttagttttattgtttatattataagttattttttagagttaaatagagtttttgtagtttggtagttgttttattattcggtttgggagaagtgttttttaaattattgttgatgaagtaatagattttttagtttatatgttagtgttgggattagtattgttgtttaaatagagaagaaa

SEQ ID NO: 264 - DNA, 6061 bp, Artificial Sequence
  chemically treated genomic DNA (Homo sapiens)
ttttttttttatttagataatagtattaattttagtattgatatatagattggaaaatttgttattttattaataatgatttaggaagtattttttttagatcgagtgatgggatagttgttaagttatagaaattttatttagttttgggaggtgatttgtaatgtagatagtaaaattgatataaggatgtttatttaataaagattttggttgtaagtatagataggtagaattaaaaggaattttgaagattgtttggtggaagattttttatcgtgtggtttttagattagttgtattattgttatgagggttagggggtatttatttaaaatgtaattttaagttgggtgcgttggtatatatttgtagttttagttttttagaatgtttgaggtaggaggattgtttgagtttaggagtttgaggttagtttgggtaatataatgagtattttgtttttttaaaaaaaaaaaaagtgttttttatatgataagtaaaattaggtatgattttgatttggattgtggatcggggaagataaataaaggatatttttggaataatttgtaaattttagtaggattggatattagataagtgtttattagttaatttttttagtgtgataatgtatgggttagaaagttttatgaattatatttgagcgttaaatagtttatattatatagaagggcggggggaagatttttagggtagaggtgaaattggggtaatatttttaagtatttttagtgtaattttaatatataagatttgagattttaagtttttattttaaaatatttttttttttattttgtgagttaagagatgaaaattatttgttaggagtattaatttaggaaaagtaaaaaaaaaaagtagagaatttatagtaattttaaaggtttgtattacgttatttaaaaagtggatgttgtaaatgatttttgatcgagttttttttttgggtaatttcgaggtgcgtatattattaatttttttatttaacgtacgtaatcgggaggttataattatcgttgaataatttgtaatataaaatatatttgttagtgttttaatatgcgaattgttagttatttgtgagtgtagatatttgttagattttattttttcgatattgtttgacggatttatagataatgagaattatatagtagattatgtttttaattgagttttgatttttaagatgttttaagtaatatgtattgttaaattgtacgtttatagaattacgtggtttatttgtatgttttattaattttttggtttgagttttttaatttatattttttaggtttttaaatttttatttatgttttataattttatgtatttgtgttttatttttaaggttttatagaattaaatatggtataaatatgattttaaatgtgaaaagatttattgataaattgatattaaaattaaggatttttatttattgagagatattatttagggtagtaaaaaggtaatcgatagagtgggaggagatagtcgtaatatatatatttgttaagaatatatggagtgtttttgttaatttagtgagaggaagtaatagaaaattttttagaaaataggaagaaaataaaaataggtatttaattatattagttgttaaagaaatgtaaattaaatttataaagtaatagtattatatatttattagagaatttttatgatttaagattggtaaaattacggagggtgtggagtaattagaatttttatatgttgttggtgaaagtataatttagtgtaattattgtacgatggaaaattgttgaatagtatttattaaagtttaatatatgtatttattgtgatagaataattttagttatgggtatatttttagtagaaaaatgtatatttatttattaaaagatatgtattagtattttgtgggagttaaattttgagaatatatggatataaagaagggagtaatagttattagggtttacgtgagggtgaagtgtgggaggagggtgaggattgtaaaattatttttcgggtattatgtttatgacgtatttgataaaataatttgtatattaaatttttaagatatttaatttatttatataataaatttgtatatgtatttagaatttgtaagttaaaaaaaattttttttaaagttacgataatttaaagatttggattaaaatatgtatttaataaaattataatttataataataataaaaaagaatatttataataattttaagttggaaaagattttatttattaaatgtggaacggataaattgtggtatagttatattatatattattatatagtaaaagaaagaaatgaattattattatatgtaaaacgtgaattaattgttttaatattgagtaaaagatatgagatataatagattatttgttgtatgattttatttatgtaaagtttataaataggtaaaattaattaatgttgatagaagaaaggataatggttatttttgtgtgtagtgaggggaagggggagatgtattttttgagatgtttttaatattttatttcgtgatgtgggtgttaatgatattggtgtatttattttgtgataatttattaagttttatatttatgatttgtgtatttttttatatgtatgttttaataataagtttatttttttgaaaaagagagtataatatttatgaagagagaattagagggtatttaaaatttgattatgatattagggaatagtaaggaaattggtttaatcggtgattttaatggtggagaggtaggtaaaaagattggaaaggtgtgtaattgaggatatgattatattacgtaggtgggaggatttaggtttttataaagaatatatgaagtagtcgggtacggtggtttacgtttgtaattttagtattttgggaggtcgaagcgggcgggttatttgaggttaggagttcgagattagttggttaatatgatgaaattttatttgtattaaatatataaaattagttaggtatggtggtatgtatttttaattttagtattttgggaggttgaagtagacggattatttgagattaggagttcgagattagtttggttaatatggtgaaattttatttttattaaatatataaaattagttgggtacggtggtatgcgttagtaattttagttattttagaggttgaggtaggagaattatttgaatttaggaggcggaggttgtagtgagttgagatttcgttattgtattttttgggtaaaaagaataaaattttgttttaaaaaaaaaaaaaaaaaaaaaaggaatatgtgaagtaattttataaattaaattggtttagggaacggtgaagatataattttgatagtgttgggtggaagagtaaataaagatgaagggtttgagagtaagttaatttttttttattaattttttataaattttttttgatgagttgggtttttgtataggttattttttttgtttgtaaagttttttttgtttttttttatttgattaattttagtttatcgttagtgtttagtataagtattattttttttgggaagttttttttggtttttttaattagttatagatttgtgtgatagagtttatttattagtgtttatttttattttatatttagaatttatgatgtgtatttaatatttgttttttttattagatgcgaagttttataaggttaggtttgtttttgtttattgtatttttaaatttaggtttggtagagttagtaaatgttcgaatgaatggaaggaagaatgaaatagaaaatgaagttaaattttatagtttatataatatagattatatagtagtattgtagtataataatatcgtatagtaatataataggatagataaatttgatagagaaaaatgggggagggtttaagtagaatgtagttagttacggtagtgtgtatttgtagttttagttattttggaggttaaggtgggaggattgtttgagtttaggtattagagtttagtttgggtaatatagtaagattttattttttaaaaaatgaaagtaagtaagaaaagaaagaaggaatgtagaggggaggggagatagatgttttatagattagtgttttttatattgtagtgtgtatatagagtgtttggggattttgttaaaatgtagattttgatttaagtaggttttgataggatttaagagtttgtattttgttttttaggtgatgattaagttgttgttgttagggtttattttggtagacgtaagttacgggtaattggaaaagtagcgtttaatgttagggtatggttagagaaaagatttgggagttagtattaaggagtagtaggtgatttagtttttagacggatgtggttaaagtagattggaggattaagaaataagttttagggaatgatagggggtatcggttaggtgtagaaagagaaatcgtaatgatgaaagttgtgtagaaagtatatttaggaagagaagtatttggttttatattattatatttaaggagttttaagtaaatttttttttttttttagataaggatagagagtttgaaatattaataaaaaaaaaattttttgggattagtagtgtaaaggaatttatttagtcgtttataaaattttatttattttattattttcgttttgttttttttaatgaaaatgttattagaagtagggatgtattttttgagtaatataaaaagttattaaaagataataaatgtgttttataatgttttaattatattgattttaaaatgttaattttattttttagtttttgtttaagaattttaggtgggttatattttttttttttaaaagatataatagaattattttaagttggttttagtgggaggtgtatattagaattatttgaggagtttttaaaatttgtttgttttcgtatttttagtggtgatttagtatttttaggtgtggcgtaggattatattttttttgggagtttttaaagtaatagttaggaagacgaggattaaaggagtgggtttttagggaattttagggtgtgttttggatggatggttttagaatataggttttgcggaatttaagttatgtattatgtggatgaatttattgtgtgtgataagaggtgggtagttgttttgtggaatagttaaagtagagatagttatataatgattttaggtagaaaaaaattaagatttgaaataggtgtttttaaatgaaagttatatgggttgatgttttaatggtggatattgatttttagattttatttgagtagtttttgttcgtgttggcgtgggtgtcgttgggatttatttattttatcgtggttagtaatgatgttgtttagtatagttatatagttagttgataaaataaagtttattagtaatttaggagagatagattttttttttttatatttatttttgattgttatataaagggtttgaaatttaatgataatgttataaataggtattttatgaaagttgtagaaatttttttataatggtttttaaagtaaattttggtaagaatgagtttgatgttgaataatttaataattgagttatgtggtatttttagattgttttgaaattatattttaaataatttggtcgggataatggatgttgattaattgttttgttttttgtattatagtaattggggaatttagggtttttatggttttttttataagttttttaattttaaataaagttataatttaattaggaatatgttggtttttttgatataaatgattatagttgttgttgatgtattttataatatggaagttaagtttgttttttgtatgagtttaaaaatttattatagttttagaatgttttaaataatagtaaacgaagttttattgtggatatagtttttttttttgtttgtttgtttgtttttttgagatagagttttgttttgttttttaggttggagtatagtggcgtgatttcggtttattgtaagttttttttt

SEQ ID NO: 265 - DNA, 6754 bp, Artificial Sequence
  chemically treated genomic DNA (Homo sapiens)
taatggtttttaaagatttttaatttatagaatttgtgaatgttagtttgtatggtaaaagggattttgtagatgtggttaagttaaagattttgagatgtggatattattttggattatatgagtagatataatgtaattataaagatttttataaaagggaggtaagagggagaaaaaaaggtagaaaagatgatgagagagagatttgatgttatgttattaggtttgaagatggtggaaggagttatgagttaaagaatgtaggtggtttttaggagttggaaaaggtatggaaatagatttttttttagagtttgtttttttaaggaatatagtttggtaatttgttttggatttttgatgtttagaattgtaagataataaatttgtgtttttttaagttattaaagttatggtaatttttttgttttttgggagtttgttttttttttttttttttgagacggagttttattttgttatttaggcggagtttagtggtgtgattttagtttatagtaatttttgttttttaggtttaagtgaattttttgttttagtatttcgagtagttgggattataggtgtgtgttattacgtttggttaattttttgtatttttttagtatagatggaattttatttatattataattggttattatgttggttaggttggtttcgaatttttgattttaagtgatttattcgtttcggttttttaaagtgttgggattataggtatgagttattacgtgtggttaaatttatggtaatttgttatagtagtaataagaaatgaaaatagagatggagtaaataaatagtttaatggtataaagtaaaaaaaatagtttagatttaataaaaatttcgagaattttatatttgatgaaagtaatttggtgtgtgtgtgtgtgtgcgtgtatgtgtgtgggtgtgtgtttattttataaggtggtattaggataattggatagttatttaaaaaaaaaaaaaaagttatatttttatttttttatattaaaattattttttagatagtagtagaagatttattagtaattttgagattaggattatggatttttaagtattttaaaaatataattaaaagtattagaagaaaatgtgggatttttttaatgtgaaaaatataaaatttagaatgataaggaagaggtggattatagtagtaataatttttatatagtgaggtaattagtagttaatttggtagtatttattaaagttaaatatggttatatattttaatttagtaattgtatttttacgaatttgttttaaagaaatgttttattatgtgtataaagttttatgatgaaaatgttttttagagtattatttgtaatagtaaagtattagaaatagtttgatgtttattaattagagaaagttaaatatattatggtttagtttttagatgatatgtatttatatgttttgttaaggaatgatttttatatatatttgtaagtgaaatatggtatgattttttgtgtgtggggaaaagagatgtaggtttagtttatatatttagagaaaattttggaagtgtatataagaattgttaatagtgtttattttttgggagtgggattgatagtaggaagaagttttagatttttaaaattttatatttttttgtagagtttttgatattaggattgttaatgggttttttgttgttatttagtaagaaaggaaaaaaaggaaagaattgttgaaaatgaagagggagagttatgtttatatggtgataaatttgggttagttgttttagaggtatatggtataggattttgaatttttttaagtatatttaatatagttttgtgattaaaggaagtttaagttatagaattttgaatttattggaaatatgtgtgatatttttttaaaggtttaaattatttaaatttgtttgtttttgtttttaagttatgtatgaagattttaggtaggtaaaaagatgaaatttttttttaattgattagttaaggtagataggtatttaattaaggttttttgttggggattaggttagataggatttatattttattgaaagtttgtatatttttgtatgttttattttattagcgtaggtaataaaattaagttagtttaagttatgtgtttttttgaagttaaaatttatattattttgagttttatttagcgagtagagtttaattttttgttgaggtttttttttttaggtatttttagtgattttacggttatttattttttttaaagaagttttttttagttattgatagtgggtggttggtgagttagttatagtgtttagttaaagttttttttttacggttgttgtttggggttattgttaaggtttatataggtaagaataaatgtttgtttttttttggttgtagttatttagggttaagagaggttttattattgattatatagtgtaaaacggttagttttcgtttgttaatattttttaagtgtggatataatttttgtttttatttttttaaagtatagttaagggtagattgtagataaggaaaaaaaaatagttaatagtagtgtttgttaatatttagtaatgtttgaggttatttttgaatgaaaaaaaaaatttttgttaatttttaattgttaagttattttaattatgttttttaattatatataaattttaggtaataattttttatttttatagtttacgtttataaaattaaaataattttagaaattaaatttataaatttaaaaaatttaattaatatgatgtatgtaatgtgtggtgaattatatttgttgttttgttgaaattaaattgttttttgatatgagaatatggaatttattgttatggtatgtatttttttgtttggtatgtttataattgatttaattattttaatatttttttttatttgaatttttgttaaatttttgtgtagtgtgtcgtaaaggacgtatgatttttatttagttagaatgttgttttttttataagaagtattttattttttttttattagttttagaaaattaaatttgtggttggtgttaaatataaaattaagtgtagggtttcgttataaggtggttattaaatgatttaatatagtgattagaatatattaatttttaaaagaatataatttaagtaagagtaaaatatttatatattttatagataatttgtatatatttttttttagattttagtttaaggaatagtagtttatatttttgttattttagggtggtttaaaagttagggagtttgttagaaagagtttttaggttaggtgtagtggtttatttttgtgattttagtattttgggaggttaaggtaggaagattgtttgaggttaggagggtttaagattagtttgggtaatatagtgagagtttgtttttattgaaaaaaaaaaaaaaagaaagaaatgtagaattttagggtttattttagatttaatggattagattatgttatttaataagaattttaggtgattagtatgtatattaaagtgtgagatatattaatttattattttttaatttaatttttagtgggtttatgtgagtttggggtatagtttaaagtttttttttttttttttttaaggataataattgttttttttttttttagggttgtaggtaggtagatttaaggtgaatttagattttttaaggaataatggtgagtattggtaattttaaagggtttattttggtgatttgtaggggaagttttatttaggaatttttgtgttttgtttaatattagatataagattatatgtaagttatgtggtttatatgtgtaattttagttatttcgaaggttaaggtaagatgattttttgagtttaggagttggagattagtttgataatatagcgagattttgtttttaaataaaaattatatattgtatgattttatttatatgaaatatttaatttttggtggaagttttatatgatttttggttggaggatgattggatgttgatagatgataatgaggtgaagagtattttagtagagggaatggtatgattaaagataaaatggagagttagaggtaggaatgtatatttagggaggaatgaatgagtattggttataatagagatttgggaagaaaagtaagtgaaggaagtaaagttggaaatatggattgataagttgttttttttaaatggaaaaattaataggtgtgagggagaagagagttaatagaaatttttgttttttttagatttgtttatatttttttgatttgtagttattttgtcggtttgggaaagtggtttttgaaagatcgtttttataaaggtaggttttgataggatgtttaagttaagagtaaggaaggataaagaaggcgtttggcgatagaaaagggtattaataaaaattgggtaaaaaggaagtgtggcggtttttaaattttttttttttttattttagttgagattattcgttagtaggtaattgtggtattattaataagtttgtattattaataaaatattataatgtatttggttaaaaattttggcgtgataatattaaatttatgttattagaaggaattaaattttaaaaagtatatcgttttaggtatatagaaggagttttcgaacgtttgttttataaacgtaggttggttgttgaggttttgttttggagtttacgtttaggagaggaaatgatttaaaattgttttttaaaatttatattttttaggagtattgaggttggggcgatttgttgttaattggtttggtttttttttttaatatacgttttttgtttattattcggtttttgcggttagtgggtgtagtaggggtcgtagtttaaataattaatcgcgacgcggttgcggggcgggggttatagcgtttcgttttttttttttaattcgtttttttaatttttttaggtcgttttttttcgtatttgcgtgtttttttgcgtttcgattggtgcgatttttttttgcgttagcgaggtagggttttggtttcgtttttcgcgagatcgttttttgttgttgtcgtcgtcgtttttggttattgattggcggcgtttgcgtagtcgttatgttcggttgttatgttgcggtttaggagagggggtgtgtttgagggaggaggaagagatagaggaggaggagggggaggaagaggaggtggagaaggaggggggtgattgagttttttttgtatttttatatataaacgttgtttaggattattcgttagtttacgtcgcgtagtgcgttttttcgtttttcgcgttttattattaatattgtttttttaggatttttgggttttaggggtcggaattgggtttgagcgggagaggaaagagatttggttttggtcgcggggtcggaggattggggttaggtttttttttttacgtatttttgggggtgtggattattttatttttgtagggaggtaggagaggtcgtcggttgttcgtttttttgttatttttttagcggcgtcggttcgcggttgtttagtagtatgaggtggtgttggcggtttcgggtcgtggcgcgatcgttgcggcggcggttgttcggggggcgttgaggtagtttttcggagcggtacggaggacgcgttttttttttgcgcgtcggggtttcgaggttttttttttttagtcgagaggacgcggttgtgatatacgaaggtaagaggtttttcggttttcgtcggtttttcggttttgtacgttgaacgggaggtttttatttgtatgtgtggtttttgggaggtgagttaggtggggtaagtcggaggtacgaggatgatttgaaaggaaggaaaaaaggataaaaataaataaataaataaataaaaaaacgtttttttttttttttttttgggatttttgtttttgcgggggttatagttggaatttttgttatgggttagcgaagggttaagggatggaataggtgcggagatggaatgtttttagtatttaaattttaggtaaagttttggaattttgagttttttattgttggtagaatttttttttttttttttttttttttggtttatatgagcgttttttgtacgttgtatgagttaattatttttattattgaagttttaagtttgttatgattttattagtatatatttgtatttgggaatttgtagttaatttaaaaaaaaaaaaaaaaaaaaagttgagatgtgggtaaatagtgatgtatttcgtagggtttttataaaatggaatagtttatagttgtataggtgatgtgtggatgtttttgtaaaatttagggtggaagattttatgtttgggtttgtattatgtagtgatattagtatgtataaggacgatttgtaggattttttaaaacgtttgttttaggataatttgttatgtatttgtaatatgttagttgtttttgaataagaggttttagtaatattaagtttttgtgtttagattttgggtttagttgaaatagtatagttgattggttatatttaaaatatatttatggagaaagataaaaggttaatgtgttcgatttgtaaaagataattagagtagaaagaagattggaatagtaaaagttagggtatttttaaattttggttttttgaattttaacgtgttagaggaaaaaaatttttttttaattttaagggggaaggagatggtttta

SEQ ID NO: 266 - DNA, 6754 bp, Artificial Sequence
  chemically treated genomic DNA (Homo sapiens)
taaggttattttttttttttttaaaattgaaaaaaaattttttttttttggtacgttaaagtttagaaaattaagatttaaaaatgttttggtttttattgttttagttttttttttattttaattgttttttgtaagtcggatatattggttttttatttttttttataaatatgttttaaatgtgattaattagttgtattgttttaattgggtttaagatttggatatagaaatttagtattattgaaattttttatttaaaagtagttggtatattgtagatgtataataagttattttagaataggcgttttgaaaaattttataaatcgtttttgtatatattgatgttattatatgatgtaagtttagatataaaattttttattttaagttttgtagaaatatttatatattatttgtgtaattgtaagttgttttattttatggaaattttgcgaaatgtattattgtttatttatattttaattttttttttttttttttttttgggttaattatagatttttaaatataggtatatattggtagaattataataggtttaaaattttaatggtaggaatagttggtttatgtagcgtgtaagaagcgtttatatgagttaaaaaaaaaaaaaaaaaaaaaggaattttattagtaatggaaaatttaagattttaaagttttatttagagtttaggtattgggaatattttattttcgtatttattttattttttggtttttcgttgatttataatagagattttaattataattttcgtaaaagtagaggttttaggaagaaaggaaagaaagcgtttttttgtttgtttgtttgtttgtttttgtttttttttttttttttttaaattattttcgtattttcggtttgttttatttggtttattttttaggagttatatatgtaggtaagagtttttcgtttaacgtgtagggtcgagaggtcggcggggatcggagaattttttattttcgtatattatagtcgcgttttttcggttggagaaaaaaagtttcgaggtttcggcgcgtagaggagaagcgcgtttttcgtgtcgtttcggggggttattttagcgtttttcgagtagtcgtcgtcgtagcggtcgcgttacgattcggagtcgttagtattattttatgttgttgggtagtcgcgggtcggcgtcgttggggaggtggtagggaggcgggtagtcggcgattttttttatttttttgtagggatgagataatttatatttttaaaagtgcgtgggggagggggtttggttttaatttttcgatttcgcggttaaagttaagttttttttttttttcgtttaggtttaatttcggtttttgggatttaggagttttgagagaataatgttggtggtggggcgcgaggagcggaaaagcgtattgcgcggcgtgagttggcgggtaattttgggtagcgtttgtgtgtgagagtgtaagaggagtttagttatttttttttttttttatttttttttttttttttttttttttttttatttttttttttttttttaagtatatttttttttttaggtcgtagtatagtaatcgaatatggcggttgcgtaggcgtcgttagttagtggttaggagcggcggcggtagtaataggaggcgatttcgcgagaggcgaggttaaaattttgtttcgttagcgtagggagaagtcgtattagtcggagcgtagagggatacgtaggtgcgagagagagcggtttaggaggattgggagggcggattggaggggggaggcggagcgttgtggttttcgtttcgtagtcgcgtcgcgattggttgtttggattgcgatttttgttgtatttattgatcgtagggatcggatagtgggtaagaagcgtgtgttaaaagggaaaattagattagttggtagtaggtcgttttaattttagtgtttttggaggatataggttttggggggtagttttgaattatttttttttttaaacgtaggttttaaaataaagttttagtaattaatttgcgtttataaaataaacgttcgggggttttttttgtgtgtttggaacggtgtgttttttaaaatttaattttttttaataatatgaatttggtgttattacgttagggtttttagttaggtgtattataatattttattggtgatataaatttattggtaatattatagttgtttattggcgaatgattttagttgaaatggaggaagaagggatttggggatcgttatattttttttttgtttaatttttgttagtgtttttttttgtcgttaggcgttttttttgtttttttttgtttttagtttgagtattttattagagtttatttttataaagacgattttttaaaaattatttttttaagtcgataaaatgattataaattaggggaatgtgaataaatttggaaaagatagaaatttttattgattttttttttttttatatttgttagtttttttatttgaaaaaggtaatttgttaatttatgtttttagttttattttttttatttgtttttttttttagatttttgttgtagttagtgtttatttatttttttttaaatatgtatttttgtttttgattttttattttgtttttgattatgttattttttttgttaaaatgttttttattttattgttatttgttaatatttagttattttttaattaaagattatatgagatttttattagaaattgaatgttttatataaatagaattatataatatgtaatttttgtttagaggtaaggtttcgttatgttgttaggttggtttttaatttttgggtttaagagattattttattttaattttcggagtagttgggattatatatgtgagttatatggtttatatgtagttttgtgtttggtgttaagtaagatataaaagtttttgagtggaattttttttgtaagttattaggatggattttttgaagttattaatatttattattattttttgaaaaatttgagtttattttaaatttatttgtttgtaattttggaaagagaagaagtaattattgtttttaaaaaaaagagagagagagttttagattgtgttttaggtttatatgggtttattgaaaattgaattgggaaataataaattagtatattttatattttaatatatatgttgattatttggagtttttattaaatggtatggtttaatttattaggtttagagtgggttttgaaattttgtattttttttttttttttttttttttaatagagataggtttttattgtgttgtttaggttgattttgaatttttttgattttaagtaatttttttgttttggttttttaaagtgttaggattataggagtgagttattgtatttggtttagagattttttttaataagttttttggtttttggattattttggagtagtaggggtgtagattattgttttttaaattggagtttaagaaaaaatatatgtaaattatttataaaatatgtaaatattttgtttttatttaaattatgtttttttaaaagttaatatattttagttattatattggattatttgatgattattttgtaacgaaattttgtatttgattttgtatttggtattaattataaatttaattttttggggttaatgggaaaagaatagaatattttttgtggaaaggatagtattttggttaagtgaaggttatacgttttttacggtatattgtatagaagtttaatagaaatttaaatagagaagaatgttgagataattaagttaattataagtatgttaaataaaaaagtatatattatagtagtgagttttatatttttatattaaaggataatttaattttagtaaaataataaatataatttattatatattatatatattatattaattgaattttttaaatttgtgaatttaatttttaaaattgttttagttttatagacgtgagttataagaataagaaattattatttaaagtttatgtataattaagagatataattaaaatgatttaatagttggaagttagtaagaatttttttttttatttaaaagtggttttaaatattattggatattggtagatattgttattgattgtttttttttttttgtttgtagtttgtttttgattgtgttttgggagagtaagagtaaaggttgtatttatatttggaggatgttggtaggcgaggattggtcgttttgtattgtgtggttaatggtaggattttttttaattttgggtagttatagttagaagggaataagtatttgtttttgtttgtatgggttttggtagtgattttaggtagtagtcgtgaagaagaaattttgattaggtattgtggttgatttattagttatttattattagtaattggagaggatttttttggaagaaatgagtaatcgtaggattattggggatatttagggagaagaattttaatagaaggttggattttattcgttaggtagagtttagagtggtatgaattttaattttaaaaaagtatatgatttaaattgatttgattttgttgtttacgttggtgaggtgggatatataaaggtatataggtttttagtgaaatgtgagttttatttaatttggtttttaataggagattttggttaggtatttgtttgttttagttagttagttaagggagaattttatttttttatttgtttggaatttttatgtataatttaaaagtaaaagtaagtaaatttaaataatttaaatttttaaagaggtgttatatatgtttttaataagtttaggattttgtgatttgggttttttttaattatagagttgtgttaaatatatttaaaaaaatttaaaattttatattatatatttttgaggtagttggtttagatttgttattatgtgagtatggttttttttttttatttttagtaatttttttttttttttttttttttgttgaatagtagtagaagatttattagtaattttgatattaggaattttataaaaaagtgtaaaattttaaaaatttaagatttttttttattgttagttttatttttaaaagataggtattattgatagtttttgtgtatatttttagaattttttttgaatatataagttaaatttatattttttttttttatatataagggattatattatattttatttataaatgtgtgtggaaattattttttaataaaatatgtagatatatgttatttaagggttgagttataatatatttaattttttttaattaatgggtattaggttgtttttagtattttgttgttataaataatgttttaaagaatatttttattataaagttttgtatatataatgaagtatttttttaagataaattcgtggaaatgtaattgttgggttgaagtgtatggttatgtttaattttgataaatgttgttaaattgattattgattgttttattgtgtgagagttattattgttataatttattttttttttattattttgggttttgtattttttatattaaaaaaattttatatttttttttagtatttttagttgtgtttttaaaatatttaaaaatttatgattttgattttaggattgttaatgggttttttgttgttatttgggaaataattttggtgtaaggggatagagatgtagttttttttttttttttaaataattatttagttgttttaatattattttatggaataaatatatatttatatatatatacgtatatatatatatatattaaattgtttttattagatatgaaattttcgaagtttttgttggatttagattgttttttttattttatgttattgaattatttatttattttatttttatttttattttttgttgttgttgtaataaattattataaatttggttatacgtggtggtttatgtttgtaattttagtattttaggaggtcgaggcgggtggattatttgaggttaggagttcgagattagtttggttaatatggtggttagttatagtataggtggggttttatttatattaaaaaaatataaaaaattagttagacgtggtgatatatatttgtagttttagttattcgggatgttgagataggagatttatttaaatttgggaggtagaggttgttgtgagttgagattatattattggatttcgtttgggtgatagagtgagatttcgttttaaaaaaaaaaaaaaaaaataaatttttaaaaaataagaaaattattataattttagtggtttaaaagagtataaatttattattttatagttttggatattaaaagtttaaaataggttgttaagttgtgttttttgaggaggtaggttttaggggagaatttgtttttatgttttttttagtttttggaagttatttgtattttttggtttatggttttttttattatttttaaatttagtagtatggtattaagttttttttttattattttttttgttttttttttttttttttgttttttttttataaggatttttgtgattgtattgtgtttatttatataatttaggataatatttatattttaaaatttttaatttaattatatttgtaaaattttttttattatgtaagttaatatttataggttttatggattagggatttttggaggttatta

SEQ ID NO: 267 - DNA, 5182 bp, Artificial Sequence
  chemically treated genomic DNA (Homo sapiens)
ttatttaggaggttgagatgggaagattatttgagtttgaagttgtaaagagttatgattgtgatattgtattttagtttgggtaatatattgagatttttttttaaaaaagaaggattagaaatagaagaaaggtttttttttttgagagattttttttgagagttttattttttgttaaagttggtttgagttagttattttattttagttttattttagtttgtgttttggatgttggttacgtagtttgtttggtttaagagtttttgttatttttggatatttgttttaagaattatatttttttttgttaatattttttgtttttttgtttgttgtttttagatatgtatgtggttagtttatttaattttttggttattatttttttttttttttttgggggtagagagtggagattttttttatagttttgtggaagataaatggaggttttaggaatttttttggggtttattttatacggatgtagggtaatgaggttaatttttgtttatttttgtgtgggtaggaaatatgagttgtatagtatggattgggatttgaaggaggaatttagggattgtttggtggttgttgtattttatgggggttttattggtatgttgtttttttattattatttgttttgggattttgggatgaatttaaggtttttgatttttggggttttgttgttaggttgtttttgttgttattttttatttattttgttgagatgtttttatttttggtttttataggtttgttttatatggggtgggtttggggagttaggatgtgaggtttgttttatatggggtgggtttagggagttaggatagaaggtttttttttaaattgtagtattgttgaggaatttttggcggaaggagaaagttgttagtgtgaggttagtgttcgatatatattttgttttcggtatgtttttggttagtttgttggtgagtatttttgatggtttttggggtttagggttggatagggtttttttatttgaggatagttttaggaattttttttttttgtagtggaagagtggattcgtggtgtttttgggttggttagttgaggaggagttgttttgtgtgtaggaagatggtgttgtattggtttatgggttttatggtgattttcggagatattttagtatgggtaatgtaggggttatagagggttggggacgcggggtagagtttatgattttgtggtttttttaatttatggttttttttttttaggaagtgttttagaatcgggttttggatgttcggattttttatattgagtttggtttcggagtggttatttttataggggtttatcgttttatttttagtgttaatgtgggtgattttaaatttcgtcggatgttagaggtgttaggtaagttttgatatcgttgagatagttaagtagtatttatagatgtgtttttagtttgtgagatttataaaaatagaagttgtggttagagatttatagaaatagaaacggtgggttttggttattttaatattgtttttttttttggttataggtttgtaaagtgtatttttttgttggattgtgttgtgttaggatcgagtggtatatatttttttggttgtggggtttgatttttattttttggattatgtagtttgtttcgtagtggtaagggttttgagtgggaatgaagtggacgggttgggttaggtaatagggaggttttgaaaagttagtatgtatttgttttatttttattttggttttgttttagacgttttttggtttggttttaggagtaagtagttttttatagatggttgttttttttatttatcgatatttggtattttttatagatataggttatatttggatggggatagtattatttaaggtatgattttggggtaatataggggtattgtgttttgtttagggtataagattttttggtgatgcgggagggtttttcgattagaatggtgattgttgggatagggttatgatattgtttatattattttaggagaagttatgtgagtttaattgtaatattcgggtatttttaaagtagatggtttggtaaggatgggggtgttattgttgggggtgtgggtgagatatagtttgttttttgggataattagttttttgattcgttatgtttattggttaagtttagtggagtttggattttattttttttgttattgtatatttgaaggaaattattgttttttgtgggttatagttgttttgagttgagagtttagggataagagggaagtggagaggttagtgtatagttagtgatgtaagtgtatataggttgtttcgagataaaggattatgagtagttatgtgggagatatggttatgggatagtgtttagttagtgtgtatatgttgtttataggtgtagtcgttttcgtagtaaggagagggtcgtggtggtggtttgggaaaggcggttgatggtggtgggcgatgtattcgagagtatttagtatttttggagggttgtttgtgtgtggagagaggggaggggagggtttatttgtttcgttttatttgtaggtgtttttaggagttttaattaagtttaggtttgtgttggatgaggatttttatttggtgtttgagttcgatggggttcgtattttttttcgtagtatttacgagtttttgtatgaggttttaggtgaggtttttataagggtattatataatttaaggtggggatttttcggtattttagttgttttgggttagtgttatagagtaggaatagggtgttgaggtagggttgagggtttttttgttttttttttttatttattaatttttttttttagcggttagcgaggaaatttttaaaattgttttaatggttttcggggcgttgtttttggaggtttagaaggagtatgaggtaaagttttgggttttttttttagttttagaatggttttttttgtttttgcgtgggtatgtgtgagtatagttaggtgttatttgttaagagaggggtttaggtaggatattggtttgggttggggagggttggtttatgtaaattgaagagatattatgttttttatgtggtgtgatagggacgggtagagtatttttattatttttatttagtttgggttattattgggaggagtttttaaggtttttttaaaggtagttgtgggttgatacgagatgatgtttgtgggtattttaggtggattgagtgggttgagggagttggggttttagtttgtgtagtttttttaatttagtttatttgaattataatttagaatggttaggggttagatgtgggagtgttttttgttatgatgttttggttttggattgttttttattagaaagagagttagaaggcggacgagtatttgcgggagatttaggagttgggttagttgatttaggtcgtgtagtagtgtattgaggttgtaggatatgagtattagttagatatgtagaagagtttgtttagggttggtttggatggtcgggtcggggagggtggggttgggagggggtgggatgggtagtagggaagtttttttttatcgttttttggttttttttaggtcgtttttttcggaaagtgttttttggatagatttttattcgatagtttcgtgtatatgtgttaggatttgcgtgtgtttaatgttgttcgggattattatatcgggatttcgtttatttatagttagtatttttgtgtacgttagaagggtattttatagttaggggtggtaggggaaggggttggagatgcgtttgtaggtatttggtaagcggggtttattttttaattggatttttaatcgaggaaaatatagatataagtagtttattatttaggtgttgttggataggtagggtaagtttaagggtgtagtgagcgggttgttaggggggtgggtattatagttttgggtggggttttatggttattgtttttgatttatttaggatgtgggaggtttgatgtgtaggttgaggttattttgtttttttttttttttattttattttttgtattttttatttatcgggtttattaggttcgtgttgcggagattttattttttggttatttagatatgcgagtatttgcgtttttttgaagtatagggcgttagtaggattttggtttattgggtttgttataaggtaaggatgtgggatggggtttaagggtatttagaggattttaggttttggtgaggtggaggaaatagaaagtgtagaattgcgttgggtacggtggtttatgtttgtaattttaatattttgggaggttgaggcgggcgaattatttgaggttaggtattcgagattagtttggttaatatggtgaaatttcgtttttattaaaaatataaaattagtcgggtacggtggcgtatgtttgtaattttagttattcgggaggttgaggtaggagaattgtttttatttgggaggtagaggttgtagtgagttgagattgtattgttgtattttagtttgggcgatagagtaagattttgttttaaaaaaaaagaaagaagtggcgggggcggaggaggagggaaagagagagaaagaagaaagagagaaagaaagaaagaagaaggaagggagggaggaagggaattgaaggggtgggttttaagggtttgtaggagtggagagtgaggaatggtatttagatgtttgtgatatttcgtattttttgtaggtgtaatagaaggatgttttagatgaggatgtggttcgagttattaattagaagttgggggatacgtttggtgttttttatttcgatattgttgtacgagtttatggttgtggtcgtacggagttggttattaaggtgtgggtgtttagttttttatagatattttgatgtggttgtttagggtttttatgttagttttttttttttgtgtttttttttttattttatagttgttggagtatgagttacgtttaggggagtaggtatttttttttttaaagatgaagaggagtaaattggtattaagtaaggttatcgagagcggggatattgatttgggtgagggtaaggttggggggtttttgggttaagtgggagtttggttggaatttttattttattttatttttttgtagt

SEQ ID NO: 268 - DNA, 5182 bp, Artificial Sequence
  chemically treated genomic DNA (Homo sapiens)
attgtaggagagtaaggtggagtgggaattttagttaggtttttatttagtttaggggttttttagttttgtttttatttaggttagtgttttcgttttcgatggttttgtttagtgttagtttgtttttttttatttttaggagaaggggtatttgtttttttgagcgtggtttatattttagtagttgtgaggtgagaaggaaggtatagagagaaggagttggtatgggggttttgaataattatattagagtgtttgtggagggttgggtatttatattttgatggttagtttcgtgcggttataattataggttcgtgtagtaatgtcggagtaagagatattaggcgtgttttttagtttttggttaatggttcgagttatatttttatttgagatatttttttgttgtatttgtaagggatgcggggtgttataaatatttggatgttattttttattttttatttttgtaagtttttaggatttatttttttagttttttttttttttttttttttttttttttttttttttttttttttttttttttttttttttttttttttttttcgttttcgttatttttttttttttttttgagatagagttttgttttgtcgtttaggttggagtgtagtagtgtaattttagtttattgtaatttttgttttttaggtgaaagtaatttttttgttttagtttttcgggtagttgggattataggtatgcgttatcgtgttcggttaattttgtatttttagtagagacggggttttattatgttagttaggttagtttcgaatatttgattttaggtgattcgttcgttttagttttttaaagtgttgggattataggtatgagttatcgtgtttagcgtagttttatattttttattttttttattttattagggtttggaattttttaaatgtttttggattttattttatatttttgttttgtagtaggtttagtgggttaggattttgttgacgttttgtattttaggaaggcgtaagtattcgtatatttggatggttagggggtaaagttttcgtaatacgagtttggtagattcggtgggtaaaggatataaggagtgaggtggaggagaaagggagtagagtggttttagtttgtatattaggttttttatattttagataggttaggagtagtgattataagattttatttaaggttgtaatgtttatttttttgatagttcgtttattgtatttttgggtttattttatttgtttagtagtatttggatggtgagttgtttatatttgtatttttttcggttaaggatttagttggagaataagtttcgtttgttaggtatttgtagacgtatttttagtttttttttttgttatttttggttgtagggtatttttttggcgtgtatagggatattggttataggtgagcgggatttcgatgtgatagtttcgaatagtattgagtatacgtaggttttgatatatgtgtacgaagttgtcgggtggaaatttgtttaggaaatatttttcgaaggaggcggtttgagaagagttagagggcgataggagagagtttttttgttgtttattttatttttttttagttttatttttttcggttcggttatttaggttaattttgagtagatttttttgtatgtttggttggtgtttatgttttgtagttttaatgtattgttgtacggtttgggttagttggtttagtttttggatttttcgtaggtattcgttcgttttttggttttttttttggtggggagtagtttagagttagggtattatgatagagaatatttttatatttggtttttaattattttgggttgtggtttaaataagttgggttggaggagttgtataggttggagttttaatttttttagtttatttaatttatttgaggtgtttatagatattatttcgtattagtttatagttgtttttaggggggttttgagaattttttttaatagtaatttagattgggtggggatagtggggatgttttgttcgtttttattatattatatggaggatatagtgtttttttagtttatatgagttagttttttttagtttagattagtgttttgtttggattttttttttgataggtggtatttggttatgtttatatatgtttacgtaggggtaggaggaattattttgggattgggagagaagtttagggttttattttatattttttttgagtttttaggagtagcgtttcgggggttattgaggtaattttgaagattttttcgttggtcgttggggaagggagttggtgagtgagggagaaaggtagggaaatttttagttttgttttaatattttatttttgttttgtggtattggtttagggtagttggggtgtcgaggagtttttattttgggttatgtggtgtttttgtgaaggttttatttggaattttatgtaggaattcgtgggtgttgcgggagaagatgcggattttatcgagtttaggtattaggtaggagtttttatttagtataaatttgagtttggttaaggtttttaagagtatttatagatgggacggggtaggtgaattttttttttttttttttttatatataggtagttttttaaggatattggatgttttcgggtgtatcgtttattattattagtcgttttttttaggttattattacggttttttttttgttacgaggacggttgtatttgtgagtagtatatatatattggttagatattgttttatggttatgttttttatatggttgtttataattttttgtttcgggatagtttgtatatatttgtattattgattgtatattgatttttttattttttttttatttttgagtttttagtttaaggtagttgtggtttatagaggataatggttttttttaagtgtgtaatggtagagaaggtaagatttaaattttattaggtttggttagtagatatgacgaattaaggaattgattgttttaggaagtaagttatgttttatttatatttttagtaataatatttttatttttattagattatttgttttggaggtgttcggatgttgtagttgaatttatatagttttttttgaaatggtgtgggtaatgttatggttttgttttagtagttattattttagtcgaaaagttttttcgtattattaaaagattttgtattttggataaggtatagtatttttgtgttgttttaggattatattttgagtgatgttgtttttatttagatgtagtttgtgtttgtgaagagtgttaggtgtcggtaggtgaaggagatagttatttgtaggaagttgtttatttttggggttaggttagggggcgtttgaggtagagttagggtaggggtgggatagatatatattgattttttagaatttttttattgtttaatttagttcgtttattttatttttatttagggtttttattattgcggagtaggttgtatggtttaagaggtaaaggttaggttttatagttagaagaatgtgtgttattcggttttggtatagtatagtttagtaggagggtgtattttgtagatttatggttagggaaaaggatagtgttaggatgattaaggtttatcgtttttgtttttatgggtttttagttatagtttttgtttttatgggttttataggttagaggtatatttgtgggtattgtttggttattttagcggtgttagggtttatttggtatttttggtattcggcggagtttgaggttatttatattggtattgagggtgaagcggtgggtttttgtgaggatggttatttcggaattaaatttagtgtgaaagattcgggtatttagaattcggttttggagtattttttgaggaaagggggttatgggttaagggagttatagggttataaattttatttcgcgtttttagttttttgtgatttttatattgtttatgttgaagtgttttcggaagttattatgaagtttataaattagtatagtattatttttttgtatatagagtagtttttttttagttgattagtttagggatattacgggtttatttttttattgtaggggagagaggtttttaaggttgtttttaggtgaggaaattttgtttagttttgagttttagggattattagaagtgtttattagtaggttggttagaggtatgtcggaagtagagtatatatcgagtattggttttatattagtagtttttttttttcgttaggggttttttagtagtgttgtagtttgagaagagattttttgttttagttttttaggtttattttatgtgaagtaggttttatattttggttttttaggtttattttatgtgaagtaggtttataaaaattagaagtaaaagtattttagtagggtgagtggggggtggtaataagaataatttgatagtagggttttaggaattaaggattttgagtttattttagggttttagagtaggtggtggtggaggggtaatatattaatggggtttttatagggtgtagtagttattaggtaatttttgagttttttttttaggttttagtttatgttgtatagtttatattttttgtttatatagagatgagtagaaattagttttattattttgtattcgtatggagtgaattttagaggaatttttaaagtttttatttgttttttataaggttgtagaggaagtttttattttttatttttagagggagggaggagggtgatgattagaaagttgggtgaattgattatatgtatgtttagggatagtaggtaagggagtagagggtgttggtagggaaggatgtggtttttggggtaagtgtttaaggatggtaggagtttttgagttaggtaggttgcgtggttaatatttaaggtataaattgagatagaattaaagtgaagtggttggtttaggttagttttagtaggaaatgagatttttagaaaaggttttttagagaagaaagttttttttttatttttagttttttttttttgagagagggttttagtgtgttgtttaggttgaggtgtagtgttatagttatggttttttgtagttttaggtttaagtgatttttttattttagttttttgggtag

SEQ ID NO: 269 - DNA, 5504 bp, Artificial Sequence
  chemically treated genomic DNA (Homo sapiens)
tatatttgttgtaggttaaaattgtatttatttttgttagaatttattattgagtcggttcgaagtaaaatttagataaggatttgttattttgtagttgtttttaattgatatatttttttgattgttatgtttttttttaataaatatttgaggtttgtataataaaattattttttaggaggaaaggtattaaattggttttatgtttaatatgtgttaagtttgttatatgttgattttttttgtttaagtatttatagttaattttttttgtttgtttgtttttgtttttgagatggagttttattttgttatttaggttggaatgtagtggtgcgattttatttaatttttaatgagaagttatatatattaaaatatgtatattatatattataaaggttattaatttatttaagtaatatattttaaaattgtttttttaagttatttatgtagtttttttataagtaaagagtttagtaaaatttattaaaaaaaaaattaaagttaagattttattaatttttttgaatgtaaaatgatattaagtatagggtttagggtataatttgagattttgtttagaatttgaataatttttttttatgaattagtattggaaggtttattaaaatatagagggttttattattgagttttatttttagtatttttgatttttaggtttgtggtgaggttggtaagtttatatttttagtaagtttttagatgacgataatttgagagttatattttgagaattattgttttaacgggtattgtttttttttttttttttttttttttttttttattttttttttttttattttttttatttttttttttttgtttttaaaatgaatttttttttttttgttatttttttgttttttttttttttttttttttttttttttttttttttttttaggatagtatttaagattttaaatatttattttaaatatggtttagtaggattaataggattatgtttagaaggatttgtttaggatatttatttatgtaataatatttattaagttgatatgaagatttagtaaatgttggttgagattttatgaaaatttttgtgtaagaagagtaggatagataaagattttgttttaatagaattttttatatgatcgggaaaggtagatagtatataaatatataaatgattagattattattaaaagttattgttttgaattaaatggttattgagatgaagaataataaagatataatttttttttgtgaggttagaaagggattggttttttagaggtgtgttgaagttgaaatttaaaggacgagagaaagattgttaaatagagagtttggggaggagtggttgaagaagaggaaatgataggtataagagttttagggtaagttagttttataggtacgggatggggagtagagtttttaaaatttatattagagtttggtatataataggtggttagttagtgttcgttgaatgaaagtaaatgaattattagatttaagtaagtggagaataggaggtaagtaggagggaggaaagaaatgggtagaggttaggtaatgaggggtcggggtaaggattatgattttttaggttatgggtgatgggagtgtggattaatttaattagtttattttgttttttttttatttatttaatattattgttttttatttttatgtttagtttaaatttttgtttaaagtaacggtttttaaatagtggtttttagattttttgatgatttattgtattatttaatatttatgtttataatgtgataagatttatatttttagttatgaatttataattaataattttttttgagagaaggtttttattttgttgtcgaggttggagtgtagtggtataatttgggtttatggtaatttttgcgttttggggttaagtaatttttttgttgtagttttttgagtagttgggattataggtacgtattatagtatttagttaatttttgtattttttgtagagatagggtttttttatgttatttaggttggttttaaatttttggatttaagtgatttatttgttttagttttttaaagtgttatgattataggtgtgagttatcgtatttggttaattaatgtttttaaattgttatgatttttttttttttaagatagttgtttgtttatttatgtttaattaaaagtagttttattttttttatgtagtttgggaaaggttttttggtggtaaggaagaaagtttgttttttgaaatggtatagagtggttgattttaaatttttggaatgtaatttttaatttaaatagtgtttttatgtaggataagtaggtttaagagaagttgaggaattttaaataaagatgagaataaaaattaaaatgaattaatttatttatattttgtttagtagttttaaataaattttttatagaaaagatgatatttggaagttttttttagttttatatttttttgaatatattatagtttttttggattttttatgttaagttttgtatttttaaaaggaaaaatgttatcggtaaaagtttgagtttaaatttttttttttgttttatagtatgtttatgtttatgggttatttaggatttattaattatttgggagttttgttgttagttttaaggttttgttagtatattaaagtttgtaaaggtagtttaatgtagttgtgatattatttatttataatagttgtgtggtgtatttagagtaggtattattttaatgttatagttgaggaaattatattgttatttaaatatagtaagagaagaaaaatataatgttgtaaaggaataaaattgggaaaagttttttataaaggttgagggtagttagagtttgtaagaaggtttgtagtatttgtggagagtaggaggggatttttgttattgatgaggttgataggtatgttaggttgtgaagagttattgaatttgggtataaaatatagagtaaaagttttttattttgtaggtgatttaggtagagaaatagggagtttttttgtttttagaaatatatagatgttttaggtttgattttttttgagagtttgttaatttgaaaggatttgaaatttttggtttggttgtagattaaaagtttgtagaatttttcgaggggaagaaatttcgtttttttattaagaggtatttttaaaagtatgttttttaaaagaattgaagtaggttaggtatagtggtatacgtttgtaattttagtattttgggaggttaaggcgggtcgattatttgaggttaggagtttaaggttagtttggttaacgtggtgaaattttgtttttattaaaaatatatatatataaaaaaaattagttgggtgtagtggtatacgtttgtaattttagttatacggaaggttgaggtttaagaattgtttgaattcgggaggtagaggttgtagtgagttgaaatcgtattattgtattttaatttgggtgatagagtgagattttgatttaaaaataaataaataaataaatagaattgaaataatttttatttttttttttttttttgttttaattttttttaaagtagatatagtagatatagtagataataatatagttttatgtatagtttatttgaaaaagaaaggaatatgttatttttttcgttgatttgaaaattagaatgtggaattttattttttttggtagttgttagggatggtgttttaaaaaagtaataaaaaattataaaatttgttgtaatattttgttttttttatttgtgtataattaaatatttttgttttttagttattgggagtttttttaaaattagtttttagataaataatcgtttgggtattgaagtagttgttaaagggtatatagttagggttgaacgttgaataaatgttattttttttttaatttgtggagagttgattattaatagtagtttttataaatgagagtttatatggttgtttttttttggttggataattagggatgaaatggttttaattattggatgataaaattgttagttgtgggttgaatatttggtagtgattatatttgtcgttagcgttatttatataagatttagggaggatataaatttatataagagaaaagggaaagtgattgggagaaaagaatggttaagttgataatttttttggggttttttttttttgttagtgttaggggatgttatcgggataaatgaatgttttgaagtgagaagggtaaaagttttttaataaaagattttaggaaagagtgtaggcgatttggggaaatatgttgcggttaagtttaattttgggaaaaagtggttttggagaaagtagatgaggaagataggaaggaagatagggagggggagacgttgggtgtggagggaggaaaggggcgggggtgggggtttggaaagtgatagggagtaagtattaattgtggttaaggcgattgggtcgagaattatagattggggaaaagggagagtacgggaggaggaggaggtagagtttcgcggagtcggatcggatttttggtcgggaaggtatcggcgcggggtagcgggggtagtttggtttatatcgggttttttggtaggtttaggcgttggtttttcggggttttttttttcgtcggcgtattgtttttttgtcgggagacgaggaaattgttttttgattgcggaagttagcggacggggttggggcgaggtagcgcgggttagaatggtagcgtgggaagggcggcgcgttgtttgttttcgtcgtttttcgcgttcgtagttcgttcggggcggtaggagtagtagtagtagcggtggtcgtagtggtttttgcgcgtcgttagtttcgagggaagcgcgttgcgtttacggggcgcgttgagcgcgcgtaataggtgattttttgtttcggttttcgggtcgttttacgtttagttttttcggttttttttggattttaattattgagcgtaatgttgagttatggagtcgggttggttttgtggattatattgagtttgttgtaggtgagtggttcgagggggttagaattgatgcgtttttttttcgtcgaaaattaaatttttattttattttttcgtttatcgggttgtgttttgaagagggaggtggtaaaatttttttttttgttttgggaagaatgattttttggtgagttttttaatttagaatgatagtttattcggttgttaaagtaaaaagttattttttttttttagttgtttttaagggatagtagttagggagaaagttgttatttattttttttgtaagttttttttttggttagagggtaaaaggattggttgaggtaagggataaaggataagtagaggagaaagtgtggtttgaggagtttgttgtggatatgtttttgagtagtttagattgtggatttaaattgttgtgtttgatttttttgtaga

SEQ ID NO: 270 - DNA, 5504 bp, Artificial Sequence
  chemically treated genomic DNA (Homo sapiens)
tttgtaaaggaattagatataatagtttaagtttatagtttggattgtttagggatatgtttatagtaagttttttaagttatatttttttttttatttattttttgttttttgttttagttagtttttttgttttttggttagagaagaggtttgtaggggaggtggatggtaattttttttttagttgttgttttttgagagtagttggagagagaaggtggttttttgttttgatagtcggataagttgttattttgggttggggggtttattagaggattattttttttaaggtagaagaagaaattttgttatttttttttttaaagtataattcgatagacgagaaagtggagtgggaatttggttttcggcggggagggggcgtattagttttgattttttcgggttatttatttgtagtaggtttagtgtgatttataaggttaattcggttttatggtttagtattgcgtttagtagttaagatttagaggagatcgagggggttggacgtgggacggttcgagggtcggggtagggggttatttgttgcgcgcgtttagcgcgtttcgtgggcgtagcgcgtttttttcggggttggcgacgcgtaggggttattgcggttatcgttgttgttgttgtttttgtcgtttcgggcgggttgcggacgcgagaggcggcggggataggtagcgcgtcgttttttttacgttgttattttgattcgcgttgtttcgttttagtttcgttcgttgattttcgtaattaaaaggtaattttttcgtttttcggtaaaggaataatgcgtcggcgagggagggagtttcgaggagttaacgtttgagtttgttaaggggttcgatgtgggttaagttgttttcgttgtttcgcgtcgatattttttcggttaggggttcggttcggtttcgcggggttttgttttttttttttttcgtatttttttttttttttagtttgtggttttcgatttagtcgttttagttataattagtgtttgttttttgttattttttaggtttttattttcgttttttttttttttttatatttagcgtttttttttttttatttttttttttattttttttatttgttttttttaggattatttttttttaggattaaatttgatcgtagtatatttttttaggtcgtttgtatttttttttgaagttttttattagagagtttttgttttttttattttaaagtatttatttgtttcggtggtattttttgatattagtaagagaaaaagattttaaaaggattgttagtttgattattttttttttttaattattttttttttttttttgtataggtttgtattttttttaaattttatgtaaatagcgttaacgataaatataattattattaagtgtttaatttatagttaatagttttattatttagtagttaaagttattttatttttaattgtttagttaaaagaagatagttatgtaaatttttatttgtggaaattattgttgatagttagttttttataagttaaaaaaaaaatggtatttatttagcgtttagttttaattgtatgttttttagtaattgttttagtatttaaacggttatttatttgaaaattgattttagaaaagtttttaataattaaagagtaaaaatatttaattgtatataagtgagaaaagtaaaatattgtaataagttttataattttttattgtttttttggagtattatttttaataattgttaaaagaaatgaaattttatattttaatttttaaattagcgggaaggatggtatattttttttttttttaaataggttatatataaagttatgttattgtttattatatttattgtgtttattttgaggaaagttaaaataagaaaaaagaaaaaagtgaaaattgttttaattttatttatttatttatttatttttgagttagagttttattttgttatttaggttggagtatagtggtgcgattttagtttattgtaatttttgtttttcgggtttaagtaatttttaagttttagtttttcgtgtagttgggattataggcgtgtgttattatatttagttaattttttttgtgtgtgtgtatttttaatagagatagggttttattacgttgattaggttggttttgaatttttgattttaagtgatcgattcgttttggttttttaaagtgttgggattataggcgtgtgttattgtgtttggtttgttttaatttttttagaaaatatgtttttaaaaatattttttaatgaaaaaacgaagtttttttttttcgagagattttatagatttttaatttatagttagattagagattttaaatttttttaagttaataaatttttaaagaaggttaaatttagaatatttgtgtatttttgggaataaaaaaattttttatttttttgtttaggttatttgtagagtaaagaatttttattttgtattttgtgtttaagtttagtggttttttatagtttggtatatttgttagttttattagtggtaggggtttttttttgttttttatagatattgtaagtttttttataggttttggttgtttttagtttttataggagattttttttagttttatttttttgtaatattatgtttttttttttttgttgtatttagataataatgtagtttttttaattgtaatattggaataatatttattttaaatatattatatagttattatgaataaataatattataattatattaaattatttttgtaaattttaatgtgttagtagaattttaaggttgatagtagagtttttaaatgattagtgagttttaaatgatttataaatatgagtatattatgaaataagaggaagagtttaaatttaggtttttatcgataatatttttttttttaaaagtataaaatttaatatgagaaatttaagaaaattgtaatatatttaaggaagtataggattgaaaaaagtttttagatattattttttttatgaggagtttatttgaaattattggataaagtataaataaattggtttattttggtttttgtttttatttttgtttggaattttttaattttttttgagtttgtttgttttatataaggatattatttgaattagaagttgtattttagaaatttggaattagttattttgtattattttaggggataagtttttttttttgttattaggaaattttttttagattatatgggaagggtggggttgtttttgattaaatatgagtgaataagtagttgttttaaaaaaaaaaaagttatagtaatttaaaaatattaattggttaggtgcggtggtttatatttgtaattatagtattttgggaggttgaggtaggtagattatttgagtttaggagtttgagattagtttggataatatggagaaattttgtttttataaaaaatataaaaattagttggatgttgtggtgcgtgtttgtaattttagttatttaggaggttgtagtaggaggattgtttaattttaggacgtagaggttgttataagtttagattgtgttattgtattttagtttcggtaatagagtgaaaatttttttttaaaaaaagttattaattatgagtttatggttaaaagtatgaattttgttatattatgaatatagatgttgaataatataatgggttattaaggggtttgggagttattgtttgagaatcgttattttggataggggtttgaattggatatggggatgaggggtagtggtgttggatggatgaggggagggtagagtagattggttaggttaatttatatttttattatttatgatttaaaaggttatggtttttatttcggttttttattatttggtttttgtttatttttttttttttttttgtttgttttttattttttatttgtttgggtttgataatttatttatttttatttagcgaatattgattagttatttattgtgtgttaggttttggtataggttttggaggttttgttttttatttcgtgtttatggaattgatttgttttagagtttttgtgtttgttatttttttttttttagttatttttttttaggttttttgtttggtaatttttttttcgttttttaggttttagttttagtatatttttaaggggttagtttttttttgattttataaggaaaaattatgtttttattattttttattttagtggttatttaatttagagtaatgatttttggtaataatttaattatttatgtatttgtgtgttgtttatttttttcggttatatggaggattttgttagagtagaatttttgtttgttttgttttttttgtatagggatttttatagagttttaattaatatttgttgaatttttatgttagtttagtaaatattgttatatgaataaatattttaaataagtttttttaaatatggttttgttggttttgttggattatgtttagaatgaatgtttagaattttaaatattattttggaagggaagaggggaaagagaagagaaaaaagagggaagagtaaaggaatgataaagaagaaaagatttattttgaagataaagagaaaaaggtgggaaaagtgaagagagggaagatgaaaggaggaaaaggagaaggaggagggaggtagtattcgttagaatagtggtttttaaagtgtagtttttaaattatcgttatttgagaatttgttagaaatgtaaatttattagttttattatagatttaggaattagaaatgttggggatagagtttaataatggagttttttgtattttaataggttttttagtattagtttatgagaaggagttatttaaattttgaataaagttttagattatattttaaattttgtatttgatattattttatatttaggagagttaatgagattttggttttaattttttttttaataaattttattgagttttttgtttataagaaaattatatagatgatttagaagaataattttagaatgtattatttaagtgaattggtgatttttataatatataatatgtatattttgatatatataattttttattaaaaattaagtgagatcgtattattgtattttagtttgggtgatagagtgagattttattttaaaaataaaaataaataaataaaaaaaattaattgtgaatatttaagtaaaaaggattaatatgtagtaaatttaatatatgttagatataaggttagtttgatatttttttttttaggaggtagttttgttatgtaaattttaggtatttattagaagaaagtatagtaattagggaaatgtgttaattaaaaataattataagatggtaaatttttgtttgagttttatttcgaatcggtttaatagtaaattttggtaaaagtgaatataattttaatttgtagtaggtgtg

SEQ ID NO: 271 - DNA, 6061 bp, Artificial Sequence
  chemically treated genomic DNA (Homo sapiens)
gagcgagtaggagatggaggaatagaggcgttttgtagaaatggtttttgggtttgtggggaaggagaatagagaggtatttgagttttttttattttggagaggcgtgtggggttaagggagggaattttttttaggatgggaaagatatgcgtatgggtagatgggaatgttatagtgaagagggtgtagtggacggggaatagagagtaaagtttggaggcgtcggagtattttgagtataggggagatagagcggaaggaggagaggtgtgtgggtttgcggatttggtagtgggagatgagggagtttttttgtggtggtttttgtttttttcgggaaatataagtagtgtttattgagaaattaatttttgtattatttttttttgtttatagtgatttagtcggaagaaatgaaaggtattagttagggttaggtattgtagtttatggttgttgtaattttagcgttttgggaggttgaggttggaggattttttgagtttaggagttcgagattagtttgggtaatatgatgagattttgtttttataaaaaaaattttttttttttaattaaaaaagtattagttaagtttttgtgttttaagttttgggtttttttttttttattttatatttgagaaagtaaataggtcgttttgtagtttttgtgtttgagttaagagggagaatattattgtgttttggggaattgatgttttggtatggaagagaggggtaggggaataggtattttttattttattttgatttgtttttagaagaaagtggttgtatgcgattcgaaagttaaggattaagggttgtaattgcgggggtttgtgggagaggtttttttgaaagagttgggatggagggagtagagggttatttttttaaggattaggttggataagtgaggttttgtagatgggtaaaaaatagtggaagttttgtgattgtgattattgatgtttgtaatagtagtagtagtagtttgaaaaatttttttatttttttttgtaaggttgtggagtacggattgattatttttgggattgtgtaaatttttggagtttatggatgatcggagggagttgaagggtagttatgagtgatagggaaattttgttgatttgatgggtagagatttaagttgaatttaatttggtttagattaattaagggatgattaaaaggtgtatttacgttatgagttgtagagagtgtttagttggtttaggatttggataaagggtgagtagtgagtgggagttgatatttggttttttttttattttgtattttggggttggaatatagtagatatataatgattatatggtgttattcggtttttatagatgagtataaggatattttttttcgttaggtttaggagtagggtagtagggtagttttacgtggatttcgtgtttatagtttggtaaattggatagagttttggttttttttttttagtagttattacgtttttttaggttcggttatttgagttttttatttatgtggttttggtatttaggtttttagttttattattttgggtttgtatttagttttagatggcgtatatgtagagatttgggtaggttgtttataggtatttttttgttttgtttcgataaatattttgttatatgtgggtgaatgagagggtagacgttaatgggttaggattttgagatttttgtgtttttgtggggtttggagtaagagattggttggtatagtagtgagtatatttgttaattttaattataggaagttaggggttttagtttatttattttttagtattgtgtttagtagttttgataatgcggggtagagggaatagggttgttagagttttaggattattaaggtttaggttagtaggtatataggttagcgaatattacgagttttttttttagtgtatgttagggttatagaagattggggttggatgagttttaagatttggttagggagttgtttttttatttagttatttatgtttgatggttttttgagtatagataggaaagttaatttttattttttaataaatatgtattaagtatttattgtgtgtgaggattttgtgttggttattgggatatgatagggaataaggtggatttattttttttgtttgtaaggaattgttgtttataggttagggagataggtatagatataaatagtggtgatagttaggatggttttttggaggaaataatggttttaaataggtatagttggttttgaggtgttaaaatatattaaaggtagagtaagttttttattttattttattttttaaaatagagttttgttttgtggtttaggttggagtgtagtggagtaatttttattgtaatttttgttttttaggtttaagtaatttttttgttttagttttttaagtagttggaattataggtgtatatttggttaatttttgtatttttttttttttttagtagagatggggttttattatgttggttaggttggtttcgaatttttgatttcgggtgatttgttcgttttagttttttaaagtgttgggattgtaggcgtaagttattatgtttggttagtagagtaagttttaaggggtattatattataattgtatgtaagagaagttaggattagtttggttttgtgcgtgtgtggattgaaatttaaaagttagaaattttttgtatgtgttttttatggagttatatggtttttagtttttgttttttaaaatttgtaggattgatgattgattggatagtggtgtaggagggaaggtttttgtatgttagtgattaaattgttgaagatgttattgtttgagacgggtagtattgaaggtaagtagatttggggtgggcgggatagaggaggtttttagttatatggatttggagtttataggagcggtttagattggagatagagatttggaagttattagtatatggttggtagtggttaagatgatttagagaaaaggggtagagtaggagaaaagaggaggtttaggatagagtttcggaagagtagaagacgaggtggtaaaggaattagagatagtagttagtgaggagagggtgggttaatgaagttaaggaaaagaattgttttaataatttagtaatgggtaggaataattggttgaaaagtatatttttaaaatttgggggtcgagagggaatttttaaatttttaaagttttggaaaaaaaggtaaaaatgtttaaagatgtataaaatttgtaatatttttttcgtggtgtattaaaattattaatggtgaaaaattatttattggaaatatttatttttgattcgtttgttatttaaattaaattgtttagaattattggagttagttttattttttttttatacgttagggggcgtatacgtattgtttgtgaatttaagtttaggataaaaataggtagtgaattaggtggttattagaatttgattttttagtttagatttttgaatattatagtaattatgttttgtatattattacgtgatttttgaatttaggtattttaacgatttttaaattttattttttatttgattttaaatttatagggttattagaaagattttatagaagaaattttatagaggagaaattttatttttttttttgtttagttatttgatttagggtagtgggggtaggttttttattttttatggtgaagtttagtaagcggcggggggaggaggggtggggtagataggaaagagttggtgtggttttggttgatttttaagtggttttaatacggattgcgtgggggcggggtttggaggtaggggcgtttggattgaagtttattaaatttttttgattagtaggttttggaataaatttttaggtaggttattggttttatttagaaatttttagggttattatttgagtttggtatgagaagttagaaatttagtattgatatttaaattatatttagagggtattattatgtttttaatttcgaggttaatgtaaggtttatagttggaattggtataatattggggtattagttagtttttgtttggggttgatattaggttagagaagtggagggtgaatatgaggatgaaggggttttgtgtggagtttttgtaaagttagttttattttgggttttaagattattattaaagttgggttggtttagggttttaaatggttttaagtttgggtggggttttaggttagtatttgtgtttgggggtttttttatggtgatttaattttaattttggaattgagaatcgaatttagagtgtattggtgttgatttgggaatgggagagtagtattggagttttatgtaaggtttggggtttagaagagagataattggggtttatagtaaggtagtttttggattttagggtttatttagggattgggggttgagtattagtatagggttttatttaaggtttagcgttggtgttagcgttattattaaggttagggtaagtagaagtaataaagagatttagagttagaattggtatttgggattagtatagaggtttataataaaattattatttgtgttaatttgggggtagattaagggttttggatttaatattgggtttagggtaaggtgtgggtttagtattaggtttagatttgtatggggaggaaatggggttttagagtggtattaggtttatgttagggttgggagttattagaaggatttggatgtagtattagagtttggtttgtttatgtttattattggggttcgggtttaatattgaggtttcggtcggtttcgatttggcgttgggttgtggtttgtttgggttttagcggtttcgcggttttacgagcgagagtgtacgaggggaggggcgtcgtcgggggcgcgtacggtaggggtaggggcgcgggcgcgagcgcgaggggagcgcgcggttggagttggcgcgggagcggcgggagcggtggcggcggtagaggcggcggttttagtttcggtttcggttcgggttcgggtttcggtttcggtttcggtttcggttttagttcgggtggcggtggcgggagcgggattaggtggaggcggcggcggtagaggagtgggagtaaagtttttttattttttttgttcgcgagtacgggatggggagggggcgaacgggttgtattcgtttttaatcgggtgtaacgttttggaggttttggagcgatttgtttcgtgaggacgtggttattcggatttttttcgaaagtttatttttagtggcgcgttttcgttgttttttgtttcgtgttcgttttcggtttcggggggggggtgtcggcgtttttgtttcggttgttttttgtttttttcggggggtttgttttttcgtgttagtgttttttaattttacgtttttgtaattttagggtttttttagttgtttttattttttttttttaggttattttgttttttttttttaggtttttcgattttgtttttttgggtcgttttgttttttgtttttgagtttgtttttttcgtttgggtttttttattttttttttttgggtttttgtttttttttttaagtttttgttttttgttttttatttattttttggtgtttttgtattttttgtgttaggcgtttttttatttttttggaatgttgtttttttggtttttttatttcggagggggaggggttagattttttttttattttaagtttttttgttttttagtgtacggtttttgagttggagtaggttgggggtggggagcgttatttgtttgagttgtgaaatgggagagggaggttgttttagtttgggggttgtttggatttttttgaggggttatagggtagggtcgggaggttggattaggttgaggaaggttttatttttgaaggaataggggtagggatttagagcgatttggtgtcggatttggtttgagaagtagggaagtgtattggggtgagaggcgtagaaaaggatgtggggtggtggtttta

SEQ ID NO: 272 - DNA, 6061 bp, Artificial Sequence
  chemically treated genomic DNA (Homo sapiens)
tggaattattattttatatttttttttacgttttttattttagtgtatttttttgttttttaggttagattcgatattagatcgttttggatttttgtttttgtttttttaaaagtggagttttttttaatttaatttagtttttcggttttgttttgtggttttttagggagatttagataatttttaggttggggtagttttttttttttattttatagtttaggtaggtagcgttttttatttttaatttgttttaatttaggggtcgtgtattggggggtaggggggtttgaaatggggagaaagtttagttttttttttttcggggtggaagaattagaggggtagtattttagggaaatgggggggcgtttagtatagagagtgtagagatattaagagatgggtgagagataagaggtagagatttaaggagggagatagagatttagggagaggaaatagagagatttaagcggagagaatagatttagggatagggaataagacgatttagggagatagaatcgagagatttggggagaaagaatagagtgatttggggaaaaagaatggagatagttggagagattttgggattgtaggggcgtgagattgggaggtattgatacggggaggtagatttttcgaggaaaatagaaagtagtcgagatagagacgtcggtatttttttttcgaaatcggagacgggtacgggataggagataacggggacgcgttattggaagtgaattttcggagagggttcgagtggttacgtttttacgggataggtcgttttagggtttttagggcgttgtattcggttgggggcgggtatagttcgttcgttttttttttatttcgtgttcgcgaataaaaagggtgggggggttttgtttttatttttttgtcgtcgtcgtttttatttggtttcgttttcgttatcgttattcgagttggagtcggagtcggagtcggagtcggagttcgagttcgagtcggagtcgaagttggagtcgtcgtttttgtcgtcgttatcgttttcgtcgttttcgcgttagttttagtcgcgcgtttttttcgcgttcgcgttcgcgtttttgtttttgtcgtgcgcgttttcggcggcgttttttttttcgtgtattttcgttcgtagagtcgcggagtcgttgaggtttagataggttataatttaacgttaagtcgaaatcgatcggaattttaatattgaattcgaattttaataatgaatatagatagattaaattttgatattatatttagatttttttagtggtttttagttttagtatgaatttaatattattttaggattttattttttttttatatagatttgaatttgatattgagtttatattttgttttaaatttaatattgagtttaaagtttttaatttgtttttaaattagtataagtagtaattttgttgtgaatttttatattgattttaaatattaattttgattttaaatttttttattatttttatttgttttaattttgatagtgacgttagtattaacgttggattttaaatggaattttgtattaatgtttagtttttagtttttaaatgaattttaaagtttaaaagttattttgttatggattttagttattttttttttgaattttaagttttatataaaattttagtattgtttttttatttttagattaatattaatgtattttgaattcgatttttaattttagagttgggattgggttattataaaaggatttttaaatatagatattgatttgaaattttatttaaatttgagattatttaggattttaaattaatttagttttaataataattttggaatttaagataagattggttttgtagaaattttatataaagtttttttatttttatgtttattttttatttttttgatttagtgttaattttaagtagagattgattaatattttaatattatattaattttagttgtgaattttatattggtttcggaattaaagatatgataatgttttttaaatgtaatttaaatgttagtattgagtttttgattttttatattaaatttaaataatgattttagaaatttttgggtgaaattaataatttatttgaagatttattttaagatttattgattagagggatttgatgagttttaatttaagcgtttttgtttttagatttcgtttttacgtaattcgtgttaaaattatttaagagttagttaaagttatattagtttttttttatttattttatttttttttttttcgtcgtttgttaggttttattatgaaggatgggggatttatttttattgttttgggttaggtaattgagtagaaaaagagatgaggttttttttttgtggggttttttttgtggggtttttttgataattttgtaagtttggagttaggtgagaaataaaatttggagatcgttgaggtgtttggatttagggattacgtggtaatgtgtagggtatggttgttgtggtgtttagggatttgggttgaggaattaggttttggtaattatttgatttattgtttgtttttgttttgaatttgaatttataaatagtgcgtgtgcgttttttggcgtatgaggaggggatgggattggttttagtgattttggataatttggtttggatgataaacggattaaaaatgaatatttttagtgagtggttttttattattggtaattttggtgtattacgggggaggtattgtaaattttatgtatttttaagtatttttgtttttttttttagaattttgaggatttagagattttttttcggtttttaaattttaaaagtatattttttagttaattatttttgtttattgttgagttattaaaatagtttttttttttggttttattggtttattttttttttattggttattgtttttgatttttttattatttcgttttttgttttttcgggattttgttttaggttttttttttttttttgttttgttttttttttttggattattttgattattattaattatatgttgatgatttttaagtttttatttttagtttgggtcgtttttgtgagttttagatttatataattaagagttttttttgtttcgtttattttagatttgtttatttttaatattgttcgttttaggtagtggtatttttagtaatttaattattgatatgtagagatttttttttttgtattattgtttaattagttattagttttgtaaattttgaaaaatagagattagagattatatggttttatgagggatatatgtagagagtttttggtttttgggttttagtttatatacgtataaagttaaattggttttaattttttttgtatgtagttataatataatgttttttaagatttgttttattggttaggtatggtggtttacgtttataattttagtattttggggggttgaggcgggtagattattcgaggttaggagttcgagattagtttggttaatatggtgaaattttatttttattaaaagaaaaaaaaaatataaaaattagttaggtgtgtatttgtaattttagttatttgggaggttggggtaggagaattgtttgaatttggaaggtagaggttgtagtggagattgttttattgtattttagtttgggttatagagtaagattttgttttaaaaaataaaataaaataaaagatttgttttatttttagtgtgttttggtattttagagttaattgtatttgtttggaattattgttttttttaggaagttattttggttgttattattgtttgtatttgtgtttatttttttgatttgtggatagtagttttttgtaggtaggagaaatgagtttattttgttttttgttatattttagtggttagtatagggtttttatatataatagatatttgatatatatttgttaaagaatgaagattgatttttttatttgtgtttaaggaattattagatataaatgattaagtgagggaatagttttttgattaagttttagagtttatttagttttagttttttgtagttttggtatgtattagaagaggggttcgtggtgttcgttagtttgtgtgtttgttagtttgggttttggtagttttgaagttttggtagttttgttttttttgtttcgtattgttaaggttattgagtatagtattggaaggtaggtgagttgggatttttggttttttgtggttgaagttagtagatgtgtttattgttgtgttaattagttttttgttttaaattttatagggatataggggttttagaattttaatttattggcgtttgtttttttatttatttatatgtggtaaagtgtttgtcgaggtagggtaagagaatgtttgtaagtagtttgtttagatttttgtatgtacgttatttggaattagatataaatttaaggtaatgaaattagaggtttaggtgttaaagttatatggatgagaagtttaggtggtcgggtttgggagagcgtgatagttgttgaaggagaagagttaaggttttgtttagtttgttaaattgtgagtacggggtttacgtggggttgttttgttgttttgtttttgggtttggcggggagggatgtttttgtgtttatttgtgaaggtcgagtggtattatgtggttattgtgtgtttgttgtgttttagttttagggtgtagggtgaggagagagttagatgttagtttttatttattgtttattttttgtttaggttttgggttaattggatattttttgtaatttatgacgtaaatatattttttggttattttttagttggtttaaattaaattaaatttagtttgagtttttatttattagattagtaagatttttttattatttatggttgttttttagtttttttcgattatttatgaattttaggggtttgtataattttagagatggttagttcgtgttttatagttttgtagagaaaggtggaaggattttttaggttgttgttgttgttgttgtagatattagtggttatagttatagggtttttattattttttgtttatttgtagggttttatttgtttaatttggtttttgggaagataattttttattttttttattttagtttttttaagaggattttttttataggttttcgtagttgtagtttttagtttttggttttcgaatcgtatgtagttatttttttttgggggtaggttagggtgggatggagaatgtttgtttttttgttttttttttttatgttaaagtattaattttttaagatatagtggtatttttttttttagtttagatataagaattataaaacggtttatttatttttttaggtatgaggtgggagaaaaaaggtttaggatttagaatataaaagtttgattaatgtttttttaattaaaaaaaaaaaattttttttgtagggataaaattttattatgttgtttaggttgatttcgaatttttgggtttaggagattttttagttttagttttttaaagcgttgggattatagtagttatgagttgtagtgtttggttttggttaatgttttttatttttttcggttgagttattatgggtagggagaaatgatataggagttaattttttaatgaatattgtttatgtttttcggagaaaatagaagttattataggaggatttttttattttttattattaaattcgtaaatttatatatttttttttttttcgttttgttttttttgtgtttagggtgtttcggcgtttttaggttttgttttttatttttcgtttattgtattttttttattatagtatttttatttgtttatgcgtatgttttttttattttaaaaaaaatttttttttttggttttatacgtttttttagagtgggagagatttaagtgtttttttgttttttttttttataaatttaaaagttatttttataggacgtttttatttttttattttttgttcgttt

SEQ ID NO: 273 - DNA, 6694 bp, Artificial Sequence
  chemically treated genomic DNA (Homo sapiens)
aatggtgttattgtattttagtttgggtgatagagggaaattttattttaaaaatttaataataataaaataaaaaaatagaagtgtgtggtatttttcgtttttttttttttgtttttgttttcgatatgttatgtgtttgttttttttttatttttcgttatgagtggaaaagttttttgaggtttttttagaagttgagtagatgttagtattacgttttttgtataatttgtagagtcgcgagttaattaaaatttttttttttataaattatttagttttaggtatttttttatagtaatgaaagattggtttaatatagatgggggaatttttaggggtttttattttttttttttattattaaagtttttatattatagattagggaagttaaagtattgtgtttgttattttatgagaatgtcgattttaattttatttttaaggtttgaggaaggagttatatagggtttttagagtttcgttgatttattgtgtgatggtttttaggtgaatttttcgttcgttatttgatagttttaagtatattagttagattatgatttacggtgatttgtgtgtgtttttaaattaggattgatttagagttagagtttagtagttttttttttttttttaatttttagcgattatggatattggtttttaggagaaattgggaggaaggtttatagtatgtattttgattagtatcggtgagttttttttgagggaaaagtattcgttatatggaaggggttttaagattgagaattggtttaggattggtaataggtgtgaggttttaggggtggacgtcgttggtgttttatttagattttttttgtaggtattgagtatttatttttaagtagtgttggttgtttgtagatgttatatttttaagagatttggttttggttgggcgtagtggtttatatttgtaattttagtattttgggatgttaaggtaggcggattatacgaggttaggagttcgagattagtttggttaatatggtgaaatttcgtttttattaaaagtataaaaattgattaggtatagtggtttacgtttgtaattttagtattttgggaggttaaggtaggcggattacgacgttacgagatcgagattattttggttaatatggtgaaatattatttttattaaaaaatataaaaaattagttgggtatgttggcgggtatttgtagttttagttatttcggaggttgaggcgggagaatggcgtgaattcgggaggtagagtttatagtgagttgagatcgagttattgtattttagtttgggtaatagagttagattttgttttaaataaataaataaataataataataataataaaaagtagttgggtgtgatggtaggcgtttgtaattttagttattcgggaggttgaggtaggagaattttttaattcgggaggtggaggttgtagtgaggtaagatggtgttattgtattttagtttgggtgatagagtgagagcgagattttatttgaaaataaaataaaataaaaaaaataaaaaatttgtttttgatttgagaggaacgtgttttattaggaaagttatgaaatttttatttttggagaagtttatagataaagattagaggttaaaagtttagattttgtttttgtgatgggatttttttgaagtgatagttttatttggtttttttttttgttttatattgtttttattattttttgttttttgaaagtaaatttttaaatagtttatgagtatttgaatttttgttttaggttttgtttttgggaaatttgagtttaggttttttgttgttttattgtggtgattttggtttttgtttattagatttagagatggtattattatatatattaagtaacgtttttttggtgttttttattatataggtaagaggaattgaaaagaatttaggtgatgagggtcgtgttaatgggatttttattagtggtttcgtggaaatttttgtttttaaggggaaaagaggagtacggtcgagttttttttgaggttgttgttaagatgttggttggggttgtatttatttgaaggagggattggagttggagggttcgagttcgaggttttataggttttgtttttggtttgttttttttatatataggtagttgttttaggaggattttggaagttggggaatgtgggttattttgtggagtggttgatttttttattgtttttttttgttttttgagatggagtatttttttgttatttaggttagagtgtagtggtgcgatttcggtttattgtagtgtttttttttgggtttaagcgatttttttgttttagttttttgagtagttgtgattataggtatgtattattatgttcggttaatttttgtatttttagtatagatggttattatgttggttaggttggttttgaatttttgattttttgtttgaggttatttatttgtttcgggtttttatagtgttgggattataggcgtgagttattatgttcggtcgaggagttgggttttgaagagaaagtaagtagggtgtggtaggacggtgggtgtggagttaatgtaagtgatgtatttttttatagatagggagggtgagtatgtttataagttggggatttagatgggagggaagagagatagagggaagagatagtgaggaggaggaggaggattaggagagagagagagatattaaaaagtataggggagatagttgggtgtggtggtttatgtttataattttagaattttgggaggttaaggtaggaggattatttgagtttaggagttcgagattagtttgggtaataaagtaagattttgttttaataaaaaaaaaattttttttaagatatagacgagaaatagagaaaggttaaaatagaaatttaagtaagtgattggtatgaattatattcggtgtttattgaaaggaaatttttcgtaattaaatttttgtgtatatagatggggaaattgaggtttttagagatagagaaattgattttttaaagtggtggtgtgagaatttatttatttatttgttaattttgagatagagtttttttttgttattttagttggagtgtagtggtgtaattatagtttattgtagtttttattttttgggtttaattgattttttttttttagttttttgagtagttgggattataggtgtgtattattatgtttggttaatttatttttattttttatagagacgggatttttttatgttgtttaggttggttttgaatttttgggtttaaggaattttttcgttttagttttttaaagtgttgggattataggcgtgagtaattatgtttagttgttttgtttgttttttttttttttttttttttttttgagaaagagttttgttttgttatttaggttggagtgtagtggcgttattttgatttattgtaagtttcgttttttaggtttatattatttttttgttttagttttttgagtagttgggagtataggtgtttgttattatagttagttaatttttgtattttagtagagatggggttttattattttagttaggttggtttcgaatttttgattttaggtgatttgtttatttcggttttttaaattgttgggattataggtgtgagttatcgcgtttggttattgttttgttttttgagataggggtttattttgttatttaggttggagtgtagtggtataatcgtagtttattgtagttttgattttttagttttaggtgatttttttattttagtttttcggtagttgggattataggcgtgtattattatgtttgggtaattttttttttttttttgtttttttttgtaaagatggggttttgtatattgttcgggttggttttaaatttttgggtttaagtgatttttttattttagttttttgagtagttgggtatatattaatatgttcggttggggtttttattttttattttcgtattatatgtgagatgaaggtagtttacgtgtgtatatagtaagttaataaaaatattttgaaaagttttgggtgttaggttttttttgagtataggtggtttagggatgaattaaaaataaatatgattaatatttattaattgtttaaaatgggttaggtattgttttaagattttttacgtagtaatttatttattttttttagtatatttataagggtgtttattttttagagatgaggaatttgagttattgtggatttaagttatttgtttagggttatagatggatatgtaaattagagagtttggggtgtggaagatagtgtatagggttttgattaggttagaaaggttttaggttcggtatgggttatttttaagttgaattttaatggagtagtgggtaggagattgttagggggaaagtaggtaggtgtatttggtgggggagatagtttaggtaaaggttaagaggtaggagttcgttgggtttattttgtgagagttgtaggggtttgtgggagacggagaggggaaaggcgttagaggttgaatggaagagcgtgttttagggacgaggggtatgaggtttaagttttaggttgtttttgatgtgtgattatttattagggaggcgagggagttagttggttttttttttagtattttttgtttttattttttgttttacgtttcgtattcgtgtagtagtggggcgcggtattcggtatttggggtgtagagggagatttcgggggataaagtggagtgggttgggggttggagaaaggatgggaggtatttttagtgttagagttagaggtagcggtgagggaggaaggtgagggttagcggggtagggttgggagttgggttttattttttttttttttttttttcgttttggtttttggttttattaatgatttggtaaaggggaaatttttgagtgtaaagtttagtaggtggaaggattaggtttgggatttttgggttttcggtagtgtttggaggtatggttggggttggcgggggtttcggggtttgggggaatttggtgttgttggtaagtgtttttcgtttagagcgggtttttaaggtagggatttttaggtttgagggagaaggagttgggtgtttgtatttcgattttgaggaagtaggtgttgaagattttttggagaaggaagagggttttaggtttggtagagattgtaggagagttttatatttgggtttttagatattgtcgtgtttgttgcgggggatattagttttattcgggtttttagatattgtcgtgtttgttgtgggggatattagttttattcgggtttttagatattgtcgtgtttgttgcgggggatattggttttaggtaatatatagttgtgtttacggataggaagtagtttttttttttttaaattaagagtttagattttagtttttttttttttagatttaggagtttaggtttttagtttttttttttttagatttaggagtttaggattttagtttttttttttttagatttagggagtttaggtttttagtttttttttttttaaattaagagtttaggtttttaatttttttttttttagatttaggagtttagatttttagtttttttttttttagatttaggggtttagatttttagtttttttttttttaggtttaggagtttagatttttagtttttttttttttagatttaggagtttagattttagtttttttttttttagatttaggagtttaggtttttaatttttttttttttaaattagaggtcgagatttttagtttttttttttttagatttaggagtttagatttttagtttttttttttttagatttaggaatttagatttttagtttttttttttttagatttaggagtttagattttagtttttttttttttagatttaggagtttaggtttttaatttttttttttttaaattagaggtcgagatttttagtttttttttttttagatttaggtttttaggtttttaggttttttttttttagatttaggagtttagatttttagtttttttttttttagatttaggagtttaggtttttaatttttttttttttaaattagaggtcgagatttttagtttttttttttttagatttaggagtttagatttttagtttttttttttttagatttaggaatttagatttttaatttttttttttttaaattagaggtttagatttttagtttttttttttttagatttaggtttttaggtttttaggttttttatttttaggttaaggtttttgatttttaattttggtttttttttttttttttagtttgtttattgttttttgttttcggttttttaaggatatatattttaggaaatgaaattattaattttattttttagttttatcgggtggagttaattttagttttttaagttttgtttttgttatgttttttttttttttttcgatttaggaaagacggtcgaggtcgtgatagtttagtttaatatcggttttttttttttatgtaagggtgatttatggggcggggattagtcgttttttttagtttttcggttttattgggcggaggagtggttgagaggttgatttcgttttttttgggttttttttagg

SEQ ID NO: 274 - DNA, 6694 bp, Artificial Sequence
  chemically treated genomic DNA (Homo sapiens)
tttggagggaatttagagaaaacggagttagttttttaattattttttcgtttagtgaggtcgaggggttgggaggagcggttggttttcgttttatgagttatttttgtatgggaaggaggggtcggtgttaggttgggttgttacgatttcgatcgttttttttgggtcgaggagagaagggggagtatggtaggagtagagtttagggagttggggttggttttattcgataaggttgagagataaaattaatgattttattttttgaaatatatgtttttggaaaatcgagggtagagagtaatgaatagattgggaagggagaaaaaaattaaggttggggattaggaattttggtttgagggtggagggtttgggggtttgggggtttgagtttgagggaggaggggttgggggtttggatttttggtttgagggaggagaggttgggggtttggatttttgggtttgagggaggaggggttgggggtttggatttttgggtttgagggaggaggggttgggggtttcgatttttggtttgagggaggagaggttgggggtttggatttttgagtttgagggaggaggggttgggggtttggatttttgggtttgagggaggagggtttgggggtttgggggtttgggtttgagggaggaggggttgggggtttcgatttttggtttgagggaggagaggttgggggtttggatttttgagtttgagggaggaggggttggggtttggatttttgggtttgagggaggaggggttgggggtttggatttttgggtttgagggaggaggggttgggggtttggatttttgggtttgagggaggaggggttgggggtttcgatttttggtttgagggaggagaggttgggggtttggatttttgagtttgagggaggaggggttggggtttggatttttgggtttgagggaggaggggttgggggtttggatttttgggtttgaaggaggagggattgggggtttggatttttgagtttgagggaagaggggttgggggtttggatttttgagtttgagggaggaggggttgggggtttggatttttggtttgagggaggaagggttgggggtttggattttttgggtttgagggaggaggggttggggttttggatttttgggtttgagggaggaggggttgggggtttggatttttgggtttgagggaggaggggttggggtttggatttttggtttgagggaggaggggttgttttttgttcgtgagtatagttgtgtgttgtttgaagttagtgtttttcgtagtagatacgatagtgtttaagggttcgggtgaagttggtgttttttataatagatacgataatgtttaagggttcgggtgaagttggtgtttttcgtagtagatacgatagtatttaagagtttaggtgtaagatttttttatagtttttgttaagtttgaagtttttttttttttttaggggatttttagtatttatttttttaagatcgaggtgtaggtatttagtttttttttttttagatttgggagtttttgttttgggagttcgttttgggcggggagtatttattagtagtattaggtttttttagatttcgaggttttcgttagttttagttatgtttttagatattgtcggggatttaggagttttaggtttagtttttttatttgttggattttatatttaagaattttttttttattagattattggtgaagttagaggttagggcgggaaggggaggaggaggaagtggaatttagtttttaattttgtttcgttggtttttattttttttttttatcgttgtttttagttttgatattggagatgttttttattttttttttagtttttagtttattttattttgtttttcgaaatttttttttgtattttaggtatcgggtgtcgcgttttattgttgtacggatgcgggacgtggggtagaggatgagagtagggggtgttgagagaaaggttagttgattttttcgtttttttggtgggtgattatatattaagagtagtttggggtttagattttatgtttttcgtttttggagtacgtttttttatttagtttttgacgtttttttttttttcgttttttataagtttttgtagtttttataaaatgagtttagcgggtttttgttttttggtttttgtttagattgttttttttattagatgtatttgtttattttttttttaatagttttttatttattgttttattaggatttagtttggaaatgatttatgtcgggtttggggtttttttagtttggttaggattttgtgtattgttttttatattttagattttttaatttgtatatttatttgtgattttgagtaaatgatttaaatttatagtgatttagattttttatttttaaagaatgggtatttttgtaaatatgttaagagaaatagatgagttattacgtggaaagttttggaataatgtttggtttattttaaatagttgataaatattagttatgtttatttttagtttatttttaggttatttgtgtttagaaggggtttgatatttagggttttttaaggtgtttttgttgatttattatgtgtatacgtggattgtttttattttatatatagtgcggaaatgaagaatagaaattttagtcgggtatattggtgtgtgtttagttatttaggaggttgaagtgggaggattatttgagtttaggagtttgagattagttcgggtaatatataaaattttatttttataaagaaaaataaaaagagagaaaaaattatttaggtatggtagtgtacgtttgtagttttagttatcgggaggttgaggtgggaggattatttgagattgggaagttaaggttgtagtaagttgcgattgtgttattgtattttagtttgggtgatagagtgagtttttgttttagaaagtaaaataatggttaggcgcggtggtttatatttgtaattttagtaatttgggaggtcgaggtgggtagattatttgagattaggagttcgagattagtttggttaagatggtgaaattttatttttattaaaatgtaaaaattagttggttgtggtggtaggtatttgtatttttagttatttaggaggttgaggtaggagaatggtgtgaatttgggaggcggagtttgtagtgagttaagatagcgttattgtattttagtttgggtgatagagtaagatttttttttaaagaaaaaaaaaaaaaaaaaaaaagtaaataaaatagttgagtatggttatttacgtttataattttagtattttgggaggttgagacgagaggattttttgagtttaggagtttaagattagtttgggtaatatagggagatttcgtttttataaaaagtagaagtaaattagttaggtatggtggtgtatatttgtggttttagttatttaggaggttgaagagggaagattagttgagtttaagaggtggaggttgtagtgagttgtgattgtattattgtattttagttggggtgatagagggagattttgttttaaaattaataaataaataaataagtttttatattattattttgagaagttagtttttttgtttttgagagttttagtttttttatttgtatatataaaggtttggttgcgagaagtttttttttagtgggtatcggatgtaatttatgttaattatttgtttgggtttttgttttaatttttttttgtttttcgtttatattttaaaaaaaattttttttttattgagatagggttttgttttgttgtttaggttggtttcgaatttttagatttaagtgatttttttattttggttttttaaagttttaggattataggtatgagttattatatttagttgttttttttatattttttgatgttttttttttttttttggtttttttttttttttttattgttttttttttttatttttttttttttttatttagatttttaatttataaatatgtttattttttttgtttataaaaaaatgtattatttatattgattttatatttatcgttttattatattttatttgttttttttttaaaatttaatttttcggtcgggtatggtggtttacgtttgtaattttagtattatgggagttcgaggtaggtggatgattttaggtaggaggttaggagtttaagattagtttggttaatatggtggttatttgtattaaaaatataaaaattagtcgggtatggtggtgtatgtttgtaattatagttatttaggaggttgaggtaggagaatcgtttgaatttaggaggggatattgtagtgagtcgagatcgtattattgtattttagtttgggtgatagagggatattttattttaaaaaataaaaagaaataataaaaaaattaattattttataaaatgatttatattttttagtttttaaagtttttttggagtagttgtttgtgtatggggaaggtaaattaaaaataaaatttgtaggatttcggattcgggttttttaattttagttttttttttagatgaatgtagttttagttaatattttagtagtaattttaggagagattcggtcgtgttttttttttttttttaagaatagaaatttttacggagttattaatgagagttttattagtacgatttttattatttgagttttttttaattttttttatttgtgtgatgagaagtattaagagagcgttgtttggtgtatgtaatgatattatttttaggtttggtgagtaggaattagagttattatagtggggtagtagagggtttgggtttaggttttttagaagtagagtttgaggtagggatttagatgtttatgaattgtttgagggtttgtttttagaagatagagagtgatgaaagtagtatggggtagaggaaggagttaagtgaggttattattttagagggattttattatagagataggatttgaatttttaatttttaatttttgtttatgggtttttttaggggtgagagttttatgatttttttagtaaaatacgttttttttaggttaagagtaagttttttgttttttttgttttgttttgtttttagatgaaatttcgtttttattttgttatttaggttgaagtgtagtggtattattttgttttattgtaatttttatttttcgggttaaaggatttttttgttttagtttttcgagtagttgggattataggcgtttgttattatatttagttattttttgttgttgttgttgttgtttgtttgtttgtttgagatagagtttggttttgttgtttaggttggagtgtagtggttcgattttagtttattgtaagttttgtttttcgggtttacgttattttttcgttttagttttcgaagtagttgggattataggtgttcgttaatatgtttagttaattttttatattttttggtagagatggtgttttattatgttagttaggatggtttcgatttcgtgacgtcgtgattcgtttgttttggttttttaaagtgttgggattataggcgtgagttattgtgtttggttaatttttgtatttttagtagagacggggttttattatgttggttaggttggtttcgaatttttgatttcgtgtgattcgtttgttttggtattttaaagtattgggattataggtgtgagttattgcgtttagttaagattaagttttttgagaatgtggtatttgtaagtagttaatattgtttaagaatgagtgtttagtgtttgtaaaggagatttgggtgaagtattagcgacgtttatttttaaagttttatatttgttattagttttgagttagtttttagttttggaattttttttatgtagcggatgttttttttttagggaggatttatcgatattagttaaagtatatattgtaaattttttttttagttttttttaaaggttaatatttatggtcgttggggattagagaaagagaaaaggttattggattttgattttgaattaattttaatttggaggtatatataggttatcgtgaattatggtttgattggtgtgtttggggttgttaggtaacgaacggagggtttatttaaagattattatatagtgggttaacgggattttaaagattttgtgtggttttttttttaggttttgagagtgaagttgaaatcgatatttttataaaatggtagatataatgttttggtttttttgatttgtagtgtgaaagttttgatggtgggaagaagaaatggaagtttttagaaatttttttatttatattgggttagttttttattgttataaagaaatatttgagattgggtaatttataaagaaaagagttttaattggttcgcggttttgtaggttgtataggaagcgtggtgttggtatttgtttagtttttgggaaggttttagggagtttttttatttatggcggaaggtgaagagggagtaggtatataatatgtcgaaagtaggagtaagagagagaggacgggaggtgttatatatttttatttttttattttattattattaaatttttgagatggagtttttttttgttatttaggttggagtgtagtgatattatt

SEQ ID NO: 275 - DNA, 6107 bp, Artificial Sequence
  chemically treated genomic DNA (Homo sapiens)
ttatttgattagaaattgtttaagattatatagagagaattttttgagaaatgtaggtaagtggtattattattttttttatttttgaatattttattgttaaggtttaagagttaagttaattggataggttatagtgtaattttagggaggagttaggttttgttttataatttaaggttttagtgtttatttagggtgatagtttttaagggtatgataagtatatttttttattttggaagtttttgttttatttatgggttttattgttagaaattttttgttttttttgtttttagggatttttttgataatatacgtatttatgtaagaagttttttgtaagaaagtgtttataggtgtgttttttttttaaagagaaaatagaagtttatttttatttattaggttaagaggttttgtaagaattggtttgaggattttgatatttgatttaaataaaaatttttagagataagaattaggtatataggaattggaaaaaaattagatttagaattcgaagattttaggttagagttataattttgttattagttagtagtataattttgggtaggtattttaattgttttaagttttgatttttttttttagttaagtgaaattaattatatttgttttgttttttttatagagttggagtgaggatagattatgatttattatatttatgtgggtgaatatgttttataaattaaaaagcgtaatataagtagttagttattattaataagttgagaatattatttaattgtttataaatatatgttgtgtgtatatttatgatttgttattgggtaaataaaattttgttttcgtttagtataagtttgtgtatagttttttagtgaataagataaggaaaataatatttagtagttgttattaattaggtttttttatgtttatgttttttttttttttttttttgagatggagtttcgttttgttgttagattggagtgtagtggtataattttggtttattgtaatttttattttttgggtttaagtgatttttttgttttagtttttcgagtagttgggataataggtatatgttattatgtttagttaatttttgtatttttagtagagatagggttttattatgttggttaggatggttttgattttttgatttcgtgattcgttcgttttagttttttaaagtgttgggattataggcgtgagttatcgtgtttggttttatgtttatatttataagtaaatttgtagttttataagaaaagaaaatgtatatatatatatatatttatttatttatatatatagatagatatatatatatagatagatagatatataatttaattttataaaaatattattattttatttttataaaaaggaaattaagatacggtggtattaaatgttgtttaatgtaatgtttttaaattttgttttttggaattttggttttgagatttatttttttattaaagcgttttatggtttaaaattttgagaaataatgaattttttttttttttttaatagatttatagtatatgatattatatcggaaattatgggaaagattttataataaagaagtttgttatattgaagaaatttgttaaattttgtttagtttagagtttttcgagttaatttaattttgaggttgtatttttgaattatatttatttaaatttgatagaattgggattttatagaaaatatttgttaaatgtagatttaagattatgattggagttagtgtgtggtagatttgtaattagaatataaagttgtttttttttaaaagaaataatgtaattataggttaaaataataggaaaatagagaagagtttttataaaattttagtatattatatttattgttaattatattaatattatgttttgtaattttttttagtttttttttttttttggttatagtataaagatttttgttttttgtttttgtttattgttgtaaaatatatatagtataaattttattattttaataattattgagtatgtaatttggtggtattgagtttatttatgttgttaggtaattattattattatttttttttagaatagttttatttttttaaattgaaattttgtattgttttttgatgattttatttaatatttgattataagtatttttttattttgtaatttattttttttataatttttatttttagtggttatgagatattttattatataatgtttatgaatttgtttattgtagaatatttatatttttttttttttgaaatgataaatatattaaataatattttttatattttggattatttatttgtaatagtttttagattaaagaataggaagattttagtgatttttaatgtaggttgatgatttttttttttaaaagtttaattaaatttatatttttattgatttatgtatttatttatttttttaaataaataaaaatttattaatttttaatatttgttacgtatttagttatgtagaagatttattagatttttatttaagtgattttaatttatattggtcgtattagttatgtataaaaggaataatgtatttatttaaaagttttattgtatgtttttgatttttagtgagaaattatttgtgttggtttgttgattttttttgagaatttttttttttttttttgtatcgttttttttattttttatttaagtatgtgtttttgggtaagttatttaatttataattttgtttttttatttgttaaatgggaataattgtattaaagtttttacggaattgttgattgaatttaatgaaatattgaaaattttgatgttttagtgtgatattgtatattttaagatagtgtttagaatatttgaagaattttttaaatattatttgttattattattatttttatgatagagaaattaataaagttttatgaaatgaattttttattagttgttttttaaaatgggtaaggtaagaattgtgtgtattttgttttggtattgtgtgaaaatatttaaagaagttttttgtttgtgtgtttaaataaataaattattacgttatgaattttttttatattttttataagagtagaatagatgaattagtatatagatagtagggttttgtttgtttttattgggaaaaattgttgttaaattttaggaagttttgttgtttttaaaaagaaaaatatgttttttagttttttgttatttgggatttaggaatgttttttaattaaagaaatggaatggtgatggtgtgttgaaaggtataggttaatgagttaaaaaaaaaaaatttatattgtattttaaggaaggatgaatttaattatgttgaattgaattgataagggttgagttagttagtgtgttaatgagtaggttattatttttatagaatttttaaaagttttttttgtttgatatgtatgtgtgtataatatgtatttatatatgtatatatttgtgtgtatatttattatatttttgtttttataggttttgttataagtttggttattaatagtatatatttgattaaaagaatatgtggtttggtaaattatgtgaatgttatattaaaatgaattttatattgttttgatttataaaggttaagatgtttgagaaattgagagatgttaattaatagattattgttttagtaattgtatataatatataaaaattttgaattaaagttattatgttatttaattgtgattatatttattttttgtgatattttataaaaatgaataaagtatgtattatatagttttattatagaagtaaggtagggtggtatatggcgaaattattttaagttgttgaagtagttaattgtgaaatattttattgttataatatagtattattttttgttagatgaattatttcgaagaagttgtttttatggttagtgtaaaagtttttttgttaaatatttatgttttaattatttattagatattaaaaaaaataaaattatatatatattagatttaggtgtaaggaagggataataagttttgatgtagtttttaggtgagaattggaaaggggtcggagggttttagagtaataagtaaagttagtgaagtagagtaaatttaaatatttggttaatgataaataaattagaaaggagatacgttagttgtttacgttggaaagttattgatcgtttattttggtttaagttttatttattttatgaataagggataagttttcgatgggggtggggtgttttattttttattataagaataaggaacggggagtttttaaggtaggcgggtgtttttttagggcgtttttatattttttttttaattagtaatcgttcggggggatttttattttgggacggaattttaggacgttttttttcggacggcgggggtttttttgcgcgcgttttcggtcgtttggtcgtacggtttatcgaattttcgttttttaaattttgagttttggaatagggtagcgagttgcgtcggtttttttttttcgttcgtttttttcgagtagcggttggcggcggggtttaggttgcgaataaaggcggcgcggggcgcgcggtcggggttggcgcgcgttttttcggtaggaggcggtggcggcgtcgcgttcgagttcgtattttttagaagcgttcggagttcgcggggcgacgttattttcggtttcgttttcgttttttttcgagtaaagtaatttttgattaataggagtagttttcgtcgagtatggagagttgtcgtcgcggtcggtcggcgacgttggcgacgttttcgtttttgaggtagtttggcgatcgcgaagaaggaaaaagggcgggcgggcggttgtttttttatcgtttttatttcgcgaggttcggttcgttttttcgtcgtggatttcgcggcgattttttcggtagttttttgtaaagttgtttgaaattttttttaaattcggtatggatacgattgcggcggcggcgttgtttgtttttgtggcgtttttgtttttttttttttggttttttttgggatcggtttaaggttagtttttcgtaggtgagtggtcggggggcgttttcgacgaacgtttggagttttgggtttacgaggggtgagttaggttttcgttagggttggggataaggatcgtggggagttttttttgttcgggggtggggaatatagggtagagggagggttgtttttagagttcgtgttaggtgggacgcggggtatttattgttttttttcgaagtttgttcggggtttaggttggtacggtttagtcggagagtgtggggatttgttggtttcggcgtttcgcgtggtttgcgtcgggttagtggggaagagagaaagaaaaagtagttacgattttcgtgacggtattttgttgtttgtggtgcgggtttgttgttgtttgttatttgggtgtttaaataaattttttgggaagttattgttagaaatgtggagattcgaagggattgatttcggcgcgttttgttaggtgttttttgtttcgggaataattttttttgattattgtttaattattttttcgtttttttcggagtttttttttttttttttttagttttgggttgttttcgggtttgttttgtgcgttcgggtattgtttggagtatgttttgtgtgtgtgttggcggagttttgtaagatgtgttgaaatgcggttttaaggatttattttgagcgtttatgggtatcgaggtttgggcgtttggtggaggaagtttgattcgcgcgtgggagttcgtttttcgggtaaaattatcgttaggttggtttcgcgtttttcggattcggtttggggttttggtttcgcgtttttcggattcggtttggggttggaagcggattgtaaatgtttgttttttgtcggagaatttaaaaggagataagtggagcgtttcgttgtagttttgggggttttcggttaagtcgtttagagaagttcgtgaattttggttttttcggtttcgttttttgtttttttttagttttgttatttttcgtgtaggttg

SEQ ID NO: 276 - DNA, 6107 bp, Artificial Sequence
  chemically treated genomic DNA (Homo sapiens)
taatttatacgaaggataataaaattggaggggaatagagggcgggatcgggagagttagggtttacggatttttttgagcggtttgatcgagaatttttagggttatagcgagacgttttatttgtttttttttgggtttttcggtagaaggtagatatttatagttcgtttttagttttaggtcggattcggggagcgcggggttagagttttaggtcggattcggggagcgcggggttagtttggcggtggttttgttcgaggagcgggtttttacgcgcgagttaggttttttttattaggcgtttagatttcgatgtttatgaacgtttagagtgggtttttagaatcgtattttaatatattttatagggtttcgttaatatatatatagaatatgttttaagtagtgttcgagcgtatagggtaagttcgggagtaatttagagttgggggaggagaaaaggggatttcgggagggacggggaagtagttagataatagttaggggaggttattttcgggataaaaagtatttggtaaagcgcgtcgaggttagttttttcgaatttttatatttttgataatggttttttagggaatttgtttaaatatttaagtggtagatagtaataaattcgtattataagtaatagagtgtcgttacgggagtcgtaattatttttttttttttttttttttattagttcggcgtaggttacgcgagacgtcgaagttagtaggtttttatatttttcggttagatcgtgttagtttgagtttcgagtaagtttcggagaggaataatgggtgtttcgcgttttatttggtacgaattttggggatagttttttttttattttgtgttttttattttcggatagagagagttttttacgatttttgtttttagttttagcggggatttggtttatttttcgtgagtttaggattttaggcgttcgtcggggacgtttttcggttatttatttgcggagaattggttttgggtcgattttaggagaggttaaggagagaggagtaagagcgttataaaagtaggtagcgtcgtcgtcgtagtcgtatttatgtcgagtttgggagaagttttaagtagttttgtaaagagttgtcggggggatcgtcgcgaaatttacgacggaggagcgggtcgggtttcgcggggtgaggacggtgagaggatagtcgttcgttcgtttttttttttttttcgcggtcgttaaattattttaggggcgaaagcgtcgttagcgtcgtcggtcggtcgcggcggtagttttttatgttcggcggaggttgtttttgttagttaagagttattttgttcggggagggacgggggcggagtcgggggtgacgtcgtttcgcgggtttcgggcgtttttgaggaatgcgggttcgggcgcggcgtcgttatcgttttttgtcggagagacgcgcgttagtttcggtcgcgcgtttcgcgtcgtttttgttcgtagtttgggtttcgtcgttagtcgttgttcggagggagcgagcgagaaaggggagtcggcgtagttcgttgttttgttttagaatttagaatttgagaggcgagagttcggtaagtcgtgcgattagacgatcgaggacgcgcgtagagaaattttcgtcgttcgaggagaggcgttttggggtttcgttttaaggtggaggttttttcgagcggttgttgattgaaaggggagtgtggaagcgttttgaggaaatattcgtttgttttgaaaatttttcgttttttatttttgtaataaggaataagatattttatttttatcgaaaatttgttttttatttatagaataaataaaatttgaattagaataaacgattagtaattttttagcgtgaatagttggcgtgttttttttttggtttatttgttattggttaagtatttggatttattttgttttattgattttgtttgttgttttgaaatttttcggtttttttttagtttttatttaagaattgtattagggtttattattttttttttgtatttaggtttggtgtgtgtgtggttttgttttttttaatatttagtaggtagttaagatataagtatttaataaaaggatttttatattgattatgaaaatagttttttcggaatgatttatttggtagaaaataatgttatattatgatagtaaaatattttatagttaattattttagtagtttgaagtggtttcgttatatgttattttgttttatttttgtggtaagattgtatggtgtatattttatttatttttgtaaaatgttataaaaaataggtatggttataattgaataatataataattttgatttagaatttttatgtgttatgtataattgttaaaataatagtttgttgattgatattttttagttttttagatattttagtttttgtaaattaagataatgtgaaatttattttaatataatatttatataatttattaagttatatatttttttaattaaatatatgttattaatgattagatttatgatagagtttgtggaaataaaaatgtaataaatatatatataaatatatatatatataaatatatattatatatatatatatattaggtagaaaagatttttaaaaattttatgagaatagtagtttgtttattagtatattgattagtttaatttttgttaatttagtttagtatagttaagtttatttttttttagggtgtaatgtagattttttttttttaatttattaatttatattttttaatatattattattattttatttttttaattagagaatatttttagattttaggtaataaaaaattgagggatatatttttttttttgaggatagtagaattttttaaaatttagtagtaattttttttagtaaaaataaataaaattttattgtttgtatattaatttatttgttttatttttgtaagaaatgtaaaagaagtttatgacgtggtaatttgtttgtttaaatatataaataaaaaatttttttaaatatttttatatagtgttaggataaagtgtatataatttttattttgtttattttgggggatagttgatagaagatttattttatgaaattttattaatttttttattatggaagtaataataatagtaggtaatgtttagaaagttttttaaatgttttaggtattgttttagagtatataatgttatattgagatattaagatttttagtgttttattgagtttagttaataatttcgtgaagattttggtataattatttttatttgataaataagaaaataaggttatagattaagtaatttatttaaagatatatatttaagtgagaagtgggggaggcgatgtaaagagaagaaaggaaatttttaaaagaaattagtaaattaatatagatggttttttattaaaaattaaaagtatgtaataaaatttttaggtaagtatattattttttttgtgtataattaatgcgattagtatggattgaaattatttgagtagaaatttggtgggttttttatatagttaagtgcgtggtaaatattaggaattagtagatttttgtttgtttgaaagaataaatgaatatatgaattaatagaagtataaatttggttaaatttttaggaaaagaaattattagtttgtattaaaaattattaaaatttttttattttttagtttagaagttattgtaagtaaataatttaaaatatgaaaaatgttatttaatatgtttattattttaaaagagaaagaatataaatattttataataggtagatttataagtattatatggtagaatattttatagttattagaaatgaaagttatgaaaaaagtaaattgtaagatggaaaaatgtttatgattaaatgttgggtaaaattattagaagataatatagagttttagtttagaaagataaaattgttttggagagggatggtggtaatagttgtttaataatatgaatggatttaatgttattaaattatatatttaataattgttaaaatgataaagtttatgttatgtatattttataataataaataaaaatagaagataaaggtttttgtattataattaagaaaaaaagaaggttgaaaaaaattataaaatatagtattaatatagttagtaatagatgtagtatattaaaattttatgggagtttttttttatttttttattgttttggtttatggttatattattttttttaaaagaggatagttttgtgttttgattgtagatttattatatattaattttaattataattttagatttgtatttggtaagtgttttttgtagaattttagttttattagatttaaataagtataatttaaaaatatagttttaagattaaattagttcggagaattttggattgagtaaagtttaatagatttttttaatatagtaagtttttttattatagaattttttttatggttttcgatatggtattatgtgttataagtttattggagaaggaaaaagaatttattgttttttaaagttttggattatagaacgttttaatagaggagtaggttttaggattagggttttagggaatagaatttgggaatattgtattaaataatatttaatattatcgtattttaattttttttttgtgaaaatgaagtaataatatttttataggattaaattatatatttatttatttatatatatatatttatttatatatatagatagatagatatatatatatatatatattttttttttttgtagagttgtagatttgtttgtaagtatagatatgaggttaggtacggtggtttacgtttgtaattttagtattttgggaggttgaggcgggcggattacgaggttaggagattaaaattattttgattaatatggtgaaattttgtttttattaaaaatataaaaattaattgggtatggtggtatgtatttgttgttttagttattcgggaggttgaggtaggagaattatttgaatttaggaggtggaagttgtagtgagttaagattgtgttattgtattttagtttggtaatagagcgagattttattttaaaaaaaaaaaaaaaaaaagtatagatatgaaagggtttggttgataatagttgttaaatgttattttttttgttttgtttattaaaggattatgtataaatttgtattgagcggaagtaaggttttatttatttagtggtagattatgagtgtatatatagtatgtatttataagtaattagataatatttttagtttgttaataataattaattgtttatattacgttttttagtttgtaaagtatatttatttatatgaatatgatggattatgatttatttttattttaattttgtgaaggaggtaaggtaggtatgattaattttatttaattgaggaggaaaattaaagtttagagtaattaaaatatttgtttaaggttatgttgttagttaatagtaggattgtaattttgatttggggttttcggattttaaatttgatttttttttaatttttatgtatttaatttttatttttaaaaatttttatttgagttaggtgttaaaatttttaagttaatttttgtagagttttttgatttggtaggtggaaataagtttttattttttttttgaaagaaaaatatatttataagtatttttttataggaaattttttgtatgggtacgtgtgttgttaagagaatttttggggataagagggatagggaatttttgataataaagtttatgaatagagtagggatttttagagtggaaaaatgtgtttgttatatttttaaaagttattattttggatgggtattggggttttggattgtagaataaagtttaatttttttttggagttgtattgtgatttgtttagttagtttggtttttagattttaataatagagtatttaggaataagagaaatagtgatgttatttgtttgtattttttaggaaattttttttatatggttttaggtaatttttgattagatgg

SEQ ID NO: 277 - DNA, 6075 bp, Artificial Sequence
  chemically treated genomic DNA (Homo sapiens)
tggataaattttaagagtagagttgttattgttaggttttagtattgtataagtatagttagtaattcggtttatcgattggtaggatgggtttttgttttgggtattatatatttataaaaataaatttgttaaggaatatatagttatttttgttagtagaggtttggtgtttagtgttaaagattgtataaaattttattttaaatttttgtttttaaaattaatatcgttcgggttttagagaaatattttttttttatagttttttgtttttgaaataaaggtgagtgtattttataatttgaagatttgtagggtgtgttgttgttgatatggaagatggatatttttaaacgtgtggatgatgtatagtggaggcgtttgatttaaagaaaagttaaatgaattaaattgttaaaattttttttttagatagtaagtatattatatagttttaaataatgagggttttttagtaatgttaaatatttatttttttgtttttttttttgttataatttatggttttggtagaagttatatagtagtatagtatttgtatgcggttgaacgtggtgattggttaatattttgaaaaattaattaattaatgttattgttaaaatggtagatatgaagttataatatatgaaatataatattgattatttatgttagtaattaggtggataatgaatgttagaattgttaagtttatgttttatttatatattaataaggtgtaattaaatttttaaatattaaataaaatgtttatgttttaaaaaaataattttttagtgtttatatttattgttataatttgtattttgtattttaattttaatagataattttaaattatttgaaagaaaatttttaataattatagaaaaataattttaattttttgaaataaaaaaaggaatttatatttgtggtgtaagtataaatattttgtatgatttgattatattaattttttatttatttattttttagaattgggattttattttttatttagacggagtgtagagtgtatagtttattgtaattttaaatttttaggtttaaatgattttttagttttagttttttgagtaggtgggattatagggataaattattatgtttgattatttaaaaaattgttttgtagtgataggattttgttatgttgtttaagttggtttagaaattttggttttaagtgattttttggtttttgttttttgagtcgttgggattataggtgtgagttattatatggggtttgaatagatgaattttttagattaatgttgtttaatagtgttttttatgatgatggatttgttttttttttatgttgtataatatattagttttagttatatgaagttattgagtatttgaaatgtagttagtgttattgaggaatagaatatttgaaatgttgttaggtgttattatatagaatagtaaagtttttaattatcgttgttaatggaatataaattaagtgaaaattttaattataataatatagtgattttattaaagagaaatattaattttatagaataaatatatatgaattatgtatattatttatttatatagtttattaaagaaaatttagatatgtataatgtttagtagatatgtataatttagttgttgatattttgttttttgttatataaaatttgtaggttttatattttaattttattgttatatgtgttaaggtaggaatatatatagtagtttgttagtttaattaataattttgaaatattaggtatatggtaagtggttatgtatttgtatttttgtttaagtttattaatgttaggggttggtttgatagtatttttaattttgagtagttattttgtaaatgttattattgtttttagtgagttaggagtgaaatgtggttaaaattaaatttttattgttgaaaaaataagttaaagtaaatgttttattgggaggatttttatagtattttttttttagaggaagtttaatttatttattttagtagaggatttttatttaggtttaaaggttgttttgattagttatttgtaagagggagtaaattaatagtagttgttatgaattgagagggtagaagttgttggtaaaaattttattattttttgaaatgtggatggaaggttgtaaagggtagagttaatttaatagtgtaaagatagagaataggggtaatagaaatttatagatttttttattaagttttaagtaataggtagaagggatagggtttgtagaggttattaagaggagttttgtggtagtagtagttggagtattggtagggatttttgtttaatgttttagtggtaggttcgtagagtggttttttttttttttatttagttttttatcgttttttcgtagggggattgagttttttttgtttatagtggtaatttgtttattgatatattttatatcgatgtttgttttttttttttttttttgttttgttgttttattttttttatagtgttttttgggattatttttttaatttaaaattatttatagttaaattttaatttttaggtttgtttttgagggagtttagtttaagataatttttagtatttagtatagtgtttgatatatggtattgatttagtagatatttgttgaaagaataaaatattttgtaaatgaaattttattttaatattaattttatttaatttaaagaagttattttgaagtaaagtgattagattaatttttgtttttttagtttttatttttgtttttttattagtagaaaaattttattggaaagtttattattaattttttttaaagtaaatttgaattgtagtatagaatataagtatattaaaatggaaagtttaggttgtagatttgattatttttatttgttgattttgaagatattgttttttttttgagattttaatgtttattttataattaaagataaggttttataagtatatagttgggagaagtggtaggataatgtaagtttatattaataagtaaatgattaatatagagatttttaaagagtaggtttggtaagtatttagtaagtggattttttgaagtaagaggagtgttggttgttatattaaaggtaagttttttagtttttaaatttgttttgggaggatgatagttgtattttttttggttttggtgtatagtggagaatagggttaagatgagtgtggaatttatttatttttttacgtgtttataagtattagaaagtagtgagtattaagtagaggattttttttgcggaaaaagtgtaggagagtttttgggtgtttttgtattatcggtttgttttttagttagaattattgttagaattttgttatttagttattttggtttttaatttaatttttttttaagttttttattgcgtttagttagttaggttaggagtttatagttgtttggttggtgttggtttaatgtgtttattttttggaagatagaaggattatttataaaaaaatttataattaaaataaaaaaattattttttgttgaagtattgtaaggtttttttaatttatttagatttaaaatcgtaaaattaaaatattttaagatattatttgatttattttttattttttttttttttttgttttttagtattttgtattagatatagaaattacgggttatgtttaaatttggttttggtgtgattatcgtttttcgtgtattgtttgcggttcgtttcgggtttatacgggatatcgaggtatgatgaggacgtagaatagtagaagcgcgttttgtttttcgggcgttagtgttcggggttagcggcgtgtattcggcgggttcggtcgggagcgggttggcgatcgcggggttcggcgttttcggttttcgcgttatttttcggcgttcgttaatttcgtttcgttcgcggcgtagagaagttcgtagtttttcggagttttagcgattttttggttcgtttttttcgtagtcgtcgagtagcgtaggttcggcgatttcgggtgtagttggttttgtgcggtgatatcgtcgttcggcgttaggttcgaagtcgtttggtcgcgttcgcggggtcgtaggtcgttggtttcgttcggtcgcgtttataaattattcgcggttcgtgattcgggataaatttttggcggcggcgtagttttttttatagttattttttttagagttagttattaaaatagaagacgcggtcggggcgaggaggtgggcggggggagttcggtggtcgttttttttcgcgcggttgacgttcgtttcggcggcggtagtggttgtggtcgcggggtcgtttttagtcgagttttcggaggcgttcgggcgcgggtcggcggggcgcgggcgtttacgttttttagcgggtcgcggcggcgtcgggcggtcgtgacgtgagcgttttttttagtcggtttgcggggtatcgttagttagtcggggagtaagagtttcgcgcgtagtcggcgcgggttcggttatcggcgcgtcgtcgttcggggttgggtttggggttgtttgtggagaggcggcgggcggaacgcgcgcggttacggttacggttatcgttacggttacggtcggtagttcgggtttcgggtttcgggtaggggaaggggagaggcggcgagtttagtaatcggaatcgagggaagattttggtttcgcgggttcgtttttcgttttttttgttagcggcgttagacgtcgagtggggttagggataggggaggaggatttaggattttgtgttcgcgtttttggagtcgttggagttcggatttttgtaattgttggtattttgggggtttggtttagcgttttgttgtttattcgttttttttcgttgtttcggaattaaagttttcggtttttttcgttttcgcgcgtttatttatcgtcgtcggggagcggttcggcgcgtatttagtattatgaggggatttgggatttgtttggcgattttggtcggatttttgttaattgcggcgggcgagacgtttttaggtaagcgggatcgtttttgtcgttttcgaggcgcgcgggtcggcgcgggacgttcgggacgtcgatagttttttggtggtagagttttaaggttggcgtcggggtcgggcggggggcgcggcgggtcggatatcgtttttgtttgtgagtcgggcgttgggcgaggggtcgtggggttggtaggtatttagttttcgggcgggcggagcggacggatttcgagggcgagttttttagtcgggattgttagttcggtcgtcgttttttcgcggtttgggttagtgtttaaggttgggcggtttgtatttttgagtttttggtcggttgtaaaaggaatagtagaaaattttgtttgaagtttttagttgtagtcgtcgggtcgtttggcgtaggcgttgcgcggttttcgtcgatttcgagtagcggtcgggtttaggtcgttggtgttcggttgcgttcgtagcgatcgtcgggaattggcggtcgtttcggcggcggcgatttttcggtgttttgttttttttgtcgttttttgttcggcgcggttggcgatttcgggaggttttcgcggtcgtgtagcgtttgcggagaggttggggggagtttttcgtcggttttagcggtagggtttggcggtcgcggagggaagcgggtaggtttttaggttttggttacggttttgcgtttcgttgggttttttttttttattttcgtttttttagcggagcgtcgcggttagttgtaatttgtttatttagttcggttgttcgggggttttaggtgggaaggagaggtattggcggtgtgcgagtaagcgtgtgagtgtgtgcgcgtgtgtgtttgtacgcgcgcgcgggggcgttttaagtttagaggaattttttacggagaggatttgtggatcggagtcgggggttcggcgtgggggcgaattcggtacgttgttataggggtttataattaggatgatttttattatttgggtgatataggtggatagat

SEQ ID NO: 278 - DNA, 6075 bp, Artificial Sequence
  chemically treated genomic DNA (Homo sapiens)
gtttatttatttgtgttatttaggtaataaaggttattttggttgtaaatttttgtgatagcgtgtcgggttcgtttttacgtcggattttcgatttcgatttatagatttttttcgtgaggggtttttttgggtttagaacgttttcgcgcgcgcgtgtaggtatatacgcgtatatatttatacgtttgttcgtatatcgttagtgttttttttttttatttgggattttcgggtagtcgggttggatgaataagttgtagttggtcgcggcgtttcgttagggggacgagggtggggagggggagtttagcggggcgtagggtcgtggttagggtttggggatttgttcgttttttttcgcggtcgttaagttttatcgttgggatcggcgaggaattttttttagttttttcgtagacgttgtacgatcgcggggatttttcggggtcgttagtcgcgtcgggtagggggcgatagggagggtagggtatcgggagatcgtcgtcgtcggagcggtcgttagttttcggcgatcgttgcgggcgtagtcgaatattagcggtttgggttcggtcgttgttcggggtcggcggggatcgcgtagcgtttacgttaggcggttcggcggttgtaattgggaattttaagtaaagttttttgttgttttttttgtagtcggttagggatttaagagtgtaagtcgtttaattttgagtattagtttaggtcgcggaaggacggcggtcgagttggtagtttcggttggggagttcgttttcggggttcgttcgtttcgttcgttcgaggattgggtgtttgttagttttacggtttttcgtttagcgttcggtttataggtagaagcggtgttcggttcgtcgcgtttttcgttcggtttcgacgttagttttagggttttattattagggagttgtcggcgtttcgggcgtttcgcgtcggttcgcgcgtttcgggggcggtagaggcggtttcgtttatttgagaacgtttcgttcgtcgtagttagtaaaagttcggttaaagtcgttaggtaagttttaagtttttttatggtgttgagtgcgcgtcgggtcgtttttcggcggcggtgggtgggcgcgcgagggcggagggggtcgggagttttggtttcgaggtagcgaggagagacgggtaaatagtagagcgttaagttaagtttttaaagtgttaatagttgtagaagttcgaattttagcggttttaggggcgcgggtatagggttttgggttttttttttttgtttttggttttattcggcgtttggcgtcgttggtagagggagcggagggcgagttcgcggagttaaaattttttttcggtttcggttgttgagttcgtcgttttttttttttttttgttcgggattcgggattcgagttgtcggtcgtggtcgtggcggtggtcgtggtcgtggtcgcgcgcgtttcgttcgtcgtttttttataggtagttttaagtttagtttcgggcggcggcgcgtcgatgatcgagttcgcgtcggttgcgcgcggggtttttgtttttcgattgattggcggtgtttcgtaggtcggttgaagggagcgtttacgttacggtcgttcggcgtcgtcgcggttcgttagagggcgtgagcgttcgcgtttcgtcggttcgcgttcgagcgttttcgggagttcggttgggggcggtttcgcggttatagttattatcgtcgtcgaagcgggcgttagtcgcgcggggaggagcggttatcgggtttttttcgtttattttttcgtttcggtcgcgttttttattttggtagttggttttggggagggtgattgtggaagaggttgcgtcgtcgttagaagtttgtttcgggttacgagtcgcgagtagtttgtgagcgcggtcgggcgggattagcggtttgcgatttcgcgggcgcggttaggcggtttcgagtttggcgtcggacggcgatgttatcgtatagggttagttgtattcggagtcgtcgggtttgcgttgttcggcggttgcgggaaaagcgagttaggagatcgttgaggtttcggagggttgcgagtttttttacgtcgcgggcggagcgaagttggcgggcgtcgggagatggcgcgggagtcgggagcgtcgagtttcgcgatcgttagttcgttttcggtcgggttcgtcgggtatacgtcgttggtttcgagtattggcgttcgggaagtagggcgcgtttttgttgttttgcgtttttattatgtttcggtgtttcgtgtgggttcgaagcgagtcgtaggtagtatacggaaggcggtggttatattaaaattaggtttggatataattcgtggtttttgtatttggtgtaaagtgttgagaaataggggagaaagagaagtggggggtgaattaagtaatgttttgaaatattttagttttacgattttgggtttgagtgaattaaaaaaattttataatgttttagtaaaaaataatttttttattttaattgtaaatttttttgtaagtgatttttttattttttagggaataagtatattgagttagtattaattagatagttgtaagtttttggtttagttaattgaacgtaatagaaggtttgggaagaggttaaattaggaattaaagtaattgagtgatagggttttagtaatgattttggttagaaggtaaatcggtgatatagaggtatttaggagtttttttgtatttttttcgtaagaggggttttttgtttagtgtttattgttttttagtgtttataaatacgtaaaaaaataaatggattttatatttattttgattttgttttttattgtatattagaattaagaaagatatagttgttatttttttaaggtaaatttggggattagaagatttgtttttagtgtggtaattaatattttttttattttaggaagtttatttattagatatttattagatttgttttttagaagtttttatattaattatttgtttgttaatatgagtttatattgttttgttattttttttaattatgtgtttatggaattttatttttaattgtgaaatgaatattgaaattttagaaaggaagtaatgtttttaagattagtaagtgaggatggttaaatttgtaatttgggttttttattttgatgtatttgtgttttatattgtagtttaaatttgttttaaaaaaaattagtaataggttttttaatggagtttttttgttagtgggaggatagaggtggaagttagggagataaaagttgatttaattattttgttttagagtaatttttttaaattaggtgaagttaatattagggtaggattttatttgtaaagtattttatttttttagtaaatatttattgagttaatattatatgttaggtattgtgttaagtattggaggttgttttaggttgggtttttttagaaatagatttggaggttaggatttaattataagtggttttgaattggggaagtgattttagaaagtattataaggaaggtgagatagtaagatagagaagaaaaaaaaaagtagatatcgatatgagatgtgttaataagtaggttattattatgggtaagggaaatttaatttttttgcggggggacgatgaggagttggatggaagaggaaagggttattttacggatttgttattgaggtattagatagaaatttttgttagtattttaattgttgttgttataggattttttttggtaatttttataaattttgttttttttgtttgttatttaaagtttagtgggagggtttgtaaatttttattatttttgttttttatttttatattgttaagttgattttattttttgtagttttttatttatattttaaagggtggtgggatttttgttagtagtttttgtttttttaatttatgataattattgttagtttatttttttttataggtaattggttagagtagtttttgagtttaaatggaagttttttgttgaaatgaatggattggattttttttaaggaagggatgttgtaggaatttttttagtgggatatttgttttgatttgtttttttagtagtagagatttagttttaattatattttatttttgatttattgaggataatagtgatatttgtagaatggttgtttagagttaggggtgttgttaggttagtttttgatattggtaggtttgggtaagagtataaatgtatagttatttattatatgtttaatattttaaagttattaattaagttagtaaattattatgtatatttttattttgatatatataataataaaattgaaatataaaatttatagattttatatgataaaaagtaaaatattagtaattgaattatgtatatttgttagatattatatatatttagattttttttgataggttatatggataagtaatatatatgatttatatatatttattttataaaattgatatttttttttagtaaaattattgtgttgttataattgagatttttatttaatttgtgttttattgatagcggtgattgaaagttttgttgttttgtatggtagtatttaatagtattttaggtgttttgttttttagtgatattagttatattttaaatgtttagtagttttatgtggttagagttaatgtattgtataatatggagagaaaataagtttattattatagaaagtattattgaataatattgatttaaaagatttatttatttaggttttatgtggtggtttatatttgtaattttagcgatttaagaggtagaggttagaggattatttgaggttaggatttttagattagtttggataatatggtaagattttgttattataaaatagttttttaaatagttaaatatggtggtttatttttgtagttttatttatttaggaggttgaggttggaggattatttgagtttaggagtttgaggttgtaatgagttgtgtattttatatttcgtttgggtaaagaatgaaattttaattttaaaaaataaataaataaaggattaatgtagttaaattatataaaatgtttgtatttatattataaatgtaaatttttttttttattttagaaaattagaattatttttttatagttgttaaaagtttttttttaaatgatttaaagttatttattagaattaaaatgtaaaatataaattatgataatgaatataaatattgaaaagttatttttttaaagtataaatattttatttaatatttggaaatttaattatattttattaatgtgtaaataaaatataaatttagtaattttagtatttattgtttatttggttgttaatataaataattagtattatgttttatgtgttataattttatatttattattttaatagtaatattaattagttaattttttaaaatattggttaattattacgtttaatcgtatgtaaatgttatattgttgtatgatttttgttagaattatgaattgtaataaaaagagaagtaagaaaatgaatgtttggtattgttaggaaatttttattatttaagattgtatgatatgtttgttatttaaaaggaaggttttgatagtttaatttatttgatttttttttgaattaagcgtttttattatatattatttatacgtttaggagtgtttattttttatgttagtagtagtatattttgtaaatttttaggttgtgggatgtatttatttttgttttaaggataagggattataggggagaagtgtttttttggggttcgaacggtgttggttttgaaagtaaaagtttagggtaaagttttatgtagtttttaatattgagtattagatttttattgatagaagtggttgtatgttttttaataaatttatttttataggtgtgtgatgtttagggtaggagtttattttgttagtcggtgggtcgaattgttggttgtatttgtgtagtgttggggtttggtaatagtaattttgtttttgagatttgttta

SEQ ID NO: 279 - DNA, 5706 bp, Artificial Sequence
  chemically treated genomic DNA (Homo sapiens)
  unsure (333..)
attgttggtttagaggttatagttcgagaattattagtttagagaaatgtatatatatgtatataagaggcgtgtgtataggaatatttataatagtagttgggtacggtggttgacgtttgttattttagtattttgggaggttaaggcgggaggattacgaggttagaagttagagattaatttgattaattttgtgaagtttttttttttaaaaatataaaaattcgttaggtttggtggtatatatttgtaattttagttattggggagttttaggtaggagatttttttaaattcgaggtagaggttgtagtgagttaagattggtgnnnttgtatattttagttgggtgatagtgagatttcgttttaaaaaaaaaaaaaaaaatttataatagtgtgtttagaattggtgggttttcggttttattgattttaagaatgaagtgttggattttcgtagtgagtattatagttgttaaaggtagcgtgtttggagtttgttttttttgatgtttagatgtgtttcgagtttttttttttcggtgggtttttggtttcgttagtttaagagtgaaattgtagattttcgtagtgagtgttatagtttttaaggtggcgcgtttagatttgttcgttttttttagtgggtttgtggtttcgttggttttaggagcgaagttgtagatcgttatcgtgagtgttatagtttatgaaagtagtgtggattttataattgaatagtaggaatttaatataaagagtaaaaaaataaatttttttttacgtggaaggggattcgagtgagtcgttattgtcggtggggtagtttgtttttattttttatttggttttatttatattttgatgattggtttattttagagagagttgattggtttgttttatagagagttgattggtttattttgatagggtgttgattggtgtatttataatttttgagttagatacgaaagttttttatttttttattagattagttagatatagagtgtcgattggtgtatttataaattttgagttagatatagggtgttgattggtgtgtttataaattttgtgttagatatagagtgttaattggtgtatttataatttattagttagatataaaagttttttaagtttttattagatttaggaggttagttggttttatttagtggattttatatcggggtcgtaggtggagttgtttgttagtttcgagttatgtgttcgtattttttagtttttgggtggtcgatgggatcgggcgtcgtgaagaagggggcggcgttcgttagagaggttagggtcgtgtaggagtttatagcggagggggagatttaggtttggtgggttgtaggtttcgagttttgtttcgcggggaggtagttaaggttcggcgagaagtcgagtatagtagttgttgatttaggtgttaagttttttattgttcggggtcggcggggttggtcggtcgtttcgagtgcggggttcgtcgagtttaagtttattcggaattcgcgttagttcgtaagtgttacgcgtagtttcggttttcgttcgcgtttttttttttatattttttcgtaatttgagggagtcggtttcggttttggttagtcggggaaggggttgttatagtgtagcggcgggttgaagggttttttaagttcggttagagtgggcgttaaggtcgaggaggcgtcgagagcgagcgagggttgtgagggttgttagtatgttgttattttttaatagtattatgtataatattattaaatttgaaataatttaaatgtttattagtagaaaaatggattaaaaaaaaattttttttttgatacggagtttttttttattatttaggttggagtgtaatagcgtaatttcggtttattgtaatttttattttttagggttaagtaatttagttgttttagtttttcgagtagttgggattataggtatgagttattatatttggttgggattataggtacgtgttattacgtttagttaatttttgtattttttgtagagataaggattcgttatgttgttcgggttggttttaattttttgggtttacgtgatttttttgtttcggttttttaaagtgttgggattataggtatgagttattgtgtttggtttttataaaaaaaaaaaaaaaattagttaggtatggttgtttataatggtagttgtttaggaggttggggtagaaggattgtttgagtttaggagttgaaggttgtagtgagttatgattttgttattgtattttagattgggtgatagagtgagattttgattttaaataaataaataaatgtttaaaaatgtattagttattgttagaggttattatattatatagatttattattttgtagaagggtaaagagaaaaagttgagaatatatgttatttttttagttggaattgtattttagtgtaaattaaatttagttgatgagagaaagtttttttttataaagtaaaataagcgataaacgtgaattgaatgataggattataaaaattattattttgtaatttttaatgaaattatttagttaaggatggattattagtgaatagtgaaattattaggtgaaaagttgatgaggaattagatagttttatagtgttaaagtattatttaaggattatatgttggttatattagaaaattatagttttatatatagagatttggttgtttttattttaaattagtgattaattttaatattattaatagaatagttagatattatgtattttttgaaatgatgtaatgagaggtattttgttttaaaaattttttaatttgatatagttaatattttatatataatttttagtttataggaaatataggtgatatataggttatatattggagaaatatagggaaatataatatgaagaaaaaaattagataaatttagaagaagagttttaaagaaaaattgatttggtttattaatatgataatgttaaaaatgggggaggggagagaggatatggtgtttatgttaatttatagagattaagaaatataataaaggtcgtggttgtttttaattgattgttattttgaataaaatatttgaaaagaaaaggtatttttggggaaataatttgagaaatttgaatatgaattgagtattaaattatattaaggaatgttcgggcgcggtggtttacgtttgtgattttagtattttgggaggtcgaggtgggtgtattacgaggttaggagatcgagattattttggttaatacggtgaaatttcgtttttattaaaaatataaaaaattagtcgggtgtagtggtaggtatttgtaattttagttatttaggaggttgaggtaggagaatggcgtgaatttgggagggggagtttgtagtgagttaagatagtgttattgtagtttggtttgggtaaaagagcgtaagatttttttttaaaaaaataaaaaaaaaaaatttaaaaaattatattaaggaattattgtaaatttttttaggtgttataatagtatttaggttatgtaggaaaatgtttttattttttggagatgtataatgaaatatttagaagagaaatgttatgatgtttattatttatgtttaaatattaaaaagaagtaaatattgtaaaatattaataattattaagtatggatgatgagtatgtaagtatttattatgtatttttgttttttttaaattttattttattttattggaaagtaagagaggaaggagattaaatttgaatttaagaagtttatttttttatttattggatgattagagtggaagtaaaagagtagttattagttgattgttgtagtggtcgtggtgaaagagtatagtgttttagtttaggtagtgaggatggatagaagtggattgatgggagatgtattttgtagggagaaattataaaatgattgatagtttcgaggtggtatagacggagagaaaggagagttaaagttaatgatgaggttaggttcggtagtttatatttgtaattttagtattttgggaggcgaaggtcgttggattatttgaggttaagagtttaagattattttggttaataaggtgaaattttatttttaataaaaatgtaaaaattagtcgggtaaggtgttgtgcgtttgtaattttagttattagggaggttgaggtaggagaatggtttgaatttagaaggtggatattgtagtgagttaagattacgttagtatttagtttggttaatagagtaagattttattttaataaaaaataaataaaagttaatgatgatagttaatatgtatggagtatgtagtatgtattagtttagttatttttttaagtgatttatattagtgtaacgaataaaatttttataattattgtgtgaggcgggtagtaattattaatatttttattttgtagattaggaaatttggacgtagataagttaaataaggtgtttaaggttatatttttagtagatgttttgttagaattggaatttaggtatgtttaattatttttttttaaggaagagaatagtatttttaatgataatgagtaagagtatttattttatttatttttttgttttttgttttcgggtttatcgttttggatttatttattttttttggttttttatttaatttaattttttttatttattttggggcggggagatagaggtgattttagaagagggttatagggatggggttaagtgggaattttagcgaggcgtttattatttgatggaggagggatgggttaggtaggtttttcgtttcgatagggtttttacgttatatgtgacgtaaattagtttacgagtcgggggtggaggtgtcgttagtattcgtttgcggttggtcgcgttgtagcgagaggggtatgtagatttcgtttcgtagggaggtggggagcggtaagtttcgttttagtttttttggtaggttttcgttagcgtcgttgcggtttcggttcgggagcgagcgttcggagttcggaaagatgcggcgttcgcggcggtttgggggtttcgggggattcgggggttttcggttgtttttttgttttttgttgttgagtagtcgttcggggggttgtagcgtcgttagtgtttacgggaagaggaaatttgggttgtttagtatcgcggatagcgttagcggttcgggatagcgcgaggagagatgtttaagagatattttttttagttttatttatgttttttttttttcgatcgggggaagtgtgttagaattttttttgagttttaggttattataggatgtttttttatatttgggaaggaaattttttttttagaatttggttaaaattttttttgtagtaattttatgaatttttttttttgtatttggaaggttttttttttattatttagttaagtaaatagaggtttttaaggatatagatttataaatttttaaaatttaaaataagattttatgtttttttttaagaaatttaggtttgatttttattttttttttagtttaaggttttttttagaatgaaagaataaattgtatttgtttttttcgtttttagtttgtttatttatttgtttattttttgtgagtgggtgtttgagtttttgtttatttttttttttatagg

SEQ ID NO: 280 - DNA, 5706 bp, Artificial Sequence
  chemically treated genomic DNA (Homo sapiens)
  unsure (5372..)
tttgtagaggaaaaggtgagtagaggtttagatatttatttatagagaatgggtagatgggtggataggttgggaacgggagaagtagatgtaatttatttttttattttaaagaaggttttaagttgggaggagagtaggaattaggtttgaattttttaaaaggaagtatgggattttgttttggattttaagaatttgtgagtttgtatttttaaaagtttttgtttgtttaattgagtgatagggaagaaattttttaggtgtagggagagagatttatagaattattgtaggagaggttttggttaaattttgaaagaggaattttttttttaaatatggaaaagtattttataatggtttggaatttagaagaggttttagtatatttttttcggtcgggggaaagagggtatgggtggggttggggagggtgttttttaggtattttttttcgcgttgtttcgagtcgttggcgttgttcgcggtgttgaatagtttaagtttttttttttcgtgggtattaacggcgttgtagtttttcgggcggttgtttagtagtaggaggtagaggagtagtcggagattttcggatttttcgagatttttaggtcgtcgcgggcgtcgtattttttcgagtttcgggcgttcgttttcgggtcggagtcgtagcgacgttggcgggagtttgttagaggggttgaggcggggtttgtcgttttttatttttttacgaggcggggtttatatgtttttttcgttgtaacgcggttaatcgtaggcgggtgttgacgatatttttattttcggttcgtaagttaatttgcgttatatatggcgtaagagttttgtcggagcgggggatttatttagtttattttttttttattaaatagtaggcgtttcgttagaatttttatttggttttatttttgtagtttttttttaggattatttttgttttttcgttttagggtgggtgaaaagggttaagttaagtggggggttaggaaagataggtgggtttagaacgataaattcgaagataagaagtagaaaagtgggtagaataagtatttttatttattgttattgaagatattgtttttttttttaagaaaaaatggttaggtatgtttagattttagttttagtagggtatttattaagggtatgattttgggtattttgtttaatttgtttgcgtttaagttttttgatttgtaaagtggaggtgttaatagttattattcgttttatatagtgattgtgaagattttgttcgttatattaatatggattatttagaaggatgattggattggtgtatattatatgttttatatatattagttgttattattagtttttatttattttttattgagatggagttttgttttgttggttaggttggatattggcgtgattttggtttattgtaatgtttattttttgggtttaagttatttttttgttttagtttttttagtagttggaattataggcgtatagtattttgttcggttaatttttgtatttttattggagatgggattttattttgttggttaggatggttttgaatttttgattttaggtgatttaacggttttcgttttttaaaatgttgggattataggtgtgagttatcgggtttggttttattattagttttgattttttttttttttcgtttgtgttatttcgaggttattaattattttatggtttttttttgtaaaatatattttttattagtttatttttgtttatttttattatttgaattgaaatattgtgtttttttattacgattattgtagtaattagttagtaattgtttttttgtttttattttagttatttaataagtaggggagtgagttttttaagtttagatttgatttttttttttttttgttttttagtaaaataaaataaaatttaaaaaggatagaaatgtataatgaatatttatatatttattatttatatttaatggttattgatgttttataatatttgtttttttttagtatttaaatatgaatgatagatattatgatattttttttttaaatattttattatgtatttttaagaaataaggatatttttttgtataatttaagtgttgttatgatatttaaaaaaatttataataattttttaatataattttttaaattttttttttttatttttttgagaaggagttttgcgtttttttgtttaggttagattgtagtggtattattttggtttattgtaagtttttttttttaggtttacgttatttttttgttttagttttttgagtagttgggattataggtgtttgttattgtattcggttaattttttgtatttttagtagagacggggttttatcgtgttagttaagatggtttcgattttttgatttcgtgatgtatttatttcggttttttaaagtgttaggattataggcgtgagttatcgcgttcgggtattttttaatataatttaatgtttagtttatatttaaattttttagattgtttttttaaaaatgttttttttttttaggtgttttgtttaaaataatagttaattaagaataattacggtttttgttatgttttttaatttttgtaaattagtatagatattatattttttttttttttttttatttttgatattgttatgttgatagattaggttaatttttttttagaattttttttttgggtttatttgatttttttttttatgttgtatttttttgtatttttttagtgtataatttgtatattatttgtattttttgtaaattagaagttatatatgaagtattgattgtattaaattaaagaatttttaaagtaaaatgttttttattgtattattttaggaagtatatgatgtttgattgttttattagtgatgttaaaattgattattggtttaaggtagagatagttagatttttgtatgtaaagttgtggttttttaatgtgattagtatgtaatttttggatgatattttggtattgtgagattatttagttttttattaattttttatttaatggttttattatttattggtgatttatttttgattaaatgattttattagaggttgtaaaatggtgatttttataattttattatttaatttacgtttatcgtttattttattttgtaaagaagggtttttttttattaattgggtttagtttatattaaaatgtaattttaattggaaaggtaatatatatttttagttttttttttttatttttttgtaaaataatgagtttgtgtagtgtagtgatttttaatagtgattaatatatttttaaatatttatttatttatttagagttagggttttattttattatttagtttggagtgtagtgataagattatagtttattgtagtttttaatttttgggtttaagtaatttttttgttttagttttttgagtagttattattgtgagtaattatgtttggttaattttttttttttttttgtagaggttaagtataatggtttatgtttgtgattttagtattttggaaggtcgaggtagaaggattacgtgagtttaggagattgagattagttcgggtaatatgacgaatttttgtttttataaaaaatataaaaattagttgggcgtggtaatacgtatttgtagttttagttaggtgtggtggtttatgtttgtaattttagttattcgggaggttgaggtagttgaattgtttgattttgagaggtgggggttgtagtgagtcgagattgcgttattgtattttagtttgggtaatagagagagatttcgtattaaaaaaaaaatttttttttaatttatttttttgttgatggatatttgggttgttttaggtttggtagtattatgtataatgttattgagaggtgatagtatgttggtagtttttatagttttcgttcgttttcggcgttttttcggttttggcgtttattttggtcgagtttgaggagttttttagttcgtcgttgtattgtggtagtttttttttcggttggttaaggtcggagtcggtttttttagattgcggggaggtgtggagggagaggcgcgggcgggaatcggggttgcgcgtggtatttgcgggttagcgcgagtttcgggtgggtttgggttcggcgggtttcgtattcggagcggtcggttagtttcgtcggtttcgggtagtgaggggtttagtatttgggttagtagttgttgtgttcgatttttcgtcgggttttagttgttttttcgcggggtagggttcgggatttgtagtttattaggtttgagttttttttttcgttgtaggtttttgtacggttttagtttttttgacgagcgtcgtttttttttttacggcgttcggttttatcgattatttaaaggttgaggagtgcgggtatatggttcgggattggtaggtagttttatttgcggtttcggtgtgggatttattgggtgaagttagttggttttttgagtttggtggggatttggagaatttttatgtttagttaatggattgtaaatatattaattggtattttgtatttagtataaggtttgtaaatatattaattagtattttgtgtttagtttagggtttgtgaatgtattaatcgatattttgtatttagttaatttggtggggaggtggagaattttcgtgtttagtttagggattgtaaatgtattaattagtattttgttaaaatggattaattagttttttgtaaaatagattaattagttttttttaaaatggattaattattaggatatgggtggggttagataaagaataaaagtaggttgttttatcggtagtagcgatttattcgggtttttttttacgtgggggaggatttgtttttttgttttttgtattaagtttttgttgtttagttgtggggtttatattgtttttatgagttgtaatatttacgatgacggtttgtagtttcgtttttgaagttagcgagattataaatttattgggaggaacgagtaagtttagacgcgttattttaagagttgtaatatttattgcgaaggtttgtagttttatttttgagttagcgagattaagaatttatcggaaggaagaaattcggaatatatttgaatattagaagaaataaattttagatacgttgtttttaataattgtaatatttattgcgagggtttagtattttatttttgaagttagtgagatcgagaatttattaattttggatatattattatgaatttttttttttttttttgagacggagttttattgttatttagttggaatgtgtaannntattaattttggtttattgtaatttttgtttcgggtttaagagaattttttgtttgaggttttttagtagttggggttataggtgtatgttattaggtttgacgaatttttgtatttttaggagagggggttttataaggttggttaggttggtttttaatttttgatttcgtgattttttcgttttggttttttaaaatgttgggatgataggcgttagttatcgtgtttagttgttattatgaatatttttgtatatacgttttttgtgtatatatgtgtgtatttttttaagttagtagttttcgaattgtggtttttggattagtagt

SEQ ID NO: 281 - DNA, 5647 bp, Artificial Sequence
  chemically treated genomic DNA (Homo sapiens)
agatggagttttatattgttgtttgggttggagtgtagtggcgtgattttggtttattgtaattttcgttttatgggtttaagtgatttttttgttttagttttttaaatagttgggattataggtgtttgttaatatatttagttaatttttttgtatttttagtagagatggagttttattatgttggttaggttggttttaaatttttgattttgtgatttgttcgttttagttttttaaagtgttgggattataggcgtgagttattatatttagttttttttatatatttataggtgatttttttatttgtgatttggttatttatattttttgtttatatgttattaggatgttgttatttttttttattaatttttagaagttttttaattattttgagttattgaatgaatttttgatttattgatttaaaattatatttttaatatagttaattgtttttatttttttattttatggtttaggtttttttgttagaaatttttttgtattttagggttataaaaatatttttttatatttttttttaaaggtattatggttttgtttttttgtagttgtttttaatttgtttggaaatgattttggtatataggaggaagaagtttaattatatgtttttttttgtatataaataattttttttattgagtagttaattgttatttttttgatttgttatattttttttatatattaggttttttatatgtgtttgggtttgtttttgggtatttatttatttttttattaagtttatatttttttaattataataattttataataaattattatattttataggatttattttttgattttttatttttttaagttttttttggttattttatataaattttagtattagtttgttaatatttttgaaaaattagattgggattttttttttatattgaatatattgattaatttggtataattgatattttcgtaaaattgagtttttttatttaaggagataatttatttttttgtttatgtagatttttttatgtttttaaataaggtgttataattagttttgttttatgttaaattgttgtttaggtattttatagttatttttgttattgtaaatgaaaattttatttgtaaaggtatttttaatttatttgttggtattaataaagtaatagatttttgtatgttgattttatatttaataaaagttgtttagtttttattaatatgttttttgagttttttagatttttttttatgtagatgatttatttatgataaataataataattttatttttttttattttaatttttatgttttttttttttatgtttttatgttttattttatgggtagggatttttaatatatattttgatgaatagagttattgtttacgggtatttttgtgttaattttgttttttaaaagtatgtttttaaggatttataattatatatgtatttgtttttataggttttggtatttatgttttttttagtttaagtaagtttttgtttgttttttagtttgattattttgagtgttgaattttattaaatattttttttatttattgatatgatgattttttttttttaaattgttaatgtaataagttaatagttattttaatatttaattaattttgtagttttggaataaatttaatttgtttatgatatatttttatgtatattgttgtgtataatgtgtatttttatgtatattgttgtgtttggttaatattttatttagagttgttgtattaatatttttaatgagagagattgtagttttttttttttgtattgtttttttttttttttggtattatatttagtagatatgtaaaatgaatttagtatatttttgaatattttatttttagaagtagtttgtataaaacggggattatgtgttttttgaatgtttggtagaatttgtttattaaattatttgggtagtattttatatattttattatattaagttttaagttatgtagtttaagtttttgtattttttggtaggtttttttttcgtatttgaatgattagttatgatatatgtgaatttattagttttgttaaaatttttttttatgattatggatttgtttatttttttttataattttgttaatttttggtttatattttttgaaattatattattagataatttagagatatttttttgttaaagtatttttttgtattataatttaattatttttttttgtttaagtttattttttattgatattattattgttatgttagtttttttgaataatatttgtttggtgtgtttttttttttttttttaatttaaagtttttaatttttaatatttttattttatgttttatgtatagtttttgtaagtgatgtatagttggatttttaaaatatttttttttttttttttttttttttttttttttagggtttttttttgtcgtttaggttggaacgtagtggtgtgattatagtttattgtagtttttattttttaggtttaagtgatttttttgttttagttttttgagtagttgagattataggtgtatattattatattagattaatttttaaattttttgtgtagatgagggttttgttatgttgattaggttggttttaaatttttggttttaagtgatttttttattttggttttttaaagtattgggattttgaacgtgagtttcgattaaaatatttttatatgataaatagaaatatttgttttttaattggaaaatgtgttttattaatatttatggtaattattggtatattttgatttaattttagtaaataatattgtatttttaatttatttttttttgtgtttttttttttttttttattaattttttttttatagattaagtttttttttaaaaattttttttgtattttttattcggatgtttatgtttatttggtagttgtttttaaatttataataaatatttttgagtaaagtaaaattaattaatttttttttcgtttttttgaataatgaaatgattttagaattttattattgaatataaaagtagtatattttagattatttttttatatttgttttttagtttattaatattttttttagttttgtttaatttgttatttaatttatgttttgagtttttaaaatttttaattaatttttttttttaattttagaagttttatttggttttttaaaaaaaattatttagtttttttttttttgataatgttttattttttttttatatttttaatttttttttttagagttttagtagttttaaatatatttattttttagttttttggttgatattttaattaaatgtagtttttggggagaggtgtttaattttttttggtttttgttgatttttatttatagtggtttgtttttttatatgtttaaatattattgtgaatttttttttgtttttatagtggtagatagtatatatttgaattttaaatatatttgagggtaggtttaattttataaatttaaagggattttgtagagtttaaagagagatatgattgttttttatttttttgtgttagggtagagtgggattgtatttattgaaatatagtaggtaattttgtgagggttttggtttttatgaggattttttttttaattttttatttttggtttaagttttgtttttatatggttattaatatttggtggttatagaattaataatttttattttattttatttttatgttagaggggttttagtattagtttatgggattgttgtttttgtttttttttttatttttggtttcgggattttttttttattttaatgggagtttatttgtattttttaagtttttattaatattatgtgaatatagatttgtatatattgttagaagtagaaatttttaagtttatttttaaaatatgatttttgtttcgaaattttgtagaataatataatgtttatataatattaagttatgaaaagaaatatatttaaataattaaataagtatatttttttttttttttagttttttttttttattttaggtttatttagttgtattgtgttgtttgttataggtcgggtgaggtggtttacgtttgtaattttagtaatttgggaggcgaaggcgggtggatcgtttgaggttaggagttcgagattagtttggttaatatggtgaaattttgtttttattaaaaatataaaaattaattgggtgtggtggcgggtgtttgtaattttagttatttgggaagttgaggtaggagaatcgtttgaatttaggatgcggaggttgtagtgagtcgagattatattattgtattttagtttgggtaataagagcgaaatttagttttaaaaaaaaaaattatttataaaagtataggtgtaattttttaagtattaaagataagatagttcggattggatttgatttttagagttataattatttttaatatgttggtttattttggaattagattatttttagttttaatttgtaaaatagtgtataaaggaaatatggaaagttttttatatataaagggttgtgaaataataatagtttatagaaaatgttgaaatgatgatttgttttagtattttttgaaattttttttttattattttttttttatttttattgttattaatttaaattataatagttaatttttaggagaatagtagaagtttagtttttttttttttttttttttgatttttttttaattaatttgattgtagcgtaaatttttgcggtttaatattgtgtaatttttatatttttttcgtttttttatttagtttttttttttattaaatttaggggaattttcgttatcgtagtgttattagtattatttatttatttttatttaggttttttttagtatttattaaggattttttgttttagttttttatttttattttttttcgtttaaatttagtttatttgagagttttttttcgttagttgtggaaagaattttgcgtttttttagtaatgtatttttttgcgattttgttttgtgttttttggtttgtagtgttggtcgagaattcggatgattatgattttatgtatgtgaatttggataacgaaatagataatggattttattttattgaggatcgtaagtttattttaattgtttttttgttaattttgattatatatttattttttggtttaaataatatatatatattttgtggttagtgagataagttaaaaatttatagtttgttatgtaaaagtgagaagtatttgaagaaagatggaggttttaaagttatttttgtaacgtatataatgggttgaattatattaaatcgttaatatttgattgttttgagttatataatcggcgattttatagggtataatttaatttatatttgaatgaatgatttttgtcgtttttgagatatttatatgttgtttttcggaggtgtttttaaagggaaggggaatgttaggaacgggttgtaatttggtattatcgagggaggttagtttttataaagtatatttaaggtaggtttgggcgggttgttaacgtgtgtgtatttcgtattttagt

SEQ ID NO: 282 - DNA, 5647 bp, Artificial Sequence
  chemically treated genomic DNA (Homo sapiens)
gttagagtacgggatatatatacgttagtagttcgtttaggtttgttttggatgtgttttgtaaaagttgatttttttcggtggtgttaagttgtagttcgtttttggtattttttttttttttaaggatattttcgaaaaatagtatgtaaatgttttagaaacgatagaaattatttatttaggtatagattaagttgtattttatgaaatcgtcggttatgtagtttaaaatagttaaatattgacgatttgatatgatttaatttattatgtacgttatagaaataattttgaaatttttatttttttttaagtgttttttatttttgtataataagttataaatttttaatttgttttattggttataaagtatatgtgtgttatttagattaagaggtggatatgtagttagggttagtagagaaatagttaaagtgaatttacggtttttagtgggatggagtttattgtttatttcgttgtttaaatttatatatatgagattataattattcgagttttcggttaatattgtagattagagagtataaaatagaatcgtaaggagatgtattgttggagagacgtaaagttttttttatagttggcgggaggagatttttaagtgagttgagtttgagcggaggagagtgagagtgagaggttggagtagagagtttttaataaatgttgaggaaagtttgaatggggatgaatgagtaatgttggtggtattgcggtaacgggagtttttttgaatttggtgggggagggggttgggtgggagagcgagggaaatgtggaagttgtataatattaaatcgtaaaggtttacgttgtagttagattaattggaggagggttagaggggaaagaggagagaaattgggtttttattgtttttttgagaattagttgttgtaatttgaattgatagtaatggggatgaaggaggggtggtaggggagaaattttagagggtattgaagtaaattattattttagtattttttgtgagttgttattattttataattttttatatatagaaaattttttatgttttttttgtatattgttttataggttgaaattgaaaatggtttgattttaagataaattaatatattaagaatagttatggttttgaaagttaagtttaattcgagttattttgtttttaatatttgaggagttgtatttatatttttatagataatttttttttttgagattgaatttcgtttttgttgtttaggttggagtgtaatggtgtgatttcggtttattgtaattttcgtattttgggtttaagcgatttttttattttagttttttaagtagttggaattataggtattcgttattatatttagttaatttttgtatttttagtagagatagggttttattatgttagttaggttggtttcgaatttttgattttaggcgatttattcgttttcgttttttaaattgttaggattatagacgtgagttattttattcggtttatgataaataatatagtataattgggtaaatttagaatggggaaaaaaagttgggggaaaaaaggaatatatttatttagttatttaggtatgtttttttttataatttggtattatgtggatattatattattttataaggtttcgaggtaaggattatgttttaaaagtaaatttagagatttttgtttttaataatatatataggtttgtgtttatatgatattaataaaaatttaaaaggtatagatgagtttttattaaagtaaggggaaaatttcggagttaaagatagagaggaaagtaaaaataataattttatgagttgatgttagggtttttttggtataggagtgaagtgagataggggttattagttttataattattaaatgttgatgattatgtggaagtaaagtttaggttaaaggtggagagttagaagggagatttttatgaaagttaggatttttatagggttatttattgtattttagtaggtataattttattttgttttagtataaagaggtaggaagtaattatgtttttttttgaattttataaggtttttttgagtttgtgaaattgggtttgtttttagatatgtttagaatttaaatatatattatttgttattgtgaaaataaaaaagaatttataatgatatttgaatatatgaggaagtaaattattataaatgagaattagtagaaattaaaaaggattagatatttttttttaagaattgtatttagttgaaatattagttaaaaaattagaaaataaatatgtttaaaattattgaagttttaaaagaaggaattggaaatatgagaaaagaataagatattgttaaaaagaaaaaggttaggtgattttttttaaagaattaaataaaatttttagaattaaaaaaaaaagttaattgaaaattttaaaagtttaaggtatggattaagtggtaaattaggtaaagttgaaaagaatattaatgaattggaagatagatataaggaaataatttaaaatgtgttgtttttatgtttagtaataggattttaaaattattttattgtttaggaggacgaaaaagaaattaattaattttgttttgtttaaaaatatttgttataagtttaaggataattattaaatggatataggtattcgaatagaaggtgtagggggaatttttaaagaaagatttgatttatgaaaaaaaaattaatgaaggaggaaagaaaagtatagagaaggataagttaaaagtataatattatttgttaaaattaaattaaaatatattaataattattataaatattaatgaaatatattttttagttaagagataaatatttttatttgttatatagaaatattttagtcggggtttacgtttagaattttagtattttgggaggttaaagtaggaggattatttgaagttaggagtttgagattagtttgattaatatagtaagatttttatttgtataaaaaatttaaaaattaatttggtgtggtgatatgtatttgtagttttagttatttaggaggttgaggtaggaggattatttgagtttgggaagtggaggttgtagtgagttgtgattatattattgcgttttagtttgggcgatagaaagagattttgaaaaaaagaaaaggagagagagagagaagaaatattttaaaaatttagttatatattatttataaaagttatgtataaaatataaagtagaaatgttaaaagttaaaagttttaaattggaggggaggaagagaatatattaagtaagtattatttaaaaaagttagtatagtagtagtaatattagtaaaaaatagatttaggtaaaagaggatagttaaattatgatataaagaaatattttaataggaagatatttttgaattatttagtaatatagttttaaaaaatataaattaaaggttgatagaattataaggagaaatgggtaaatttataattatggagggagattttaataaagttgataagtttatatatattataattgattatttaaatgcgaaaaaaaagtttgttaaaggatatagaaatttaaattatataatttaaagtttgatataatgaagtatatagagtattgtttagatggtttgatggataagttttattaaatatttaaggaatatataattttcgttttgtataaattgtttttgagaatagagtgtttaggaatgtgttaaatttattttatatgtttattaagtatgatattaaaaagagaaaaggataatataagaaaggaaaattgtaattttttttattaagaatgttgatgtaatagttttaaataaagtattagttaaatatagtaatatgtataaaaatatatattatgtatagtaatgtgtataaaaatatattataagtaagttgagtttattttaagattgtaagattgattaaatgttagaatagttgttaatttattatattaatagtttaaaggagaagaattattatattaatagatgagaagaatgtttgataaaatttagtatttaaaataattaaattagaaagtagataggaatttatttaaattgaaaaaaatataaatattaaaatttatagaaatagatatatatgtaattgtaaatttttggaaatatatttttgaaaagtaggattaatataaggatattcgtggatagtgattttatttattaaagtgtgtattggaagtttttgtttataaagtaggatataaggatataaggagaagaaatataaggattaggatggaaagaaatgaagttgttattatttattatgagtggattatttatataaagaaaaatttaagagatttaaaagatatattaataagaattgagtaatttttgttggatataagattaatatataaaaatttattgttttattaatattagtagataaattgaaaatgtttttgtaaataaagtttttatttatagtagtaaaaatagttatgggatatttaagtaataatttaatataagataaagttaattataatattttatttaaaaatataaaaagatttatatagatagaaagataaattatttttttaaatgagaagatttagttttacgaagatgttagttatgttaaattagttaatatgtttaatatgaaaaagaagttttagtttggttttttaaggatgttgatagattgatattaaaatttgtatagagtagttaagaagagtttgaagaagtaggaggttaggaagtaggttttatgggatataatgatttattataaaattattgtaattaagaaaatgtagatttgatgaagagatggataaatgtttagaaatagatttaaatatatatggaaaatttaatatatgaaagaggtgtggtaaattagaagagtaataattgattatttaatagaaaaaattatttgtatataaagaaaaatatataattaaattttttttttttatgtattaaagttatttttagatagattgaagataattataagaaagtaaaattataatgtttttaagagaaaatataggagaatatttttatgattttggaatatagaaaaatttttaataaaaaaatttaaattatgaagtaaaaaaatgaaaatagttgattatattaagaatataattttaaattaataaattaaaaatttatttagtagtttagaataattaaggaatttttaaaaattaataagaaaaaatggtaatattttaatagtatataggtaaagaatgtgaatggttaaattataagtgaggaaattatttataaatatatgaaaagggttgggtgtggtggtttacgtttgtaattttagtattttgagaggttgaggcgggtagattataaggttaggagtttgagattagtttggttaatatagtgaaattttatttttattaaaaatataaaaaaattagttgggtgtgttggtaggtatttgtaattttagttatttgggaggttgaggtaggagaattatttgaatttatgaagcggaggttgtagtgagttaagattacgttattgtattttagtttagataatagtgtgagattttattt

SEQ ID NO: 283 - DNA, 6013 bp, Artificial Sequence
  chemically treated genomic DNA (Homo sapiens)
ttttttgattatttgagttgttttagattttatttggtttttttttttttggaaggtttttttttatgttttgttttaattttaaatgtttgaatgttttgtagtgtgtaggggtttgagttttttgtttattttttttttttttttttttcgtttttttttttatgaagtgattttgttgataataatgtatattgcgcgttttttttattggtttatttgtagaaatttttttgggtttttttcggtgttagatttaatattgcgttaaagcggggatgttttattgaataaaagagtagtgtggttttttgggtttgtttttttattttttttttaatgtttgtttcgttcggtttttttttttatataaattttttttattattagtagtagtagtagtattaaaggtgttttaattttcgtttagtattaggttcgggggggtgagattgtgggtggttaattagggaagtttattatttgttttttgtgtgtggttttggtggtgggagtttagtgtgtgggtggttttatagttttttttttggtgattagttaatatcgttgagaattaattttgtttttttttgtttattgtttatttttttagtttttgttttttgaaggtttttttttggggtttagacgtttacgtttgatgagttttagtggtgatttgtgtttggaagttgttatttaaggttttgggtttggggaggtattaatattaaaggttaagttaattaattttgtttgttaggtatagagtagttaaaattaaaatcgttaagtggtttttttttttttttgttggtgatttgtagtttgttagcgttgtaggttttggcgggggtcggggggataggataaagtgttttattttgtgttttgtaagtattttttaaagggttttttgttttttttttatgttttgggcggcgagtgggtagttattgttagggttttagaaaaatttatgtggagtttttattaggtagtgaggtttttttttgggtagaggtgttttagagttgttttggttttatttgttttttttttttttagggcggttgagggatagtaggtttttttagtatttggttgttggggttagtaattggtttgggttgttttttagttgtgagttagggttggttattgttgtttattggggtgtttggtttttcgtttaggaggtttgtgttttgttatgggtttgttaggtttgaggagtttttagaagtaaggtaggtttagtgcgtttttttagttaagttttaaatttcggtttattaaaaggaggatattttttttgtttttgtttttaagtggtagaatgggggtagggtttggggtttggttattttttttgattttggttttattttattgttttttttataagtttggtttttttggtgggtttattgggtggttaattagttttttgaagttttggaagcggtaaagtggcgttatgtgggttttagaaataaaattaataaatgatttaattatagtttagttatttttttcgttttttttttttaggttagttttatttttgtgttttttttttttttgttttttgtcgttagtttttgttaaggttttggagaggaagtggttgattaaggtattagtttttaaggtgttagaggttttgaaatggaagagatagtaggaaggtttggttttttgaatcgtggtaagtatttgtttttggtagaattagagagagaaaggtttgtttatttgttttaagatatttggggtgggaaagtaagttatttattttattatattgtgatagggttgtgtttgttttattttttttttttacgtttatttttgttgttgtagtagtattgttttcgttttttaaggtttggtaaggtttggtaagaggaatgttagtggggaaaggttagttttagggttttgttattgaggtttagttaagggttttggagaaatttaggattggtttaaggaaggaggtcgggtttttagttagaaatttagatataaataatttcgagtgagtttaggttgtaaaagtgttttagggtttattaaatttgtatatataatattaaggaggggcggaggaagtagggaaatagatgagatcgtgttgtttaggtgtgattatgttgggttggggtatgtagtgttatttcgggataaagtttggaaatagtggggagtgatggtatgataaagacggaaagaagttatagaaaaggtagttggagaaagttaaaaattttttagtaaaaatgtttttgagagtaagcgttttgggtgtaagaggggagagtagttgggaaaggatggaatgaatttggttttttttgtttgtaagatgtggatggtttatggggatcgggtttttagtggtaggaatataaagttttgtaggaaataggggttaatgtaaagaaggtgtgtgtggttaaagtaggttgttacgattgggttgtgaggtgacggtatggttaataagttattgtttgtttggtagtggattgttaagaagttttagttttatttatagtaattttttaagggataagtgcgggttgtgaagaattttggatgttaggttaagttggagtttaagttgtgtttagtggaggatggggatgaggtttaggagttgaggttggggtgtaaattgtgaaaggggaagagattagatagttgttagtattgtttttttgtttgtttttgagatagagtttcgttgtgtcgtttaggttggtgtgtagtggcgtgatttcggtttattgtaatttttgtttttcgggtttaagtgatttttttgttttagtttttcgagtagttaggattataggtatgtgttattatgtttggttaatatttgtatttttagtagagacggggtttcgttatgttgattaggttggtttcgaatttttgattttaggtgatttatttatttcggttttaaagtgttaggattataggcgtgagttatcgcgttcggttagtattgttttttaatggtttatgaaatattttttaagagaaattggaaattaatagaaaaatgtaaggaaaagttgtttgtattttcgtgtttgtggaggtgtattttggtgtttttttttcgattttttttttttatttggaaatgtggtaggtattatagaagatagtgtgttcgtgttttttgggggtaggggtagagtagggtttgggagtttggagatttttgtaggatttgaagtttggtttatatattaagtcggtgattttagggttgggtttgttatggtttagaaagtgatcggaggtcgggcgttgtggtttatgtttgtaattttagtattttgggaggttaaggtgggcggattattttaggttaggagttttagattagtttggtttaatatggtgaaatttcgtttttattaaaaatataaaatttagttgggtatggtggtgggtgtttgtaattttagttatttaggaggttgaggtagaattgtttgagtttaggaggcggaggttgtagtgagttgagattatgttattgtattttagtttgggcgataagaatgaaattttattttaaaaaaaaaaaaaaaaaagtttttagaaatagtttggtttttttcgaattaggtttttaatagtattttgtagttgtttaggtttttgatttgtttttttggtttttagaatagaatatttagttttttttttttatcggtttattattcgggaggtttaaatagtttttgaattagtataaggttttggttttttttttttaaagaatagtaggattcgaagtttgtttttataagatgaggaggtagtagttgagaggtagggattttttttttttttattggagagtttaaatttggtgaaggaatttaaagtttagaaaggtaaagtaattagtttgaggttatatagtaagttagtgttggggttagaatatagtagtgaatgggaggatagttaaagtttttagggaagggtttaaagttgtggggttatgtatataaatggggtgaggttttcgaggtatagattaggtatttattttataggttaggttatagagttggtttataaaattttgtttagagtgtggttttaggtggtaggaagaagtgaaagaaggtttttaattattttttaagtagtggaattatagggagaatttattgttattaaattagtatgatgatggagtggggaatgttttagttttttttatcgtcgagggtttataggattatagtttttagggtttcgtgttgtaggttagcggtttttcgttaatgttggttagtaatttgagtatttttttttaaaaggttattttagggttttttgagggatagtaatagggggagtttagagttgtttagtttcggtgggggtggagtgagggttgtggttttgttttatataattttttttatattatttttgtaatgtagggtcgtgggttttttttttaaagatatttagtggtttttgttagttgtatttttttcgttaggggatattgatttggtttttgtattatagtttgtagggggttttggttttttttgttataatatatggttttttattttggtttagttattgatagatagttttttaatttagtattttgtttgtttttttttgtatttaattttttaaaaggtagggataagggatagaagattatgtgtaaggtttggaggaagtgggttagtataggtttgtgaataagttaggttagttttggcggtttaagtggagtttattttttttttttttttttttttttttttttgtttttaaaatagttttttgagttgttaggttaagatttttttattgtaggggaggcggggcgtgttgtttagagttaggttttaaatttttttgaggttggggagttttattttttggttggaggtagtgttgaggtcgtcgttttttttattattagtttagttcggttcgtttttttgtagttatgtttcggtttttgttagattaagagaaaagaaagtaaattagtgtgcgtggtttggtcggcgtggagaacgtgattgagttgaaaaagaattttaatcggtatttgtattttatattcgtaaaggatcgtaatgtggttattttacgagattattattttgttttggtttatatcgtgcgcgattatttcgtggggcgttggattcgtacgtagtagtattattatgagaaggattttaaggtgttgttggggagtttggggtgggggtatgggttgaaggcgttgttagggagttggcgattttgatttaagtggttgtttttcgttattttaggtttttgggggtggagaatttaggggtgttaggtataaggggtgttgggataatttgagggagaaatttggggtaggagtgggggttagggagtttagagtaggtgggttggttgtaaagggttagtgtttattcggagaaggttggagtgggtgttggtgggtaggacggcgtttgtggtttggttgggtttaggtggaaggatatattagttgttgtatgtatgcgcggtgtgtttgtgtagtaggcggggttggggtagttggggcggtagagattaagtgttcggtggggttattggtaaatgttagtaatttgatacgtttcggtggggagtgggggaggggcgggtagacggtttacgaggggatttaggaaattgggagattaggtattggtagtattttagtttttggtgtttttgggtttttttgggattgaggtttgagggttaaggggaattggatagtgtaaggatgggaggtgatagtttttagtttagtttttagttattgtgtgattttgagtaaatgatttttttttttgggttttggttttgtttttttggggagtttttggaggcgtttttatatgttttggtattttgttgggttgtgcgggggggtgtgtgtagggggaaggggtgtttattt

SEQ ID NO: 284 - DNA, 6013 bp, Artificial Sequence
  chemically treated genomic DNA (Homo sapiens)
gaatgggtattttttttttttgtatatattttttcgtatagtttagtaggatgttaggatatgtggaagcgtttttaagagttttttaggagggtaaggttaaggtttagagaaaaaagttatttgtttaaggttatatagtggttagagattgggttagagattgttattttttatttttgtattgtttagttttttttggtttttaagttttaattttaaggagatttagaggtattagaaattaggatgttgttagtgtttggttttttagttttttgggttttttcgtgggtcgtttgttcgttttttttttattttttatcgaggcgtgttaggttgttgatatttattagtgattttatcggatatttgatttttgtcgttttagttgttttagtttcgtttgttgtataggtatatcgcgtatatatgtagtaattgatgtgtttttttatttgggtttagttaggttataggcgtcgttttgtttattagtatttattttaatttttttcgagtgggtattgattttttgtagttagtttatttgttttgagttttttgatttttatttttgttttaggttttttttttagattgttttagtattttttgtgtttggtatttttggattttttatttttaagaatttagagtgacgaggggtagttatttaagttaagatcgttagttttttggtagcgtttttagtttatatttttattttaggttttttagtagtattttggggttttttttatagtagtgttgttgcgtgcggatttagcgttttacgaggtggtcgcgtacggtatgggttagagtaaagtagtagtttcgtggggtggttatattgcggttttttacgagtgtgaaatgtaggtgtcggttgaagtttttttttagtttagttacgttttttacgtcggttaggttacgtatattgatttgttttttttttttttggtttgataggggtcgggatatggttgtaggagggcgggtcggattggattgatggtagaggggacggcggttttagtattgtttttagttaaggagtggagttttttagttttaaggggatttaaagtttggttttgggtagtacgtttcgttttttttgtaatgggagggttttggtttggtagtttagggagttattttgagggtaaggggaggagaggagaggggagggagaggtgagttttatttgggtcgttaagattggtttggtttgtttataggtttgtgttgatttattttttttaggttttgtatatggttttttgttttttgtttttgttttttggagggttggatataagaaggagtaggtagagtgttggattggggagttgtttgttagtggttgaattaggatgggaggttatgtgttgtggtaaaaggaattaggattttttgtaggttgtggtgtaggagttaagttagtgttttttgacggaagaggtgtaattagtagaggttattggatgtttttgagaaaggggtttacgattttgtattgtaggggtggtgtgagggaggttgtgtgaggtagggttatagtttttattttatttttatcgaagttgagtagttttaggttttttttgttgttgttttttaaggagttttgaagtgattttttggagagggatgtttaggttattggttagtattggcgggaggtcgttagtttgtagtacggggttttgggaattgtagttttataggttttcggcggtgggagaaattgaggtattttttattttattattatattggtttaatgatagtaagttttttttgtgattttattgtttaggaagtgattagaggtttttttttatttttttttgttatttggggttatattttgagtaggattttgtaaattagttttgtgatttggtttataaaatgggtgtttaatttgtatttcgaggattttattttatttgtgtgtatagttttatagttttgagtttttttttggaggttttggttatttttttatttattgttgtgttttggttttagtattgatttgttgtgtgattttaagttggttgttttatttttttgagttttggatttttttattaaatttagattttttaatgagaaaaaaaaaaatttttgttttttagttgttgtttttttattttgtgagggtaggtttcggattttgttgttttttaagagaaaggaattaggattttgtgttagtttaaaggttgtttgggtttttcgggtggtgggtcggtggaggggaagagttgggtgttttgttttgaaggttaaggaagtaggttaaaagtttggatagttgtaggatattattgagagtttggttcggagaaagttaagttgtttttgagaatttttttttttttttttttgaggtagagttttatttttgtcgtttaggttagagtgtaatggtatgattttagtttattgtaattttcgttttttgggtttaagtaattttgttttagttttttgagtagttgggattataggtatttattattatgtttagttaagttttgtatttttagtagagacggggttttattatgttggattaggttggtttggaatttttgatttgaggtgattcgtttattttggttttttaaaatgttgggattataggtatgagttatagcgttcggttttcgattattttttgagttatggtagatttagttttggaattatcggtttagtatgtgggttaaattttaagttttatagaggtttttaggtttttaagttttgttttatttttgtttttaaaaggtacgggtatattgttttttgtggtgtttgttatatttttaagtagagaaaaaagatcgggaaaaaaatattaaaatatatttttatagatacggggatgtaaataatttttttttatatttttttgttaatttttaattttttttaagaagtgttttataaattattaaaaaataatgttggtcgggcgcggtggtttacgtttgtaattttagtattttgaggtcgaggtgggtggattatttgaggttaggagttcgagattagtttgattaatatggcgaaatttcgtttttattaaaaatataaatattagttaagtatggtggtatatgtttgtaattttagttattcgggaggttgaggtaggagaattatttgagttcgggaggtagaggttgtagtgagtcgagattacgttattgtatattagtttgggcgatatagcgagattttgttttaaaaataaataaaaaaataatgttggtagttgtttggttttttttttttttatagtttgtattttagttttagtttttgggttttatttttattttttattaagtatagtttggattttagtttggtttggtatttaaggttttttatagttcgtatttgttttttggagggttgttgtgagtagagttgagattttttggtagtttattgttaggtaggtagtagtttgttaattatgtcgttattttatagtttaatcgtggtagtttgttttggttatatatattttttttgtattgatttttattttttgtaagattttatgtttttgttattgaggattcgatttttatagattatttatattttataggtagggaaggttaagtttattttatttttttttagttattttttttttttgtatttagggcgtttgtttttaggaatatttttattgggaaatttttaattttttttaattattttttttgtggttttttttcgtttttgttatgttattattttttattgtttttaggttttgtttcggggtgatattgtatgttttagtttagtatgattatatttgggtagtacgattttatttgtttttttgtttttttcgtttttttttggtgttgtgtatgtaggtttaatgaattttgaagtatttttataatttgaatttattcgaggttatttatgtttaagtttttaattagaaattcggtttttttttttggattaattttgggtttttttagagtttttagttgaattttagtaatagagttttgaggttgatttttttttattggtattttttttgttaggttttgttaggttttgagggacggggatagtgttgttatagtagtagaaatgaacgtgaggagagggggtggggtaagtatagttttgttataatgtgatggagtaaatggtttgtttttttattttaggtgttttaagataggtgggtaggtttttttttttttgattttgttagaggtaagtgtttgttacggtttagagggttaagtttttttgttgttttttttattttagggtttttagtattttggagattgatgttttagttagttattttttttttaaaattttaataaaagttgacggtagggagtagaaagggagggagtataggaatggagttggtttgggggagagaagcggaggagatagttaagttgtggttaagttatttattgattttatttttaaaatttatatagcgttattttgtcgtttttagagttttaaagagttaattaattatttaatgagtttattagggaaattaagtttgtgggagaagtaatgaggtgaagttaaggttaaagagggtagttaggttttaggttttgtttttattttgttatttaaggataaaggtaaaaaagatgttttttttttggtgagtcgaagtttagggtttggttggggaaacgtattgagtttgttttgtttttgagggttttttaagtttggtagatttatagtaaagtataggttttttggacgggggattagatattttagtaaatagtagtagttagttttagtttatagttggaaagtagtttaggttagttgttggttttagtagttagatgttgggggagtttattgttttttagtcgttttgaaggaaggagaggtaggtggaattagggtagttttaaggtatttttgtttaggagaggattttattatttggtggagattttatatggatttttttggaattttaatagtaattatttattcgtcgtttaagatatggaaaaaaagtagaagattttttgaaaagtgtttgtaaagtataagatggggtattttattttgttttttcgattttcgttaaagtttatagcgttggtaggttgtaagttattagtagagaaggaaaaaagttatttggcggttttaattttagttgttttgtgtttgataggtaggattagttggtttgatttttagtgttgatgtttttttaggtttagggttttaggtggtagtttttaggtataaattattattggagtttattaaacgtggacgtttgagttttaggaaaaagtttttaaaggatagagattagaaaaatgagtagtgaataaggaggggtaaaattggtttttagcgatgttaattagttattaaaggggagattgtggagttatttatatattgagtttttattattaaagttatatataggaggtaggtggtgggtttttttaattaattatttatagttttattttttcggatttggtgttgaacgaaagttaaggtatttttggtgttgttgttgttgttggtggtagaggaagtttatgtgaaaagaaaaatcgggcggggtaggtattaaaaagaaaataaagaagtagatttagaaaattatattgtttttttatttaatggaatattttcgttttagcgtagtgttgaatttaatatcgaaaaaagtttagagaaatttttgtagataaattagtgaagagaacgcgtagtatatattattgttaatagaattattttatggagagggaagcgggaggaaaaaggaaggagaatgaataaggggtttaaatttttatatattgtaaaatatttagatatttgggattaaaataaaatataaaaggaagttttttaggaaggagaggattaaatggaatttgaggtagtttaggtgattaaggag

SEQ ID NO: 285 - DNA, 4993 bp, Artificial Sequence
  chemically treated genomic DNA (Homo sapiens)
  unsure (2326, 2424)
ttattttattgtgtttgtaatttttatttatttatttatttaattttagagatagggttttgttgtgttgtttaggttggagtgtagtggttatttataggcgtagttatagtataatattgttttaaatttatgggtttaagtaatttttttaataatacgtaatatttatagatggaattttttttttttcgagacggatttttattttgtcgtataggtttgagtgtagtggcgtgattttagtttattgtaagttttatttttcgggtttatgttatttttttgttttagtttttcgagtagttgggattataggcgttcgttattacgttcggttaatttttttgtttttttagtagagacggggttttacggtgttagttaggatggtttcgattttttgattttgtgattcgttcgtttcggttttttaaagtattgggattataggcgtgatttattacgttcggttagaatattttttttttttgagatggagttttattttgttatttaggttggagtgtaatggtttggtttcggtttattgtaattttcgtttttcgggtttaagttatttttttgttttagttttttgagtagttggggttgtaggtacgggttattatatttggttaatttttgtatttttagtagagacggggttttattgcgttggttaggttggtttcgaatttttgattttatgattcgtcgttttcgttagttttttaaagtgttgggattataggtatgagttattcggtttatagatagaatttttatagaggtgtttttttttttttttttttttggatgtagttttgttttaatatttaggttggagtgtaatggcgtaatttcggtttgttgtatttttcggtttttaggtttaagcgatttttttgttttagttttttaagtagttgggattataggtatatattattatatttggagatattttgtatttttagtagagacggagttttgttgtgttggttaggttggtttcgaatttttgattttagataatttatttgtttcggttttttaaagtattgggattataggtatgagttattgtatttggtttatagaggttttaagttaaaatgaggttttagggtggatgttaattttttatgattggtgtttttataagagaaaatttagatatagatatatatagaggaaagatgatgtggagatagttatttataggttaaggggagagaatagaatttagaatagattttttttttatggtttttaaaaggaattagtttttttaatattttgattttagatttttagtttttagaattgtgagaaaataaatttttgttgttttagttatttaatttgtggttttttgttatggtaatttgttttagtttgttgtgtgatgttgtaatagaatatttgagattggataatgtataaagaacggaaatttatttttttatagttttaaaagtgtttaagttttttgattgcgtttttatatggtagaaggtagaagaataagagagaatgaattttgtgtttttatatggtagaaaagtagaagggtaagagagagtgaatttatttttataagttttttttatagtgatattaatttatttatgagggcggagtttttatgatttaaaaaattttagaagattttattttttaggttgggtgcggtggtttatatttgtaattttaacgttttgggaggttgaggcgggcggattatttgaggttaggagtttaagattagtttggttaatttagtgaaattttgtttttattaaaaatataaaaattagttaagtttggtggtatatatttgtaattttagttatttaggaggttgaggtaggagaatcgtttgaatttgggagatggaggttgtaaggagttgagattgtgttattgtattttagtttgggtagtagagtaagattttattttaaaaaaaaaaaagattttattttttaatattattgcgttggggattgcgtttttaatatattaattttggaggatatatttagattatagtataattttagtaaattaatgtagatttatgtttaattatattaataattatttttaatataaatattttaatttaatattttaattaaaagatagtagtttggtttttattacggggttggaagggggtcgcgttatttaatttggatggttaggttagttgaaaatttggtttaggagttttttgaatatttgttagtttttggatagtaggttttttttttgtaatgtttttttgcgagattttttttttgggatttttgtgttnatttttttttgttttgttttagttgatggtttgttttgttttttgtttcggtttttggattttgtttggatgattcgagttggaggggttggacgttnttttttttgtcgttgttgtgttttttgttgattttttgagttgcgttttttttttgtttttttttttttttgttttttgaggtggattttggtttggagaatttttgttttttgtttttttttgcgttttttgttttgtgatggatattgcggttaggttggattttgattttttcgggttggtttttttttttgtttttttttttttttttgattttcgtgggtttttgtttcgagttttttttgattttcgtttttttttgtcgttttgtttttagaggagtttcgaggtttttaagagggagaggaggttaacgaatttcgagaggcgttataagtattgtatgggggttaatcggagtaagattttgtttttaaaaataaaattaaattaaataaaataaatatatataatatgaaattgttaagtttttagtaagattaagaaaatagagaatatataaatttttaattattaggaatgaaatagtgaaattaaaaatagattttaaatttaaatgtaaaagttaaaataatgaaatatttagaaaaaaatagtaaatatttgttattttggggtaggtaaatattttttaggatataaaaagtagtaataaaaaaaatgataaattggattttattaaaatttaaaattttgggtcgggtgtggtgattgatgtttgtaattttagtattttgggaggtcgatataggtggattatgcgaggttaggagtttgagattagtttggttaatatggtgaaattttgtttttattaaaaatataaaaattagttgggtatggtggtatatgtttgtaattttagttacgtgggaggttgaggtaggagaatcgtttaaatttaggaggcggaggttttaggtgagttaagattacgttattgtattttagtttaggtaataagagtaaaattttattatatatatagatatatacgtatatatatatatattttaaaattttcgtttttttaaagatattattatgaaaaaaattttggtcgggtgtagtggtttacgtttatgattttagtacgttgggaggtcgaggaaggtaggtggattgtttgaggttaagaattttgagattagtttggttaacgtggtgaaatttcgtttttattaaaaatataaaaattagttaggcgttgtggtaggcgtttgtaattttagttatttgggaggttgaagtaggagaatcgtttgaatttgggaggcgtgatcgggttattgtattttagtttgggcgatagagcgaggttttattttaaaataaataaataagaaaattttatatatatatataaaaaataaaaaataggtcggtgtagtagtttattttattttgagaggttaaggcggaaagatagtttgaattttatagttgagatcggtttgggtaatatggtaagatttcgtttttatttaaaaaaaaaaaaaaaaaaaaaaggtcgggcgtggtgggtgtgtttgtggttttagatatttaggagattgagatgggaggattttttgagtttaggagttttaggcggtagtgagtcgtgttcgcgttattgtattttagtttgggtgatagagtaagaatatgttttaaaaaataaataaataaaaaaaggtatataattacgatttattttcgtaaaacgtttttagagcgttttagcggtgttttttattatttggcggtttttacgtttttttgagatttatagatttatttttttttttagggggcggagtttatatcgttgagtatttatttttgtttttttttttgttaggggtatcgttttatttttttttgtttggagaaattgtcgtttttttttaaaggattttcgaagtcggaaggagtagttattttttattttcggttgttgtaagtaagttgttttgatttttttttagagttggggattgttgttggagttcgagttttaggtttagagtgggtgcgatggttttgtttgtattttgtatttttcggtagacgttcgggaattttattaagtgggtgattttagagagttcgtttttatatttcgatttcgagtttagtattcggtttattgtatagggatttcgcgttttatagttgcgttttttttgattttcgtaattcggtgcgcggttcgcggaacgtttcgatttttaggggtacggaaggtcgaggcgtgtcgggggagttaggagtagttggttggcgggcgtcgcgggttttttcggttacgtgatatttcggataacgtgcgtcgttacgtgacggtagagtttgtgagcgttttttttacgtgacggaggcgtttgtacgtggattaatggggaggcgggggcggggtcggtaggggcggtgcgcgggaagggatttcggattcggaggtcgcggagagttgggtagtgttggtcgttggcggagcgttggggtagtatgaagtgtttggttacgggcggtaacgtgaagggtgagtgtaggtcggtttggtagcggcggtgtagtagtcgcggagtcgttagtttaattttttttcgttttttttttcgtagt

SEQ ID NO: 286 - DNA, 4993 bp, Artificial Sequence
  chemically treated genomic DNA (Homo sapiens)
  unsure (2570, 2668)
attgcggggagaagagcggaagggggttaggttggcggtttcgcggttgttgtatcgtcgttgttaggtcgatttgtatttattttttacgttgtcgttcgtgattaggtattttatgttgttttagcgtttcgttagcggttaatattgtttagtttttcgcgattttcgggttcggggttttttttcgcgtatcgtttttgtcggtttcgttttcgtttttttattggtttacgtgtaggcgttttcgttacgtgagaaaaacgtttataggttttgtcgttacgtgacggcgtacgttgttcggggtgttacgtgatcggggaggttcgcggcgttcgttagttagttgtttttggttttttcggtacgtttcggtttttcgtgtttttggagatcggggcgtttcgcgggtcgcgtatcggattgcgaaggttagagaggacgtagttgtggggcgcgaggtttttgtgtagtggatcgagtgttggattcggagtcggagtgtgggggcgagttttttggggttatttatttagtagagttttcgggcgtttgtcgggggatatagggtgtaagtaagattatcgtatttattttgggtttgagattcggattttagtagtaatttttaattttagaaagaagttaaagtagtttgtttgtagtagtcgggagtgggaggtggttgtttttttcggtttcgaggattttttaaggaaaaacggtagtttttttaggtagaaaggggtagaacggtgtttttggtagagggaagaataagagtaaatgtttagcggtgtgggtttcgttttttggagaggggagtaggtttgtgagttttagagaggcgtaggggtcgttagatgatgaggggtatcgttgggacgttttggaaacgttttacgagggtagatcgtggttatgtgtttttttttgtttgtttgttttttgagatatatttttgttttgttatttaggttggagtgtagtggcgcgaatacggtttattgtcgtttggaatttttgggtttaagggatttttttattttagttttttgagtatttgggattataggtatatttattacgttcggttttttttttttttttttttttttgggtagagacggagttttgttatgttgtttaggtcggttttaattgtggggtttaagttgttttttcgttttggttttttaaagtggagtgagttattgtatcggtttgttttttgttttttgtgtgtgtgtgtggggtttttttgtttgtttgttttgagatagagtttcgttttgtcgtttaggttggagtatagtggttcgattacgttttttaggtttaagcgatttttttgttttagttttttaagtagttgggattataggcgtttgttataacgtttggttaatttttgtatttttagtagagacggggttttattacgttggttaggttggttttaaaatttttgattttaagtaatttatttgtttttttcggttttttaacgtgttgggattataggcgtgagttattgtattcggttagaattttttttataatagtatttttagaagaacgaaagttttaaaatgtgtgtgtgtgtgcgtgtgtgtttgtgtgtgtgatggagttttgtttttgttgtttaggttggagtgtaatggcgtgattttggtttatttggaattttcgttttttgggtttaggcgatttttttattttagttttttacgtagttgggattataggtatgtgttattatgtttagttaatttttgtatttttagtagagataggattttattatgttggttaggttggttttaaatttttgatttcgtataatttatttgtgtcggttttttaaagtgttaggattataggtattagttattatattcggtttaaagttttaaattttgatgaaatttaatttattattttttttgttattgttttttatgttttaagaaatgtttatttattttaaagtaataaatatttgttatttttttttagatattttattgttttagtttttatatttaggtttaggatttatttttaattttattgttttatttttgataattggggatttatatgttttttatttttttagttttattagggatttaataattttatgttatgtgtatttattttatttaatttaattttatttttggagatagagttttgtttcggttggtttttatgtaatgtttgtggcgtttttcggggttcgttggtttttttttttttttgagggtttcggggtttttttaagagtagaacgatagaagagaacggaaattagagaggattcgggataagaatttacgaaagttagaagaggaagagaaagtagaagaggaagttagttcgagaaggttagaatttagtttagtcgtagtatttattataaaataagaagcgtaaaaaaggataagaagtaaaagttttttaagttagaatttattttaaagggtagaagagaggagaaataaaaaaaaaacgtagtttaaagaattagtagaaagtatagtagcgataaagaaagnagcgtttagtttttttagttcgagttatttaaatagaatttaagggtcgggataggagataaaataaattattagttaggataaagtaagggagaatnaatataaggattttaggaggaaagtttcgtaaggaaatattatagagaaaaggtttgttgtttagaaattggtaaatatttagaagatttttgggttaggtttttaattagtttggttatttaagttaaatagcgcggtttttttttagtttcgtggtgaagattaggttgttgttttttagttggagtattaaattggagtgtttatattgaaagtagttattaatatggttgggtataggtttatattagtttgttggagttgtgttatggtttgaatgtgttttttaaaattgatgtgttgaaagcgtagtttttaacgtaatagtgttagaaggtggggttttttttttttttgagatggagttttgttttgttgtttaggttggaatgtagtggtataattttagttttttataatttttattttttaggtttaagcgatttttttgttttagttttttgagtagttgggattataggtatgtgttattaagtttggttaatttttgtatttttagtagagatagggttttattaagttgattaggttggttttgaatttttgattttaggtaattcgttcgttttagttttttaaagcgttaggattataggtgtgagttatcgtatttagtttagaaggtggggttttttaagattttttagattatgaagatttcgtttttatgaatggattaatattattatgaagagggtttgtgggagtgggtttatttttttttgtttttttgtttttttgttatgtgaagatatagagtttatttttttttgtttttttattttttgttatgtgaggacgtaattagaagatttgaatatttttggaattatgagagaataaattttcgttttttatatattatttagttttagatgttttgttatagtattatataatagattaagataggttgttataataaagaattatagattgggtagttgaaataatagaaatttatttttttatagttttgggggttagaagtttgagattaaggtgttgagagggttgattttttttgggagttatgagaaaaggatttgttttaggttttgttttttttttttggtttatagatggttgtttttatattattttttttttgtatgtgtttatatttgaatttttttttatgaggatattagttatagaggattagtatttattttaagattttattttaatttaaaatttttgtaggttaggtgtagtggtttatgtttgtaattttagtattttgggaggtcgaggtaggtggattatttgaagttaggagttcgagattagtttggttaatatagtaaaatttcgtttttattaaaaatataaaatatttttaggtgtggtggtgtgtgtttgtagttttagttatttgggaggttgaggtaggagaatcgtttgaatttgggagtcggagggtgtagtaagtcgagattgcgttattgtattttagtttgggtgttagagtaggattgtatttaaaaaaaaaaaaaaaaaaaaatatttttgtaaaaattttgtttataggtcgggtggtttatgtttgtaattttagtattttgggaggttgacgggggcggcggattatgaggttaggagttcgagattagtttggttaacgtagtgaaatttcgtttttattaaaaatataaaaattagttaggtgtagtggttcgtgtttgtagttttagttatttaggaggttgaggtaggagaatagtttgaattcgggaagcggaggttgtaatgagtcgagattaaattattatattttagtttgggtgatagagtgagattttattttaaaaaaaaaaaatattttggtcgggcgtggtaggttacgtttgtaattttagtattttgggaggtcgaggcgggcggattataaggttaggagatcgagattattttggttaatatcgtgaaatttcgtttttattaaaaaaataaaaaaattagtcgggcgtggtggcgggcgtttgtaattttagttattcgggaggttgaggtaggagaatggtatgaattcgggaggtggagtttgtagtgagttgagattacgttattgtatttaagtttatgcgatagagtgagaattcgtttcggaaaaaaaaaaattttatttgtaaatattacgtattattaggaggattatttgagtttatgagtttgaggtagtattatgttatggttgcgtttatgaatagttattgtattttagtttgggtaatatagtaagattttgtttttaaaattaaataaataaataaataaaaattataaatataatgaaataa

SEQ ID NO: 287 - DNA, 5993 bp, Artificial Sequence
  chemically treated genomic DNA (Homo sapiens)
  unsure (1411, 1413)
tttggtttatttgggaaatggttggtagtatattgtggtttaagtttagttatgtatgtgtagagaaataggttggataaaggtatgattggagattgattgggaagagttattgtttgttgtattagataatttggaatattatttatttatttattgattataaatgttttgggtagtattgatatgggtatagtaatgttatattagttaaatagattttaattgtatttaatattaggttgttaaaattttttaaggaaattttgtttttatttttatagttgtgtttaattttgatgaattatttttttattaagtgaagagagattgatagattgattgatttttagagatagggttttattttgttattagggttgtagtgtagtggtaaaattatagattattgtagttttgagtttttgggtttaagcgatttttttgttttagttttttaagtagttgggattgtaagtatgcggtattacgtttagttattttttttatttttatttttgtagagatagggttttgttatgttgtttaggttggttttgaatttttggttttaagtgatttttttgtttcgattttttaaagtgttgggattgtagttgtgagttatagtatttggtttaagggatttagttaaaataatattttattatatatattaaaaatattttttttaaatggtatatttttttttattaaagttggttagtagtttttagtattagtggttagtttattttagaagtagtttgatttttagaagttttagttttgttgttatagtttttaatggattttgagggtggggtggtgtttttttaaaaatatgtttgttaggtttagaataataattatttaggttttgaaaatttatttaaaaatgaatgttttttataatagtgtaattgtttttttttagtgttattaaatttttatattttataatgtgttatttttaatggatttaattttaaatgatgttttatatttgatttatatttgttaatttagatttatttagaaaattaaagtttgtagtagtgttgaataatttttttttgtttttgtttttatttgaattttgttgtggtataatataatggatttttatttttttttttttttgttttttttgttatattagtgttttttaggaaatgtgaagtgtttttattttagagattattgtaaaatgttatatttttaattgattatgtttgtttttgtgtgtatatgtgaaaatattttttttatgtaattatttttttttaaaatgtaattgttataattggtttattatttttgtttaattattagtagtaaagaatttaattattgtaattttttgatattgattggtttttttgttatatatttttttttttatttttgntntttttttttttttttttttttttttttttttttggaaacggagttttttttatttaggttggaggtatgattttggttaatcgaaatttttgtttttcgggttaaagcgattgttttgttttaatttttcgagtagttgggattataggtatttattattattatgtttgattaatttttatatttttagtagagatggggttttattattttggttaggttggtttttaattttcgaattaaggtagtacgtttggtttgggttttttaaagggttgaaattagtttggttaatatggtgaaattttatttttattaaaaatataaaaataggttagggtagtggtttacgtttgtaattttaatattttcggaggttaaggtgggcggattatttgaggtcgggagtttaagattattttgattaatatggagaaattttatttcgattaaaaatataaaattagttgggtatggtggagtatgtttgtaattttagttattcgggaggtaggagaattatttgaatttagaaggtggaggttgcggtgagtcgcgatcgcgatattgtatattagtttgagtaataagagtgaaattttattttaaaataaaataaaataaataaaatattaaaaattagttgggcgtggtggcgtgtgtttgtaattttagttatttcggaggttgaggcgggagaatcgtttgaattcgggaggtagaggttgtagtgagtcgagatcgtgttattgtattttagattggtagataagagtgaaatttcgtttcggagaaaaaaaaaaaagttaatttagagtttatttattttatggtagaagataattagatttagagtttatttattttatggtagaagataattagtgatgtgttataataattagaagagttttgtaggtaagtaagttatatatggattttatttatatttttagtagatatttttagaaatatatggattttatatatatttttagtagttttgttaggttggttattatttttatttatatttattagtgttatttatgtattgttttaattatttgtattttttcgtatgtgtttaaatggaaagtaatataatgtttacggttttttgagaaataataaaatttttaatatttaaaaatggtaataataataaaaaaaagataagtagggtttaggaaatttattttagggtaattgtttgatttattttaagttttatgtttaaaaataagtttaatttatatgatttaaaatgttggagttaagaaaagtcgttgtaaaggtatttaatgaaatatttggtttgtttagttgtttttgttatgatttttgtataaattaagaacgttttattttgatatatatagtggattttatatttaaatattttttgtatttaataaattgaaaatagaaatagatatttttttaaatagtgtaagatttttttaatttttgatttatatcgtaaggttggtggattgtttagatgttgtacgatgttttttatttcgatgttttttggtttatttgtagtattttttattatggggtaaaagatttatattttttatttttagtgatttttaatttggtttttgagtaaaaataaagtttgatgaggaataaattaaggtagattttttgttgaaattagtgaagaatataattttattagcgggggtgagtgataagttttttatttttttttatattatagttaacgaagtaacggaattaggagaaatgtttattatttttatgttttatattagttttgataaaaattataattaagttttattgaatgttttgatattgaaacggtagtattatacgtttaggagagaattatagtaggggtgttatgagaattaatacgaacgatttaaaaatattgatttttttttacgagattatttttttttaaaaaaattaaattgagtttgatttttattgattgtatttttcggagttagtattttatggtttttttgatatatacgtttggcgtgggagggttgagcgttgtagcgtttcggaatttttttagtgaatcgtaaatgggtttaacgtcggggttcgcggagggttgtttatggagtattattgaaaattaaacgttattggtgtttaatgttggtatttgtcgacgaaaaggttttttgtttaaaaaagaatttattgttttattttaatagtaataaggagaataagtatttttttttcgttagaagtttttggattggttgtaatttagaggaaatagagttggggtatttgtcgggatagcgattagaagtagttagagtttcgttttcgttcggatttttaaggtcgttttagagttttgtatggttttttagagtcggttaaggcgagaattttgtcggtagttgtttattcgtattcggttttttttagcggttcgttttttttatcgtttgttcgtaaggtttcgtttattttatcgtttcgttttattttattttgcggaggcgatagagtgcgcgcgcgcgcgcggggtttcggttggtttttttttcgagcgttcgcgtttcgtatgcgtagtttgtttcggcggttttcgtttgtttgaataggaaggcggatatattagttttttttagtttttttcgttttattttttaggtattcgtcgtcgcgattcgtttttttttcggttgggatcgtagttttttttagaagtttttttattagtagtcgtcgggatttaattatcgttttttttttcgttcgttttttagttttttttttgttaagtttttatcgggtatcgatttcgttttgttttatcggatatcgtagtagtagttttagtagcgacgggataaaatgggagagtgaggttgttttgcgtggattagttcgtggtcgagattgatcggtgcgtcgggtcgggtcgagtagagtcggggacgcggggttagatcgtttatagcgtttttgagcggagcgggttcggttcgtggttcgagcggcggtcgtagttggtatagttttttattcgttttttgttttcgttttttttttttttttttttttgttgttcggagggagtttttattttgtttttttttttttattcgtttttgtttatttcgggacggggatttttttatggcgacggcggtcggggttcgttagattgaagtatttcgtcggagcgacgaggttggtggcgacggcgttgtcggttgtcgtgaggggttgtcgggtgggatgcgattttgggcgttcgagcggttgtgggtcgttgttgttttcggttcggggtttggagagcggaggtttttttagtgaggggaagacgggggaatcgggcgtatttggtgattttgaggtttcggttttttcgtttcgcggttgcgaatttatcgcggaggaagttggttgaaattgtttttcgttgttggtgttggtaagagggtattgttatagtagtagtaatatgtcgattggggatagttttgagattcgatttgaaaaaatggataatttgttgcgggattttaaatcggaagtgaattcggattgtttgttggtgagtagcgttgtttttttttgtttgtttggggttttgtatgtttttttttttttttgtattagtttggttcgttgtaaaagttttaggtgtgtataatcgttttggaaaatgttagatttttgttttttgaagaattttggagtattattaatattttatggtgtggttttatttgttatttgattggttttgtattaattattttgaatttttaattttgatttagtttatgagtattcgaaagatatttataaattgttattgtaggtattttataaaaagttattacgttagagttattgtaatgtatatagtttgttgaatggcgatcgtagtaattaatgttaatttttttgattcgtttgatagttaaattggaaagattattttgtatttttttttttttttgcgatttagtttttaggggtttagtttttagttttgaaaatgataacggagaattgttattgaggaagtgatttttgagttaaaattttataggtgatttgagtttgaaggaattttttgttaaattattgtaaaaaattaagataattggttataggtaattatagtgttaatttattttattgtattattggttataaaagtacgtattatatagttattgtaattgtttttttggtggtgtggtatttaatattgttatttgtaaaatattttaaagagggttttatgatatgaaaaattataattttattttaaaaatagttaagtggttgataatatagttatttgtaaataattggaatttttaggtttgatatattttttttgtaaatgtattaaagttgtttagagtttttgaataattaagggttatataatattttttggtttaaataaaattatataatttttaaaataaggttttagggagtatgtatatggataggattttataatgttttcggtgaaataatgttagatatgtttaattttggggattaagattaaggaaataaaataatattat

SEQ ID NO: 288 - DNA, 5993 bp, Artificial Sequence
  chemically treated genomic DNA (Homo sapiens)
  unsure (4581, 4583)
atggtattattttgtttttttaattttaatttttaaaattgagtatatttaatattattttatcgaagatattgtgaaattttgtttatatatatgttttttgaaattttattttagagattatgtggttttgtttggattaagaaatattatataatttttagttgtttagaaattttgaataattttgatatatttatagaggaaatgtattaaatttaagaattttaattatttatagataattgtattattaattatttaattatttttaaaatgggattgtggttttttatgttataaaattttttttagaatgttttataagtgataatgttaagtgttatattattaaaaagatagttataataattgtatggtacgtatttttgtaattaataatataataaaataagttaatattgtaattatttatgattaattattttggttttttataatagtttagtaaaaagtttttttaaatttaaattatttatgaaattttggtttaaaaattatttttttaatagtaatttttcgttattatttttaaggttaaaaattaaatttttaggagttaaatcgtaaaaaggaaaaaaaatgtaaagtagtttttttaatttaattgttaaacggattagaaagattaatattaattattacgatcgttatttaataaattgtatatattgtagtaattttgacgtgataattttttataggatgtttgtaatagtagtttgtaagtatttttcgggtatttatgaattgagttagaattaaaagtttagagtagttagtatagagttagttaaatggtaaataggattatattatgagatgttaatggtattttaagattttttaggaaatagaaatttagtattttttaagacgattatgtatatttgagatttttgtagcgaattagattaatgtaagaggaaggaaagatatgtaaaattttagataagtaaaagagaatagcgttatttattagtaaataattcgaatttattttcgatttgggatttcgtagtaggttgtttatttttttaaatcgagttttaaaattgtttttagtcgatatgttgttgttgttgtgataatgtttttttattagtattagtagcggaaagtaattttaattaatttttttcgcggtgggttcgtagtcgcggggcggaggagtcggaattttagggttattaggtgcgttcggttttttcgttttttttttattgaggggattttcgttttttagatttcgggtcgggggtaatagcgatttatagtcgttcggacgtttaaagtcgtattttattcggtagttttttacgatagtcgatagcgtcgtcgttattagtttcgtcgtttcggcgaggtgttttagtttagcgggtttcggtcgtcgtcgttatggaggggttttcgtttcgagatgggtaggagcgggtagagaaagagaagtagggtggagatttttttcgggtaataagggagggagaagaggaaaggcgaaagtaaagggcgggtgaggagttgtgttagttgcggtcgtcgttcgggttacgggtcgggttcgtttcgtttagaggcgttgtagacggtttagtttcgcgttttcggttttattcggttcggttcgacgtatcgattagtttcggttacgagttggtttacgtaggatagttttatttttttattttgtttcgtcgttgttggggttgttgttacggtgttcggtggggtagggcgaggtcgatgttcgatggagatttagtagaggaaaggttggagagcgggcgaagaggaagacgatagttgggtttcggcggttgttgatgggggagtttttgggaggggttgcggttttagtcggggaaagggcgagtcgcggcggcgaatgtttggggggtggggcgaggggggttgagagggattaatatgttcgtttttttgtttaaataaacggagatcgtcggggtagattgcgtatgcggggcgcggacgttcggaaggggaattagtcgggatttcgcgcgcgcgcgcgtattttgtcgttttcgtagggtggggtggggcggggcggtgaggtgggcggggttttgcgggtaggcggtggagaaggcggatcgttgggaggagtcgagtgcgggtaagtagttgtcggtaaggttttcgttttggtcggttttgaggagttatgtagggttttggagcggttttggaggttcggacggaggcggagttttggttgtttttgatcgttgtttcggtagatgttttagttttgttttttttgggttgtagttagtttagagatttttgacgaggagagagtgtttgttttttttgttgttgttagggtggggtaataggtttttttttaggtaagaagttttttcgtcggtaggtattagtattgagtattagtggcgtttggtttttagtggtattttatggatagtttttcgcgagtttcggcgttgaatttatttacgatttattgggaaagtttcgaagcgttgtagcgtttagtttttttacgttaggcgtgtgtgttaggggagttataaaatattgatttcggaagatatagttaatagaagttaagtttaatttaatttttttaaaggaaaataatttcgtagaaaaaaattaatatttttaagtcgttcgtgttagtttttataatatttttattgtagtttttttttggacgtgtaatgttgtcgttttaatgttaaaatatttagtgaaatttaattgtgatttttattagaattaatgtaggatatgagaataatgggtattttttttagtttcgttatttcgttgattgtggtgtgaggaaaggtgaaagatttgttatttattttcgttgataaagttatgttttttattggttttagtaggaaatttattttaatttattttttattaaattttatttttgtttagaagttaaattaaggattattagaaatagaaaatgtggattttttattttatgatggaaaatgttatagatgaattaaaaagtatcggagtaaaaagtatcgtatagtatttgaatagtttattagttttacgatgtgagttagaggttaggaaaattttatattgtttgaaaaaatgtttatttttatttttaatttattaaatataagaaatatttagatataaaatttattatatatattaagataggacgtttttggtttatataaaaattataataaagataattagataaattaggtattttattaaatgtttttgtagcgattttttttggttttagtattttaagttatgtgaattagatttatttttaagtatagggtttaaaataaattaggtagttgttttaaaataaattttttaaattttgtttgttttttttttattattattattatttttaggtattaggaattttgttgttttttagagaatcgtgaatattatgttgttttttatttagatatatacgaaaaaatataagtagttaagataatatatgagtgatattgataaatataagtggaagtgataattaatttggtagaattattagaaatatatgtggggtttatatatttttagaaatatttattagaaatataggtggggtttatatatagtttatttatttataaggtttttttgattattgtgatatattattagttattttttgttataagatagatggattttaaatttagttattttttgttataagatagatggattttaaattaattttttttttttttttcgaggcggagttttatttttgtttattagtttggagtgtagtggtacgatttcggtttattgtaatttttgtttttcgggtttaagcgattttttcgttttagttttcggagtagttgggattataggtatacgttattacgtttagttaatttttggtgttttgtttgttttattttgttttgagatggagttttatttttgttgtttaggttggtgtgtaatgtcgcgatcgcggtttatcgtaatttttattttttggatttaagtgatttttttgtttttcgaatagttgggattataggtatgttttattatgtttagttaattttgtatttttagtcgagatggggtttttttatgttggttaggatggttttgaattttcgattttaggtgattcgtttattttggttttcggaaatgttgggattataggcgtgagttattgttttggtttatttttatatttttagtagagatggggttttattatgttggttaggttggttttagttttttgggaggtttaggttaggcgtattgttttagttcgggagttaaaggttagtttggttaaaatggtgaaattttatttttattaaaaatataaaaattagttaggtatggtggtggtgggtatttgtaattttagttattcgggaggttgagataggataatcgttttaattcgggaggtaaaggtttcggttagttaaaattatgtttttagtttgggtgaaaaagatttcgtttttaaaaaaaaaaaaaaaaaaaaaaaaaaaaaaaaanantaaaagtggaggagaaaatatgtaatagaggggttaattaatgttaaaaaattatagtaattaaattttttgttattaatagttgaataagggtagtagattagttgtagtagttatattttaaaagaaggtagttatataagagaagtatttttatatatatatataaaggtaggtataattaattaaaagtataatattttatagtgatttttaaagtaaaaatattttatattttttgagaagtattgatatggtagggggagtagggggaagaggaggtagaggtttattgtgttatgttataatagagtttaagtgaaagtagaagtaaaagaaaattatttaatattattataaattttagttttttggataaatttgaattaataaatatgagttaggtgtaaaatattatttaggattaaatttattaaaagtaatatattataaggtatgagaatttaatggtattaggaaaggatagttatattattataagaaatatttatttttaggtaaatttttaaaatttaaatggttattattttaaatttaatagatatatttttggagaaatattattttatttttaaaatttattgaaaattatggtagtaaaattggggtttttgaaaattaaattatttttaaaatgggttgattattggtattaaagattgttgattaattttggtaagagaggatatattatttaaagaaaatgtttttggtatatgtagtagaatgttgttttaattaagttttttaggttagatgttgtggtttataattgtaattttagtattttgggagatcgagataggaggattatttgaaattaggagtttaagattagtttagataatatagtaagattttatttttataaaaataaaagtaaaaaaaatagttgggcgtggtgtcgtatgtttgtagttttagttatttgagaggttgaggtaggaagatcgtttgagtttaggagtttaaggttatagtaatttatgattttgttattgtattatagttttggtgatagagtgggattttgtttttaaaaattaattagtttgttaatttttttttatttgataaagaaataatttattaaaattaagtatagttatgaaaatgaaaatagaatttttttagggaattttaataatttgatattaaatatagttaaaatttgtttaattggtgtgatattattatatttatgttaatgttgtttaggatatttatagttaataaataagtaaataatgttttaaattatttagtataataaataatggttttttttaattagtttttaattatatttttgtttagtttgtttttttatatatatatagttgggtttaggttatagtgtgttattagttattttttaaataagttagg

SEQ ID NO: 289 - DNA, 6273 bp, Artificial Sequence
  chemically treated genomic DNA (Homo sapiens)
tattatattaagtggaataagttagatatggggagataaatgtttatgattttatttatttgtggagtttaaaaattttttagggttgggggtggggaagggcgatgttgtttaaagggtataaagttttagttatgaggtagataggttttggaggttgaaggtatcgtatggtagttggagttagtattttggaaatgtgcggagaggagcgttgtttttatcgtttttttgtttgaattttattttttttatgtggtgtttgatttaggttttttcgaggtatttatattttagttgatattggtgttgttttgaggtgttatttgtttgggtttcgtttgtcgcgtagtttttttttggtttgtttttgtttcgttgtgtttatgattgttttgtgtgttcgtatttattttttgggttttattgttttaaagagaaaaagggtttattgaggtagggtttttttttttcgttgtttgggagttatgattttagtcgtgtttcgttgatattatggaaggtattagagtgttttaggtagagggacgaaaaaaaatttgtgttattaggaaagttatttgattagtttttttgtagattttggttttatggtttataaatgggttttaaaagaaagtggtatgaaggaatatagtatttaaaaattaataaaatttaaagttgtttttatagcgggttggcgggggaggtgttgtaggtgaagtttattttttgtgagttttgtgtttttttatttaggttggatgggggatgagggttttagcggggagggaggaagttaattatgatggtttttatagtttgaaatttaatgtggtttttttttttaaatgtaagttagttaataagggttaagtataattggtttgtgggtttttatttgttttttttgattatttagaaattaggttttttggttttaaatgtaaattttattttttggtattttattattagagttttatttttgttattttgaagatttttacgtattaagattttttttttaaattttcgatatgtttagagattttaaattgttaaattgagggtataggtgttattttgatatggtttggttggtatttagatgtgaatgagatttaagtgttttgtgggtgagggttaggggttagttagagattagaggtaaatttgattttttttgatttttgtcgagggtttaagaagtttttttttgatagttttaggttttttgttgatatttgtttcgaacgtgtttttatttgaattgtttattatagtttattttttagggttttaggattttaagattatttttttgagtaaggattaatttttatatttaagaaattttaaagttataaatattttaagtatacggggatttatagtttaggaaaaggatttttttttgtatatttagggattatattaagggaagtttgattaaatttatttgtattatagttataggaagtagtttataggggtatatattgaagtttatttttttttttcgtattggttggatattgtttttggagtatttagtaggatgtttgtgatgggtagagttttcgaatgttgatatttcggaaaagtacgattttttgttttcgtagatggttagtattaggtgattttggtgattttggtgaagttttgtattaggtgaatttagtgaatttattttttatggtaaaattttagttttaatgaagatcgaatgttttaatttattttaaagatatatagttttatttgaagtgtaatttagcgttttattgaaaatatgtgggagttttagaagtttgaaatttttagtagtttgtaggattgtttggagacgaatagatatttgtggtatttgattaattagaagtttttggatgttatttaagttatttttgtggggtgtttcgagaatgtggtatttttttatatgtagagagtatattagttttatttataaggtgtttgtgtagtagggagagatgggaaattttgttatagttgtttgatagtgttttgttattttttagtttgggattttcgtttttttttgtttgtttaggaaatttatttttttatttttttatttttaggggtttagagtaaaggttattttttttttgatttcgttaattagaattggttttttatttattttttacgtattttttttattttatataaaaacggtatgagttttgtttgtttatttatttttttttttataagattgtgaattttttgggatgttgtaattattttgtgttataaatgattattatagtgttagatgttagtgttcgataattatttgtggaattgtattgattatatattagttaatttggtatttatagaagtagtagttattacggaatttagttttaaatttattgtgtttgagttagaggaaatgtgagatatttagaggtttattaagttttttattttttttttagtttttttttattttattatttgggtaagagtttttattaagtttatttttttttttggtatttggtaaggataatttggatttcggttatagtgggttttgatattatatttattttagatttagtggttttggaggattttattatataattatatgaagtagtgttttatgattattagagattttggtatacgtgtattttattaggagaaaaataaaggtaaatagatttattgttttagtaatgaattttagtgaaatttgaatgatttttttttttaagtttaatagaatagttttgttgtttttaaatttggggaattaatgaatgttttatgaaatattttttttttaattttgttagattaggttaaaatattattgttggtataatataagttttgatttaggtttgtttgttttggggtttttgttttgaataggatgtttatgagttggtataggtggtatttagtatttttgttttcggttagtattattggtttttttttcgagggaagtatggtcgggttggtttttttttattttcggagtttgtgtttagttggaggtttatttattttttttcgtgttgggtatagagtgtttttgtgtttgtttagagttaggatgtttgagggttttagtagggatatagggtattaagaggttggttttgagagtatagattattatttttttagtagaattttaaaggaagtaggtaaagtagtttttatgggtatttaattggtatattattttgaaaaggagtaaaaagtggtgtttggtgtttttgtggggttttgtatttttgtttttaaagaatagttattatagattttttaatatataatatgaaaattaattgtattatttaaatttataaagtatttttatattcgtgattttgtataagttttttggtatttagtaagggaggtgagataggttttattcgtattttttttttagagatgagtcgtgggaataacgtgtaacggtatttaagtttattaagtaaggaaggggtagcgttagagtcgtggtgttaaattttcggtttttatttcggagtagtatcgtttaacgcgggtttttaggaaatttagagagtttatttgattttattttagttcggatgtagtatgattttaaagtttttatttaaggatattttgatttttttatttattttagttaaaatagattatataagtattaacgtaatatttgattagtttagggagtaaaataacgcgaggattttgtagttcgtattgtaaaagagtaagtaagatttgttaatttattatcgtattcgtttttgttttttgtaggtggtgatggtgttatgttaatgggttcggtttttttttgtttttaaatataaatttaatacgtgtataagaggaaaatagagtaggttgtacggggtcgtgagttcgtattttcggttttgttgtagtttttggtgagtatttttaggaaaaaaaagaaaaaagtgtttttttttaaggcggatttcgagcggcgttgtcgttagtagcgggtttgagggttttgttttagatttaggttatttcgttcgggtatttttagcgcgggttttgataagttatttgtgtagacgttttttagagcgggatcggttgcggagggcggatgcgtttttgttttgtagtcgcgggagggaggcgtttcgagggttgtttgagttttcgttttcgggcgtttttgttcgtttcggcggagggaaggcgtcggtttcgcggagggcggtttttggtcgagttgtagggttcgttggtaggcggcggtttttcgttcgttgtgtcgttgaggttttggttgcgtttgttgattaataattaaagtttggttcggtagagaaaaatatgatgataaagtgtgtatagggatgttttaaggaaggaaaatataatgacggttttaagttggaagaaagagtagtcgggtcgaagttgcgtgataggaacgttcgcgattgcgcggtttcggagtagttgtataattcgttcgggtcgggagttgtttcgggtcgaggtttattaggtatgcggcggttgcgggtattgattggcgggtagtgttgtgggcggggtcgtgggcggaatcgcgtgggggcggggttgtacggagttggtttttgtaggaaggagtagaaagaggaggagggatgggtatttggaattatagggcggcgttgatgattggaggtatcggtagaggcggggttttttcgggcggggcggtgggtttttattggtagtgttggtggtgggtgggaacgggaggggtggtgagcgttgattggtcgtagtggcggggcggggcggaggaggaggaggtgtgcgtgtcggggcgcggagcggcgggcgttgattggtggtagtggtggtgggcgtggtgtaggcgtggcgcgtggtcggcgttggtattcgtaggggaggcggagaaggaggcggagggagcgattgtggtttcggtcgcggtggtcggcgcggtttgttttttgtgatcgtagttcgcgttttacgtttcgcgtttatggtcgtcgtgtcgggttttttggttacgcgtgttcgttcgcggatttgagtttcgcgtttgggatgtcggggatgcgcgtttttcggttttgcggttgtttcgggttgggcgcggggcgatggatttgagtatgaagaagttcgtcgtgcgtaggtttttttttgtgtatttgcgtaggaagtcgcgttttaagagttttagtttgagtcggttcgaggtaatgcggtcgttttcggggcgcgtaggtgtcgggtattgagcgggtcgtggtcgttcgagttcgtttcgttatttttgggtggatttcgagattcgttagggagtttaagttattggaaagttggttcggtttcgaaaatcgaattaaacggttttaaacgttatcgttgggatttcgtagtaattgggcggttcgtgggttttcgcgggggtaattttatttttattgtatttttagttggttttttcgtcgttggttgtacggggtgtgggatggttttttgtgggttatagggagtttcgggtgaggaggggttttttttgtagttagatcgtcgagtggcgcggagcgtttcgcgggggttttttaaagtttcgagtggagaagttttttagtttcgtttttcgaggcgttgattaggtgttgtttgtcgtgttcggtcggtaggttttattttattttgtagtttattcgtgtatttgaagttagtgtagaatttatagaacggggaagaataggtagtagtataatttgtttaggcgtttaaaacggcgtttaggagtaaagagtttgatgtaatattttcgtagcgtcgaggttgatatagattcgttttgaaaatttagagtatttttaaagttttgttttttttatttgtttcgtattttggtattttagagtttttttgtggacggttttttcgtggtgtgttttattttaattattaaattttatttttttatttttagtgtttaaattatattgttgaatttatagatgataaaatagtgaaacgtgtttaagtgaaaaagatatggtgatggggagattgaggttgggatttaaagatttcgtttgatattgtttcgtttttgttttaaggttggtatttgtggggttttggttggtttgttttagttggaataattttaaatgttttattttggttttttttgttttagttgttatgatattagatatagatatgggttttgta

SEQ ID NO: 290 - DNA, 6273 bp, Artificial Sequence
  chemically treated genomic DNA (Homo sapiens)
tatagaatttatgtttgtgtttaatattatggtagttgggataaagaaaattaagatgaaatatttgagattgttttagttgaaataaattaattaaaattttataggtgttagttttgaggtaaaggcgggatagtgttaggcgaaatttttgggttttagttttagtttttttattattatgttttttttatttaaatacgttttattgttttgttatttatagatttaataatgtgatttggatattgggaataagagaataagatttgatggttgaaataaaatatattacgagagaatcgtttataaggaaattttaagatgttaagatgcgggataggtagaaaggatagggttttgggagtattttgggtttttaggacgaatttgtattagtttcggcgttgcgaggatattgtattaggttttttatttttgaacgtcgttttagacgtttaagtagattgtgttgttgtttgttttttttcgttttgtgaattttatattgattttaagtgtacgaatgagttataagataaggtggaatttgtcggtcgggtacggtagatagtatttgattagcgtttcggagggcggagttggggggtttttttattcgggattttgagggattttcgcggagcgtttcgcgttattcggcggtttagttgtagagaaagtttttttttattcggggttttttgtggtttataggggattattttatatttcgtgtagttagcggcggagaaattagttggaaatgtagtgggggtggagttgttttcgcgaggatttacggatcgtttaattattacggagttttagcgataacgtttggagtcgtttggttcgattttcggaatcggattagttttttagtaatttgaattttttgacgggtttcggggtttatttaggggtggcgaggcgggttcgggcgattacggttcgtttagtgttcggtatttgcgcgtttcgagggcggtcgtattatttcgagtcggtttaggttggagtttttggagcgcgattttttgcgtaggtatatagagaagaatttgcgtacggcgaatttttttatgtttaggtttatcgtttcgcgtttagttcggagtagtcgtagggtcgggggacgcgtattttcggtattttaggcgcggggtttaggttcgcgggcgggtacgcgtggttagggagttcggtacggcggttatgggcgcggggcgtggggcgcgagttgcggttataaagggtaggtcgcgtcggttatcgcggtcggggttataatcgtttttttcgttttttttttcgttttttttgcgagtattagcgtcggttacgcgttacgtttatattacgtttattattattattattaattagcgttcgtcgtttcgcgtttcggtacgtatatttttttttttttcgtttcgtttcgttattacggttaattagcgtttattatttttttcgtttttatttattattagtattgttaatgagagtttatcgtttcgttcgggagagtttcgtttttgtcgatatttttaattattagcgtcgttttgtggttttaggtgtttatttttttttttttttttatttttttttataagaattagtttcgtgtagtttcgtttttacgcggtttcgtttacggtttcgtttatagtattgttcgttaattagtgttcgtagtcgtcgtatatttaatgagtttcggttcgggatagttttcggttcgggcgagttgtgtagttgtttcggagtcgcgtagtcgcgggcgtttttgttacgtaatttcggttcggttgtttttttttttagtttggggtcgttattatgttttttttttttaaaatatttttatgtatattttgttattatgtttttttttgtcgaattaaattttaattgttgattagtaaacgtagttaaaattttagcggtatagcgagcgagggatcgtcgtttgttagcgggttttgtagttcggttaggagtcgtttttcgcggaatcggcgtttttttttcgtcggagcggataaaggcgttcgagggcgggggtttaggtagttttcggggcgtttttttttcgcggttgtagaataaagacgtattcgtttttcgtagtcggtttcgttttaggaaacgtttatatagatggtttattagggttcgcgttgggaatattcgggcggggtgatttgggtttagggtaaggtttttagattcgttgttggcggtagcgtcgttcgggattcgttttaaagggaaatatttttttttttttttttttagaaatgtttattaagggttgtagtagggtcgagaatgcgggtttacgatttcgtgtagtttgttttgttttttttttgtgtacgtgttgagtttgtatttaaaaatagggagaaatcgagtttattgatatagtattattattatttgtaaagagtagaaacgagtgcggtggtgagttgataagttttgtttgtttttttgtagtgcgaattgtaaaattttcgcgttgttttgttttttggattagttagatgttgcgttaatatttgtgtagtttattttggttaaggtgggtagagaggttagaatgtttttaaataagagttttaaagttatgttgtattcgggttgaggtgaggttagataggttttttgggttttttggagattcgcgttgagcggtgttgtttcggagtggaagtcgggagtttagtattacgattttggcgttgttttttttttgtttggtgaatttgggtgtcgttgtacgttgtttttacgatttatttttaagaggaaaatacgagtgaaatttgttttattttttttattggatattaagaggtttatgtaagattacggatgtgggagtgttttgtgaatttaaatagtgtaattgatttttatattatgtattaaaggatttataatgattattttttaaaaatagaagtgtaggattttataaggatattaaatattattttttgtttttttttaagatggtgtgttagttaagtgtttatgaaaattgttttgtttgttttttttaaggttttgttgggagggtagtaatttgtgtttttagaattagttttttagtgttttgtatttttgttgggatttttaggtattttggttttaggtaaatataaagatattttgtatttagtacgggaagaggtagatggatttttaattggatatagatttcgggaatgagggaggattaattcgattatgtttttttcggaaggggagttagtaatattggtcggagataggagtgttgaatgttatttatattaatttatgggtattttgtttaggataaaagttttaaggtaggtaggtttaagttaaggtttgtgttgtattaataatagtattttgatttgatttgataaaattggaaaggaaatattttatgggatatttattagttttttaaatttgaaggtaataaaattgttttgttgaatttgggagggaaaattatttagattttattggaatttattgttagaataataaatttgtttgtttttgttttttttttggtaaaatatacgtatattaaaatttttagtgattatggaatattattttatgtgattatgtaatgaaattttttaaaattattaaatttagggtaggtataatattaagatttattgtaatcgaaatttaaattatttttattaaatattagaaaagaaagtgaatttgataaaggtttttgtttagatgatggaatgggagaggattgaagagaagataaagagtttggtagatttttgagtattttatattttttttgatttaagtatagtaagtttgagattgaatttcgtggtgattgttgtttttatgagtattagattagttgatgtgtggttaatgtaattttataagtgattatcgagtattaatatttggtattgtggtggttatttgtgatataaaatgattataatattttaagaagtttatagttttatggaagagaaggtgagtgaatagataaagtttatgtcgtttttatgtaaagtgaaagaaatgcgtaagagatgaatgagaagttaattttaattggcgaagttaaggaggagatggtttttgttttgaatttttgagggtaagaagatgagggaataagttttttggatagataagaggaggcgggagttttaggttgaggaataatagggtattgttaggtagttgtgataaggttttttatttttttttgttatataggtattttgtgggtaaggttggtgtgttttttgtatatgggaagatgttatattttcggggtattttataggagtggtttgagtgatatttaagagtttttaattagttaagtattataaatgtttgttcgtttttaaatagttttataggttgttgaaagttttaagtttttaaaatttttatatatttttaataaaacgttaaattgtattttaagtgaaattatatatttttaaaataaattgaaatattcggtttttattaggattaaagttttgttatgggaggtgaatttattaggtttatttgatgtaaaattttattaggattattagggttatttggtgttggttatttgcgaaagtaggaagtcgtgttttttcggagtattagtattcgaaggttttgtttattataggtattttgttggatgttttagagatagtgtttagttagtacgagggagggaggtgggttttagtgtgtgtttttgtgaattattttttgtggttgtgatataaatgggtttagttaagttttttttagtgtagtttttgagtgtatagaaaggaattttttttttgggttgtggattttcgtgtatttgaaatgtttatgattttgaagttttttgaatgtaggaattagtttttgtttaggaagatggttttaaagttttgagattttagaaggtaaattgtagtggatagtttaggtgggggtacgttcggagtaggtgttagtaaggggtttggagttgttagggaagggttttttgggttttcggtaaaagttagaagggattaagtttgtttttggtttttggttggtttttggtttttatttataggatatttgggttttatttatatttgggtgttaattaagttatgttagaatgatatttgtgtttttagtttaatagtttaaaatttttgagtatatcgaaaatttaaaaagaaagttttaatgcgtaaaagtttttaaaatgatagaaataaagttttaatggtgaagtattaggaaatggaatttatatttgaaattagagggtttggtttttgagtagttaggagaggtaggtggaaatttataggttagttgtatttgatttttattgattggtttatatttaggaagaaaaattatattgggttttaagttgtggaaattattatggttggtttttttttttttcgttggagtttttattttttatttaatttgggtaggaaggtatagggtttatagaaggtgggttttatttgtaatatttttttcgttagttcgttgtgaggatagttttggattttattggtttttaaatattatgtttttttatattatttttttttgaaatttatttataaattatagggttagaatttatagagaggttgattaaataatttttttggtaatatagattttttttcgtttttttgtttggggtattttggtgttttttatggtgttagcggagtacggttggagttatgatttttaaatagcgagaagggagggttttgttttagtgagttttttttttttttgagatagtggaatttaagagatagatgcgaatatatagagtagttatagatatagcggagtagagatagattagagagaggttgcgcggtaaacggagtttagataggtggtattttagggtagtattagtattagttaaggtgtaaatgtttcgaaaagatttaaattaaatattatatgagagagatgaaatttagatagagaggcggtggggatagcgttttttttcgtatatttttaggatattaattttagttgttatgcggtgtttttaatttttaggatttgtttgttttatagttgaagttttgtattttttgagtaatatcgtttttttttatttttagttttggggagtttttagattttatagataagtgagattatggatatttgtttttttatgtttggtttattttatttagtatgatg

SEQ ID NO: 291 - DNA, 6167 bp, Artificial Sequence
  chemically treated genomic DNA (Homo sapiens)
ttttttgattttatgattcgttcgtttcgattttttaaagtgttgggattataggtatgagttattgtattcggtcgatgtttttttaaatatagtagtacggaggatggatgtgatagatagtagattttaggtaaggaattttaaaaggagtgttttgagatagtttaggtaagaaagaataaaagttagattaaagtaagttagtgaaggtggaaagggaagaatagttttaaggagtatataggaggttaaataagtagattttgtttgatggtatgtatgtagtaagagtataaggaataataatgaatgttttgggaatagagatgttgagttttaggtttatatgagagatgtgggtggagatatttattaatttgtttagagtttttaagagaggttgggttagaggtttgaaagttataggtgtaataaatgtagtaaattatgatagtgaagttgtttagagagaattatgtaagtgaggataggggagatgtaataattggagaagaaaagtggggtgattaggagaaggaggtttaaggagagagttgttttttgtttttttttttttttttttgagacggagtttcgtttttgttatttaggttggagtataatggtatatttttcgattttcgggtttaagcgatttttttgttttagttttttaagtagttgggattataggtacgtattattacgttcggttaatttttgtatttttagtatagatggggttttattacgttggttaggttggtttcgaatttttgattttaggtgatttatttatttcggttttttaaagtgttgggattatagggatgagttattatgtttggttttttttttttttttttttttttgagacggtatttcgttttattttttaggttggagtgtagtggcgagatttcggtttattgtaatttttttttcgggtttaagtgatttttttgttttattttttcgaataattgggattataggtatgtgttattatgttcggttaatttttgtatttttagtcgagacggggttttattttgttggttaggttggtttttaatttttgattttaagtgatttgtttgttttggttttttaaagtgttgggattataggcgtgagttattgcgttttgttggaaagagtttttatacgttattgttattaaacgtagtagaggagtaaagtgaattaagaaaagaaagagaggttgggtatagtggtttacgtttgtaattttagtattttgggaagttgaggtgggtagattatttgaggttaggagttcgagattagtttgattaatatggtaaaattttatttttattaaaaatataaaaaaattagttgggcgtggtggcgtatgtttgtagttttagttatttatgaggttgaggtaggagaattgttttaatttggtagtcggaggttgtagtgagttaagatcgtattattgtattttagtttgggtgatagagttagattttgttttaaaaaaaaaaaaaaaaaaagaaaaagaaaaagaaagagagtttgtaattttattattttgggaggttaaggtaggcggattatttgagattaggtattcgagattagtttggttaatatggtaaaattttgtttttattaaaaatataaaaattagttagatatggtcgtgggtatttgtaattttagttatttgggaggttgaggtaggagaattgtttgaatacgggaggtggaggttatagtgagttaagattatattattgtattttagttcgggtgatagagcgagatttttttaaaaaaaaaaaaaaaaaaaagagagatagagaaaagaaagagttaggtatggtggtatgtatttgtagttttagttatttaggagatttgtgaatagttatcgtattttagtttgggtaatatagtgtagtaagaatttgtttttataagaaaaagaaaaaaagaaaagaaaaatagtagttggatttggtgattcggaggttattggaaattttttttagagtagttttaatgatgttatgtggggtagaagtaggattataggtggttaagtagggtttttttattttttttggagatggagtttcgttttgttattaggttggagggtagtggtgcggtttcggtttattgtaatttttgttttttgggtttaagtgatttttttgttttagtttttcgagtagttgggattataggtatatgttattacgtttagttaatttttgtatttttagtagagatggggttttattatgttggttaggttggttttgaatttttgattttgtgatttattcgtttcggttttttaaagtgttgggattataggcgtgagttattacgtttagttagtagggtttttttttgagaattttagatgaaaggtaaagagataagaagaagaaagttagttaatagatgagttttgtttggttggttttaaattggtgagatttgagtatgtagaagggaaaatgttattggaaaagtaaagattattaatatagaaatgaaaagtaaaaataaagtaattttttagtgagatgggaaggaatggggtttaaaaattatgtggaaggtttggttttgaaggggttggttagattagagtaaaggagaggattgtgggttatatttatttttatttttttttttattgaagaatttttttttgtaagatgtttgatatgttttatttttttttatagagtagagtttttgggaattgtgtgagttattaagtaaagtattaaaaattttaaaattaatttgattgttatattgattaagttgtattgttataattgatatgttgagttataaattaggtgtattatttttaaaaataatttgtaatcgaaaaaaatacgttttgagaattattatattattaataagaataaataaaatgttatgtatgttaattatatattaataaaaagtttttttttttttttgagacggagttttgttttgttatttaggttagagtgtagtggtatgttttcggtttaatgtaattttcgttttttaggtttaagcgatttttttgttttagtttttcgagtagttgggattataggtacgtgttattacgtttggttaatttttgtatttttagtagagatggggttttattatgttggttaggttggttttgaatttttgatttcgtgatttatttttatttattttagttttttaaagtgttgggattataggtttgagttattacgttcggtttaaaaagttattttaaaatgttatatacgtatataatattggagatagaatagttgtgttgtttaaggagttagttatttaaggaagtttttatattttttatatggttttgggatttgtgatttattgtatttgaatttatttatatatagtttaatagtttttaaaatttgatttgtaattattttttttttaaatatatgtttaaaataaaatattttttttagttgaggagtgataaaagaaaaaaagaggttgggtgcgtggtttatatttgtaattttagtattttgggaggttgagttgggagaattacgtgagtttggttgttttagatttggttaatatggtaaaattttgtttgtataaaaaatataattattagtttggcgtggtggtgtgcgtttgtagttttagttattcgggaggttgaggtgggaggattttttgagtttgggaggtttaggttgtagtgagttaagattttgttatcgtattttagtttgggtgataaagtgatatttttttgtttttagaaaaaaaaaaaattaaaattaaaaaaataaaaataagataaaataaatgttgattgaagaaattagtagtattattttttatattatatgaatatgtagaatatagaagtgtgtttaatattgtatatttaattaatattaatttttttttttttaaataatagtttacgttttttttattagtttagtttggtaattttagtaagatttgtaagaaagattttgtgtttagtttaggtaggatagtaagaaagatgtagtttggagaaagaaaattagatgaaatattaatcgggcgtaatggtttatgtttgtaattttagtattttgggaggtcgaggcgggaggattatttgagtttagggattttagattagtttgggtaatatagcgagattttgtttttatttgaaaaagaaagaaagtaaaagaaatattagagtagttttttattatttttatttaggaaaagataagttttgataaagattttatattaggtttatgtagtattggaaatgagtcgtgggttgtgagatagattttgtgtttaaaatgttaaatcggtaaagtaggtttattattatttttattttatagataaggaaattgaggttttgaaaggttattgatttttttaaggttatagaattagtaaagagtaaagttaaaaggtttttcgttttttacgggttttaggagttttttatacgtaattcgatttatcgttagacgtcgattagcgtttttgttcggtttaaatttcggattaatttatttattatgcgtatgtttatttttaaaacgaaaaatttattgagaataaatgcgtatgttttataaacggagagttttgttgtgtatatatttttttttatttagaaagattaattacgtatgtttaattttaatttacgaattttagatatggtacgtatgtttattgtttatcgaacgttttagttgataatgcgtatgttttagttttttaagcgcgatttcggttggtgttttgcgtatgtttttgttagcgtttggattttgtcgatagttttgcgtatgtttattgtttattgtttggttttacggaattttgtacgtatgtttttacgttgaattttaggagttagtttaaggtttaggcgtagacgtattgagtttaagtagtcggtgatggcggtagcggttgtggtggttgcggcgggttcgggtttatgaggcgacgaaggaggcgggacggtttttatttagtttcggattttcgagatagggaagttgaggatatggtaggagtgtttgatatagatttggattagttagaggacgcgggttttgaggatgagttggaggagggggtgaggttcggggttttcgggggttcgaggtgatagggtcggggcggcggcgcgggtttaggaagcgcggtgtgttttagagcgtggagatttaggggggtttttgaggagttgagggtcgcgcggtttgagataggggagcgggcggggcggttatggttttaggtgtgaggtttttgcggggttcgtaggtgtaggtcgtatttttagttttaggttagcgtagtttcgagcgatttgaagagggaaagagaacgggcgcgtggtcgatttttcgagttgttggatttgagtgtggcggggagcgggtggcgtgagcgtgtgttggggagacgggggttgtttttgttgggtgtttcgtaagtgtaggcgaagtgtggagggttttttttcgagtttagaattttaagtattgaatttttagattttttataattattttttttttcggtttgtcgttttttttttaggaagcgtttagttgttagaagtgatagttgaaaatttttgtcgggagtagtattgtcgttgttgttatagttattaggagttttatttcgggagtaagggggttttgttgtattttttaattttttagggtttgtttgtttgtttttttttttttattttttttcgtgtgattttttaaaataagtatttataaggatatacggtatttgtaatttttttttaagttgaagatgtttgtattttttttagaataattaatgtaattttgaggtggaaaaaaaaattaaaaattagttgatagttttgatttagtttgttagaaataagttgtttgaatagagatttgtgaatggtggtatgagggttttttttgttgtaatttagggtgttaaatttagaattgtattttttaatgtatagtttggttttattttgttggtttagtggtttgttaatttttatggaataattttttttttttttagataaatttattaaaaaatgataaattgtatttgaagtttaaaaa

SEQ ID NO: 292 - DNA, 6167 bp, Artificial Sequence
  chemically treated genomic DNA (Homo sapiens)
tttttgaattttaggtgtaatttgttattttttgataaatttatttagggaaaaaaaaagttattttataaagattaataaattattaagttagtagggtgaaattaagttatgtattaggaaatataattttaaatttagtattttaaattatagtaaggaaagtttttatattattatttataagtttttgtttaggtaatttatttttggtaagttaaattaaggttgttaattggtttttggtttttttttttattttaaaattatattaattattttgaaaaaaatatagatatttttaatttggggaaaggttataagtgtcgtgtgtttttataaatgtttattttaaaaagttatacggaagggggtaaaaaaaaaaaagtaaataaataaattttggaagattggaagatgtagtagagtttttttgttttcgaaataaaatttttggtggttgtaatagtagcggtagtgttattttcgatagaagtttttagttgttatttttaatagttgagcgttttttaggagagaagcgataggtcgagaagagaggtggttgtgggaggtttgaagatttaatatttgaaattttagattcgaagggaaattttttatatttcgtttgtatttacgggatatttagtaagagtagttttcgtttttttaatatacgtttacgttattcgtttttcgttatatttaagtttaatagttcgaggaatcgattacgcgttcgttttttttttttttttagatcgttcggggttgcgttgatttggggttaagggtgcgatttgtatttgcgagtttcgtagaggttttatatttagggttatgatcgtttcgttcgtttttttgttttaggtcgcgcgatttttagttttttaggagtttttttgggtttttacgttttaggatatatcgcgttttttgagttcgcgtcgtcgtttcggttttgttatttcgggttttcggggatttcgggttttatttttttttttagtttatttttagagttcgcgttttttggttggtttaggtttatgttaaatatttttgttatgtttttagtttttttgtttcggaagttcggggttgggtaaaagtcgtttcgtttttttcgtcgttttatgggttcggattcgtcgtagttattatagtcgttgtcgttattatcggttgtttaggtttagtgcgtttgcgtttaggttttagattggtttttaaagtttagcgtaggagtatgcgtatagggtttcgtgaagttaaatagtgggtagtggatatgcgtagaattatcggtaggatttaggcgttggtagaaatatgcgtaaaatattagtcgaagtcgcgtttggaggattagagtatgcgtattgttagttggagcgttcggtggatagtgagtatgcgtattatatttgaagttcgtaaattgaaattgaatatgcgtaattaatttttttgaataggaaaaaatatatatataataaaatttttcgtttatggaatatgcgtatttgtttttagtaagtttttcgttttgaaagtgagtatgcgtatggtgagtaggttggttcgaagtttgaatcggatagaagcgttggtcggcgtttggcggtgagtcgggttacgtgtggagaatttttggggttcgtggggaacgggggattttttggttttgttttttattagttttgtggttttggaaaagttaataattttttagagttttagtttttttatttgtaaaatgaggataataataaatttattttgtcggtttgatattttaagtatagagtttgttttataatttacggtttatttttagtgttgtatagatttgatgtgaagtttttattaaaatttgtttttttttaggtaaaaataatgaggaattgttttaatgttttttttgtttttttttttttttaaatggagatagggtttcgttgtgttgtttaggttggtttggaatttttgggtttaggtgattttttcgtttcggttttttaaagtattgggattataggtatgagttattgcgttcggttaatattttatttggttttttttttttaagttgtattttttttgttgttttatttgagttaaatataaaattttttttataggttttattaaagttattaggttagattagtggagaaagcgtaagttattatttagaagagagaaaattaatgttaattgaatgtataatgttgagtatatttttgtgttttatatgtttatgtggtgtgaagggtggtattattaatttttttaattagtatttgttttgttttgtttttatttttttaattttaattttttttttttttggagataggaggatgttattttgttatttaggttggagtgcggtggtaagattttggtttattgtagtttggattttttaggtttaggggatttttttattttagtttttcgagtagttgggattgtaggcgtatattattacgttaagttaatggttgtattttttgtataaatagggttttgttatgttgattaggtttggaatagttaggtttacgtgatttttttaatttagttttttaaaatgttgggattataggtgtgagttacgtatttagttttttttttttttttattattttttaattgaggagaatgttttgttttaaatatatgtttaggaaaaaagtgattataaattagattttggaaattattgagttgtgtatgaatggatttaggtatagtaaattataaattttaaaattatgtagagagtatgagaatttttttgaatgattagttttttagataatatagttgttttatttttaatattatatacgtatgtggtattttaaaatgattttttgggtcgggcgtggtggtttaagtttgtaattttagtattttgggaggttgaggtaggtggaggtggattacgaggttaagagtttaagattaatttggttaatatggtgaaattttatttttattaagaatataaaaattagttaggcgtggtggtacgtgtttgtaattttagttattcgggaggttgaggtaggagaatcgtttgaatttgggaggcggaggttgtattaagtcgagaatatgttattgtattttagtttgggtgatagaataagatttcgttttaggggggaaaaaagattttttattgatgtataattaatatatatggtattttatttgtttttattagtaatgtagtggtttttaaagcgtatttttttcgattataggttgtttttagaggtaatatatttagtttgtggtttagtatgttaattgtaatagtgtaatttggttagtgtggtaattagattggttttgaagtttttgatgttttgtttagtgatttatatagtttttagggattttgttttatgagagagaatgaggtatattaagtattttgtaaagaaagattttttagtgaggaggagaatggaggtaggtgtggtttatagtttttttttttattttgatttaattaatttttttaaagttaggttttttatatggtttttaaattttatttttttttattttattagggaattattttgtttttgttttttatttttatgttaataatttttgtttttttagtggtatttttttttttgtatgtttagattttattaatttaaaattaattaaataaaatttatttattgattggtttttttttttttatttttttgttttttatttaagatttttaaaagaggattttgttggttgggcgtggtggtttacgtttgtaattttagtattttgagaggtcgaggcgagtggattataaggttaggagtttaagattagtttgattaatatggtgaaattttatttttattaaaaatataaaaattagttgggcgtggtggtatgtgtttgtaattttagttattcgggaggttgaggtaggagaattatttgaatttaggaggtagaggttgtagtgagtcgagatcgtattattgttttttagtttggtgatagagcgagattttatttttaaaaaaaataaaaggattttgtttaattatttatgattttgtttttgttttatatagtattattgaagttgttttaagaaaagtttttagtgattttcgaattattagatttaattattgtttttttttttttttttttttttttttgtagagataggtttttattatattatgttgtttaagttggagtgcggtggttatttataggttttttgagtagttgggattgtaggtgtatgttattatgtttggtttttttttttttttgttttttttttttttttttttttttttgagagagtttcgttttgttattcgggttgaagtgtagtgatgtgattttggtttattgtaatttttatttttcgtgtttaagtaatttttttgttttagttttttaagtagttggaattataggtgtttacgattatgtttggttaatttttgtatttttagtagagatagggttttgttatgttggttaggttggtttcgaatgtttgattttaagtgattcgtttgttttggttttttaaagtgatgggattataggttttttttttttttttttttttttttttttttttttttttgagatagagtttagttttgttatttagattggagtgtagtggtgcgattttggtttattgtaattttcgattattaggttgaagtaatttttttgttttagttttatgagtagttgggattataggtatgcgttattacgtttaattaatttttttgtatttttagtagagatggggttttattatgttggttaggttggtttcgaatttttgattttaaatgatttgtttattttagttttttaaagtgttgggattataggcgtgagttattgtgtttagtttttttttttttttttaatttattttatttttttattgcgtttgataatagtaacgtataaaaattttttttagtagggcgtagtggtttacgtttataattttagtattttgggaggttaaggtaggtagattatttgaggttaggagttagagattagtttggttaatagggtaaaatttcgtttcgattaaaaatataaaaattagtcggatatggtggtatatatttgtaattttagttattcgggagggtgaggtaggagaattatttgaattcgggaggggggttgtagtgagtcgagatttcgttattgtattttagtttgggaaatagagcgagatgtcgttttaaaaaaaaaaaaaaaaaaaaaaagttaggtatggtggtttatttttgtaattttaatattttgggaggtcgaggtgggtgaattatttgaggttaggagttcgagattagtttggttaacgtggtgaaattttatttgtattaaaaatataaaaattagtcgagcgtagtggtgcgtgtttgtaattttagttatttgggaggttgaggtaggagaatcgtttgaattcgggagtcggagagtgtgttattgtattttagtttaggtgataagagcgaaatttcgttttaaaaaagaaaaaaaaaagataaaaaataattttttttttgaattttttttttttagttattttattttttttttttagttgttgtattttttttgtttttatttgtatagttttttttgggtaattttattgttatagtttgttatatttattatatttgtgatttttagatttttagtttagttttttttaaaagttttagatagattagtggatatttttatttatattttttatatgaatttgaaatttaatatttttatttttaaggtatttattattgttttttgtgtttttgttgtatatatattattaaataagatttgtttatttgattttttatatattttttgaaattgtttttttttttttatttttattgatttgttttagtttggtttttgtttttttttatttggattgttttaagatattttttttaggattttttgtttggagtttattgtttattatatttatttttcgtattgttgtgtttaaaaagatatcggtcgggtgtagtggtttatgtttataattttagtattttgggaggtcgaggcgggcgaattatgaggttaggaga

SEQ ID NO: 293 - DNA, 6922 bp, Artificial Sequence
  chemically treated genomic DNA (Homo sapiens)
gttttttgtttgttgaggagtttagagtttacggtgaggagtggtttttcgaaggaaaggggttatttttttttgggaattttaggtagttttattgtggggtttttattgtttttttttgattttcgtaagggtttatttttattttggaggttgtaagtggcggaagagatgaggggggttggtttttttttaaggagtaatttatggtgattcggtagttgggttttagaattaggaagtgtaaggatagagttttgtgttagggaggagggtggttttttatgaggttttacggtatggaagtagtttttcgagattaatttttatttttattgagttatcgagtgaagagtcgtgtagttttcgagattagtttagtcgatatggtggaatttcgtgtttattaaaaatattagaattagtcgggagtggtggtatttatttgtaattttagttatttaggaggttgaggtagtagaattgtttgaatttgggaggcgaagggtgtagtgagtcgagattatattattgtattttagtttgggcgatagaggagattttgttttaaaaaaaaaaaataataataataattagttaggcgtggtattcggtgattgtaattttagttatttgggaggttgaggtaggagaatcgttggaattcgggaggcggaggttgtagtgagtcgagatcgcgttattgtattttagtttgggtaatagagtgagattttattttaaaaaaaaaaaaaaaaggaaaagaaaaagaacgagagagtttggagtaaaaaaaaaaaaaaaaaaaaaaaaaggaaaagaaaaaagaaaaagatcgagagagtttggagtggtttgagaagatgttttgaatatattaatatataaagtgaaaagagggaggcggtagtgtagaattttttttgggtattttagggttttagtttttttatttggaaagtgggggttatagtgttattcgtatgatttttagtgggttatttttgtttaaggacgttttgttcggagtttttttaggttttttttgggagtggggtgggttgttttatttttttattttttttttaaggttatttggttgttttgtgagagagatttttgggggtaggaggtggggtttgtgagttttagtttttgatttttatttgtttagtgtggtggtttttttttatttttatttatgttgtgtgattttaggtaagttttttaatttttttgtgttttaatgtttttaatagtaagataaagatatgattagtatttattttttagattattatgaggagtcgatgagttaatgtttgtaaagtatttagagtaaggtttaatttaaggtttgagttttgggagtatttgaatattacggaatgatatttagtttttttagtgtggtattgtaggaataaagtaggatgtaaattatatatttatgtttatttagttttttgtttattttgtaaatagttttagagtatttagtgggtgttaggttcgttttggtttttgggggtatggagatggattttgtttggttttgatagtcgcgagtgtatagtggagggtattgggtggattttagtttgttgatcgttttgcgttgttgtgacgttggaaggaaacgtattattatatttaggtgtttgttttttaggggtagaattatggggtatttttttttatttttttttttttttttttttaatttttttgtagtttttaaagagtttattttgaatgataaaagttattatttacggaggtttggtaacgtttcgtgttattttgagtatgtttcgtgtattttttttacggatttttttagtagttttgatacgggtgttattttcgatcgatagagaggaaaattgaggcgaagggcggtcggttaggatttaaattagggagtttgttttagtatttcggtttttaattttaatcgtttgtttttttataaatattaggattaattattaagattaaaaaaatagttttataaattattaaatattgtatttggtggtttaggattttagtttcgttttaaaggtttttgttatgttttttttgagtgttttagtgtggagtggttttcgtgtttgtgagtgtaggggttaggggttgtgttttttttttttgtttttttttaagaggtgatatgtatttttgatattggaagggtttttaaggtttagttttggttttttgtttttttttatggtatattagttaagtatttattttttcgtttttgattatttttagtgatagggagtttattttttaatatttattttattttaaagaaaatttaggtttttagatagttttttttttataaaaattttttaaaaaaatttttatttttttttaaagttttataaataagttttttgttttggggttttgaggtaggatttggttaattcgtttttatgtttttttatagtgaggagtatagggtttgttagtaggtattataaatgttgtattaggaagtaagtggttagggggcgggttggttgggtttttattaatttttgggttgtaggtaattaggttagtagtttttgtgggatattagttgggtgagtgttgatgggtatcgtgattttaatggaataggttgttatagaaattgattttggatttgtttttaggtttattgatttgttttttaggagattatggtaattttttgagttttttagtaggtttttttagggtttttttaattttatattttttgagttgggtggtttttagggagtatgtaaattatatttttattgtgtagttgggtagtttgaggttttaggggtataggggataggttgaaatttatataggtagggggcgttttatagttgggttgggcgtttagggtaaatagttttgttcgaggatttagttagttagggggttttttttttatttatgggtttttagaggaaattttggatcgatttttaggttttttgtttttttaaagaataatcggaatttgtttttttggtgtgtttagaattatataatattaataacggttgaggtgatttgtgatgtttttagtattttatagtgttttgtgtatttattataatgattttatcgttatagatgaggaaacggtatagagagaagttaagttatatgtttaaggttatatagttatttaggggtagagttaggatttggatgtggagagtttagttttagagtttatttttattattatgttatattttgtttcgtttttgttttgagagggttgaaaagattttgggagggttgaaggatattttaggtttaggaggtttttagtacgggtttgttagagttatagtttgatgaatagtgattagagagtgggcgttattatgatttttttttttaatgatatttttaaaatagtgttgagatgtttgttttatttttgttttgtagatgaggacgttgaggtttagagagggaaagttatttgtttagggatatatagcggggagaggtggagtagggtttttatttcgagatttttgattttatatttggtgtttgtgttaagattttaggttgttttttaggttttttgggatagtttttgttttttattaggtgagatgatggttttattagggtttaagatgggtggggagattttagcgaatttgggtgggagttgggattagttagggtttgcggatggggaaatgggaggtagagggtggtggtaggattgtgggcgttagggggagtttttaatttggtttattttgtgttttcgtttttttggattttttaggtttttggttttgaagttttttagtttttaaatagttatttattcgtttagttgtttattgagtatttattgtgtgttatattttatgttaggtattgggagtatagtagtgaataagatgaataaaagtttacgatagtagttatataattatatgaatttaaataataaaaataaaataggattatatgttattaaagatagatataagttagggggatttagtgaaaggatttggggaatattttttaaggaggggatttttgagttgagaacggaaggaggtattagttattttggtgaagtggttagggaatagtatttgggtagtgggaatggtatgtgtgaaggttttgtggttggagtgagtttttagttatttttgttttaaattttttgttgtatggttttggttgttatttttagtatttttttttagcgttaggtaattttcgttagttacgtatttatttaataaatttttaatgagttttttttatgtgttaggtgttcgggatataggcgtggtttagatattgtttttgttaggagggagggaaatagtgatttagggggaggtgggtgggtaaggttagggtttttgattatgaggtatttttttcgtttttggcgttggatcgaggaagttttttacggatggatgttatttttacgtttattttatagatgaagatatcgaggttttgagaggttaatttttttaaaaaggttggtgtttttgttttttatttttttttttttttttttttttttttgagatagagtatttttttgacgtttaggttggagtgtagtggtaggatttgagtttattgtagtttttgttttttttgtttaagcgatttttttgttttatttttcggagtagttgggattataggcgcgtgttattatgttcggttaattttttttttttttttaagtagagttcgggttttcgcgtgttggttcggtaggttttaaatttttgattttaagtgattcgttcgtttcggttttttaaagtgttgggattataggcgtgagttatcgcgttcggttttgttgtttttttttgggtttcgttttttttatttgtggaatgggtgggagggaggtcggttaaggggtttcggtagttttgtttgttttagtgtttttttttttttttgttaggattatgggtagtaataagagtaagtttaaggatgttagttagcggcgtcgtagtttggagttcgtcgagaacgtgtacggcgttggcgggggcgtttttttcgtttcgtagatttttagtaagttagtttcggtcgacggttatcgcggttttagcgcggttttcgttttcgcggtcgtcgagtttaagttgttcggaggttttaatttttcggatatcgttattttttcgtagagggcgggttcgttggtcggttagtgcgcgggcggcgcggggttttcgtttatttggggttacggcggggaggcggcggggttgtgtgttcggggtcgttttttttgcgtaggttttttttttcgttaggggtagcgtttttgggtgatttgggtgttcggggggtgggggggcggtcgtatatattgtgaagcgttcgcgtcgtcgtcgttggttttggggtggagtaagcgtaaaagatacggggtgtggttaatgggttttaattggacgtttaagtttaagaagaagaagggcggcgcgggatcgggtttgttgttgttttggcgtttagttttttttcgttgtttgggttcgtttagagatgagtcgggacgcgcggtttacgtgcggcggaggggtagttgggtcgttcggggaacggggtatcggatggtttcggttgggttcgcgttaggatgcgtttttgcgttttttgttggcgttttgcggttatcgtagtttcggagagggtcgttttggagagtcgcggcggtgttttagatattttacgtagattttatttttttatttagattcgtttattttttttataggtatacgttgggttatatatacggttatattttcgttagggatacgtatatatgcggggtggaggtagggttatagatattcgtagatatatttttaacgtagatgtatttagatataaatttatatgtataggtgattttatatttgtagttgaagatatacgtatatgtcgttagaagcgtatttagagatatacgtttagttggaaattataattttattatcgtggtcgtttaggagatagatatatataggtgtatcgagaatatgagaatatttagagatatacggataggcgtggattttttagacgtagacgtacgtttaagcgagagaaatagatttatagatatattatttatttgtttaataagtatatgtggagtttttattataggttagggtttttttgttgttcgggttttagcggtgtagatagaatttatttgggggaaggaagtaaagggtagttcgtggagggtgttagaaggggcgttgttgcgaaggcgtaaaataggtagggagggagggttgggggatgtgaggaggtggaggttgtagtttaaaatggtggaagggggtacgggggtttttttgagggggtagttatttggagttaaatttttttggatattaggagcgtttagagtgatatattttatagagagagagcgagttttttgggggagtgttttttatttatcgttttttttagtttatagtttttttttgagtatttattatgtgtttggttttggaaataaaataaagatgttggttattggcgatttttgtttttagagtaagataggtattaaatagataagttagtatttagtattgtttaaagtttcggggacggacgcggataggaagggatgttttcgtttttatacgtttttgtagggatgcgtagatatacggatgtagtggatacgtgtataggtttatttttattgaatttgattgtgtttttgggttgagtatttgcgtgtgggagataaatttattttttttgggtatagggttattttgtttatgttttttttggttgtggttttattgttttgatatattttatttttttttgtagg

SEQ ID NO: 294 - DNA, 6922 bp, Artificial Sequence
  chemically treated genomic DNA (Homo sapiens)
tttgtagagaggggtggggtgtgttagaatagtggggttatagttagggaaggtatgggtaggatggttttgtatttaggaggagtggatttgttttttatacgtaagtgtttagtttaaagatatagttaggtttagtgaagatgggtttgtgtacgtgtttattgtattcgtgtatttgcgtatttttgtaagggcgtgtgggagcgggagtatttttttttgttcgcgttcgttttcggggttttgggtagtgttgggtgttggtttatttgtttggtgtttgttttgttttaggagtagaagtcgttaataattagtatttttgttttgtttttagagttaggtatatagtaggtgtttaagaaagagttataggttgaaggaagcggtgaatgaagaatatttttttaggaggttcgttttttttttataaagtgtgttattttgggcgtttttggtgtttaggaagatttggttttaagtaattgtttttttagaaaggttttcgtatttttttttattattttaagttatagtttttatttttttatattttttagttttttttttttgtttgttttgcgttttcgtagtagcgttttttttaatattttttacgagttgttttttgttttttttttttaggtgggttttgtttgtatcgttggggttcgggtagtagaggagttttggtttgtagtaggagttttatatatatttattgaataaatgaatggtgtgtttgtgggtttgtttttttcgtttgggcgtgcgtttgcgtttgaagggtttacgtttgttcgtgtgtttttgagtgtttttatgttttcgatgtatttgtgtgtatttgttttttgggcggttacgatggtgagattgtgatttttagttgagcgtgtgtttttgaatgcgtttttgacggtatgtgcgtgtgtttttagttataagtgtgaggttatttgtgtatgtgagtttgtatttgggtatatttgcgttggggatgtgtttgcgggtgtttgtgattttgtttttatttcgtatgtgtgcgtgtttttggcgggggtgtagtcgtgtgtgtggtttagcgtgtgtttgtggggagagtgaacgggtttgagtgaaggagtgaagtttgcgtggagtgtttggggtatcgtcgcggttttttaaaacggtttttttcggggttgcggtgatcgtagagcgttagtagagggcgtaggggcgtattttggcgcgggtttaatcggggttattcggtgtttcgtttttcgagcgatttagttgttttttcgtcgtacgtgggtcgcgcgtttcgatttatttttgggcggatttaggtaacgaaaaaggattgggcgttaaggtagtaataggttcggtttcgcgtcgttttttttttttttgggtttaagcgtttaattagaatttattaattatatttcgtgttttttgcgtttgttttattttaaagttagcggcggcggcgcggacgttttatagtgtgtacggtcgtttttttatttttcggatatttaagttatttaggggcgttatttttggcgagaggaagggtttgcgtagagggggcgatttcgggtatatagtttcgtcgttttttcgtcgtggttttaggtgggcgaggatttcgcgtcgttcgcgtattgatcggttagcgggttcgttttttgcggggaggtgacggtgttcgaggagttgaagttttcgaatagtttgggttcggcggtcgcgggggcgaaggtcgcgttggggtcgcggtggtcgtcggtcgaggttggtttgttgggggtttgcgaggcggggaaagcgttttcgttagcgtcgtgtacgttttcggcgggttttaggttgcggcgtcgttggttggtatttttgggtttgtttttgttgttatttatggttttggtaggagagagagaagatattggaataggtagggttgtcggggttttttggtcggttttttttttatttattttatagatagggaaaacgaggtttaaggagaggtagtagggtcgggcgcggtggtttacgtttgtaattttagtattttgggaggtcgaagcgggcggattatttgagattaggagtttgagatttgtcgggttaatacgcggaaattcgggttttatttgaaaaaaaaaaaaaaattagtcgggtatggtggtacgcgtttgtagttttagttatttcggagggtgaggtaggagaatcgtttgaataggggaggtagaggttgtagtgagtttagattttgttattgtattttagtttgggcgttagaggaatattttgttttaaaaaaaaaagaaagaaaagaaaaaaatgggggataggggtattagtttttttgggagagttagttttttaaaatttcgatgtttttatttgtaaaatgagcgtaaggatggtatttattcgtaaagggttttttcggtttagcgttaggaacggaagaaatgttttataattagaagttttgattttatttatttatttttttttgagttattgttttttttttttttggtagggatagtatttgagttacgtttatgtttcgggtatttagtatatggagggggtttattgagggtttgttgaatgaatacgtggttgacgggaattgtttaacgttggggaaaggtgttaaaagtggtagttaaggttatatagtaggaggtttgaagtagagatggttgggagtttattttagttatagggtttttatatatattatttttattgtttaaatgttgttttttggttattttattagggtgattggtgttttttttcgtttttaatttaaaagttttttttttgggaagtgttttttaaatttttttattgggtttttttgatttgtgtttgtttttgataatatgtggttttgttttgtttttgttgtttgaatttatgtggttatgtgattattgtcgtgggtttttgtttattttgtttattgttgtgtttttagtgtttagtatggggtgtggtatatagtaggtgtttagtaaatagttgaacgaatgagtgattatttaagagttaagggattttagagttagaaatttgggaggtttagagagacggaaatatagagtaaattaagttgaaaattttttttgacgtttatagttttgttattattttttgttttttatttttttattcgtaggttttggttggttttagtttttatttagattcgttgggatttttttatttattttgagttttgatagggttattattttatttggtagaaggtaggggttgttttagaggatttgggaggtagtttggggttttggtataaatattaggtgtggagttaggggtttcgaaatagaggttttgttttattttttttcgttgtgtgtttttaggtaagtggttttttttttttgggttttagcgtttttatttgtaaagtagggataaagtagatattttagtattgttttgaggatgttattagaaagagaaattataatggcgtttattttttgattattgtttattaggttatggttttagtaggttcgtgttaagagttttttagatttgaaatattttttaatttttttaaagtttttttaatttttttaaagtaagagcgagatagggtatggtatggtggtgagagtgggttttggagttgggttttttatatttagattttggttttatttttaaatagttgtgtaattttaggtatgtgatttaatttttttttgtgtcgtttttttatttgtaacgatggggttattgtgataaatgtataagatattgtagggtgttaggggtattataggttattttagtcgttattgatattgtgtaattttggatatattagggaggtaggtttcgattattttttggggaggtagaaggtttgggaatcggtttagaattttttttgagaatttatgagtggggaaaaggttttttgattggttgggttttcgggtaaggttgtttgttttgagcgtttagtttagttatgagacgttttttgtttgtgtgaattttagtttgttttttgtgtttttggggttttaggttatttagttgtataatgggggtatggtttgtatgttttttggggattatttagtttagagaatgtggggttggggaggttttggggagatttgttgaagagtttaagggattattatggttttttgagggataagttaatggatttggggataggtttaaagttagtttttatggtaatttattttattgaggttacgatatttattagtatttatttagttggtgttttataagaattgttgatttggttatttgtagtttaaggattgatgggggtttaattagttcgttttttagttatttgttttttggtgtagtatttatagtatttattagtaggttttgtgttttttattatagggggatatagagacgaattagttaggttttgttttaggattttaaagtaggggatttgtttatgagattttaagaggaagtaaaaatttttttaaaaaatttttatggaggaagaattatttaagagtttgaattttttttagaataaaataaatgttgaggagtgagttttttgttattggaggtaattaaagacgggagaatgggtatttggttgatgtgttatgaagggagatagagagttagggttagattttaagggtttttttagtattaaggatatatgttattttttggaaggggataagaagaaaagatataatttttgatttttgtatttataaatacgaagattattttatattggggtatttagaaaaagtataatagggatttttaagacgaagttaaggttttgagttattaagtgtaatgtttgatggtttgtgagattgtttttttggttttggtggttgattttggtgtttgtggagaggtagacggttgaggttaagagtcggagtgttggagtagattttttggtttgaattttggtcggtcgtttttcgttttagtttttttttttatcgatcgggaataatattcgtgttaggattgttgggagaattcgtgagaaaagtatacggaatatgtttaggatggtacggaacgttattaggttttcgtaaatggtaatttttattatttagagtggattttttgagaattataagaagattaaaaaaaaagaaaagaaaaaataaaagaaaatgttttataattttgtttttagaagataaatatttgggtgtggtggtgcgtttttttttagcgttatagtaacgtaagacggttaataaattggggtttatttagtgttttttattgtgtattcgcggttgttagggttaggtaggatttatttttatgtttttagagattaggacgggtttgatatttattaggtgttttggaattatttgtagaatagataaaagattaaatgggtatggatgtataatttgtattttattttgtttttgtaatgttatattgaaaagattaaatattatttcgtggtatttaaatatttttagagtttagattttgaattggattttgttttaagtattttgtaaatattgatttatcggttttttatgataatttaggaggtaaatattaattatgtttttattttattgttgaggatattaagatatagagaggttgaagaatttgtttgaagttatatagtatgggtgagagtgaaaaggggttattatattgggtaggtgggaattaggggttgaaatttataggttttattttttatttttagggattttttttataaagtagttagatggttttggaagaggggtgagaggataaagtagtttattttatttttagagaaagtttgagaaagtttcgagtagaacgtttttgagtaagaatggtttattgagggttatgcgggtagtattgtggtttttattttttagatgaggaaattgaggttttgagatatttagaggagattttatattgtcgtttttttttttttattttatgtgttagtgtgtttagagtatttttttaggttattttaagttttttcggttttttttttttttttttttttttttttttttttttttttttttttattttaagttttttcgtttttttttttttttttttttttttttttttgaaatggagttttattttattgtttaggttggagtgtagtggcgcgatttcggtttattgtaattttcgtttttcgggttttagcggtttttttgttttagttttttaagtagttgggattatagttatcgaatattacgtttggttaattattattattattttttttttttgagatagagttttttttgtcgtttaggttggagtgtaatggtgtgatttcggtttattgtatttttcgttttttaggtttaagtaattttattgttttagttttttgagtagttgggattataggtgagtgttattattttcggttaattttggtatttttagtagatacggggttttattatgtcggttgggttggtttcgaaagttatacggttttttattcgatgatttagtgagggtgggagttagtttcggagggttgtttttatgtcgtgggattttatgagagattatttttttttttggtatagagttttatttttgtattttttggttttggggtttaattgtcgagttattatgagttgttttttggagaggggttaattttttttatttttttcgttatttgtagtttttaaggtagagatagatttttgcgggggttaaggggaagtagtgggggttttataatggggttgtttgaggtttttagggaaaggtggtttttttttttcgggaagttattttttatcgtgggttttggattttttagtagatagggggt

SEQ ID NO: 295 - DNA, 6874 bp, Artificial Sequence
  chemically treated genomic DNA (Homo sapiens)
gtttattgtaatttttattttttgagtttaagcgatttttttgttttagattttttagaagttgggattataggtgttcgttattatatttagttaattttttttgtatttttagtagagatagggttttattatattggttagtgtggttttaaatttttgattttaagcgatttattcgttttaattttttaaagtgttgggattataggtatgagttatcgtattcggtttatttttgtttaattttaaaagaaaaatataaaagttatattgattgttaaagaagttatatggtataaatttatataaagtaaaaaaatatattttttttattttaaattttattttttataggtaagtattattagtgtttggagtgtggttttttagattttttttgggtataatgatttataaatttttttttattattgttaatgttgttattataattgatattttttttgtttttgtgtaaaattatgaatttttgagtaaaggttaattttaaatgaaaatagatttagggtattttgatagtaattttttttttttttttgagatagggttttttttttatttagattgagtgtagtggtgttattatggtttattgtagtttgggtttaagtaatttttttattttagtttttttagtagttgggattacgattatagatgcgtgttattgtgttttagtatttttttttttttttgagatgaagttttatttttttatttaggttggaatgaagtggtacgattttggtttattgtaattttttttttttagatttaagtgatttttttgttttagttttttgagtagttgggattataggtatatattattaggttcggttaatttttgtatttttaggagaggtgggatttttgttatgttggttaggttggttttgaatttttgattttaggtgatttatttttttaggttttttaaagtgttaggattataggtatgatttattttgtttgtttgtgttttttttttttaagagatggggttttattgtgttgtttaggttggtgttaaaattttcggatttaaattatttttttattttgattttaaaaagtgttgggattttaggtgtgaattattgtatttagttatgatagtaatttttaaaagtaatttttaatttttgtttgttattagttaggtgataaaaattagaagaaagaaagaaaggttagggtggaatttgtgtggtgtgagggatttggttgaaatttttatgtatttatagaggttttttatggtttggggtggatatgagtttttatttgttgtaaggtgttattttgattaggttttttcggaggaatattttaattttatattttagagtagttaggtaggagtttatttaggtttagtaggttgcgtggagtttatggtaaagtggagagttttttttatggttattattagttttaggttataatgtttttgtgggtatttaggtttagtgttattaaaaattttgatttttttgagagaggttagatatttagatttttttttttttttgaaaaggagttttatttcgtagtttaggtcggagtatagtggttttatttaggtttattgtaatttttgttttttaggtttaagtgatttttttgttttagtttttcgtgtagttgggattatagatgtgtgttattatgttcggttatttttttatttttttagtagagatggcgttttattatgttggttaggttggttttgaatttttgattttaagtgatttatttattttagttttttaaagtgttgggattatagatatgagttattacgttcggttagatatttagatttttatgtaaatttttatgatttttaaatgttataaggtttaaataaaatatttttatgagatagtttttgattttgattttatttttagtaatatttttggttttggaatttgtagtaatttaatagtgtgggtagaggtttttttttgattttttgtggtgataaaggatatgaagatgggttattttaagtagatagagaagttgtgatattaatattggtgtgtaatgatttaggagttgggagaagttgaagagagggtagtttatttgaagggaagttaaggattgcgttttttttagatatttttttttatagatgtgatagagagtagttgtttttgttgagggatgttatttttgtatgtgtttaaattagggggcgtaaatgaaagggtttttagagggtaggtgggaatgaaattttagagttttggttgtaatattatggtgtttagataaaatatgattttaggtattatttgtggtttttaaaatttttttggaatttatttatttgtttgatttgtttttttttttgggttaatacgttttatatgtttaagtatttgttgtaaagagtaaattagtggagggaggggagatttttttaaaattattgggggttgggtgtagtggtttaggtttttaattttagtattttgggaggtcgaggtgagagaatcgtttgagtttagaagtttgagattagtttgggtaatatagggagattttatttttatatgataaaaaatatatattatattttatttattatatatataaaatatatattatattttattgattatttgtatatattttattttagtattttttaagtttttggattgtgatttatagtaagaaatgtagttaatattgttatttattatatatatatattgaattatgagaaattgataatattttatttttttgatttataaaatggtaattttgtagggtttaatttatatataatgtaaataaatattttatgtaataatatttgtttttgttttttgtgatatttattaatttatttttttaaatgttgattgtagtatattgaattgatattattattattattagtaatgattaggttataattaattgttttatttaatttttataatttttcgggtaggaataattattgttttttatttttttaaatatgttaagatgttttatttttaggatgaggtgatttattttaggtaatttttattgtttaattattgattaattattttgttttttagtttttatgttattaaatttgtattaagaattttatggaataggttcggtatggtggtttatgtttgtaattttagtattttgggagatcgaggtgggaggattatttgaggttagtagttcgagattagtttggataatatggcgaaattttatttttattaaaaatataaaataattagttaggtgtggtggtgggtatttgtaattttagttatttgggaagttgaggtagtaggagaatcgtttgaattggggaggtagaggttgtagtgagtcgagatcgtgttagtgtattttagtttgggcgatagagcgagattttgttttaaaaaaaaaaaaaaaaaaaatttagggaatggatagtagtattgatgaatattgcgtttggagagattagattatttgttatttgtttttaggtatagggtttattaagaggtagattttagatttaaataattttgtaatagtaaagtttaagttatttttattgttttggagaaaagatttagatttagagtttgaattttattttgtagtattttagttttaattttttaagtttttttttttttttttttttttttttgttgggtacggtggtttatgtttataattttagtattttgggaagtcgagggggaaggatcgtttgaggttaggagttcgaaattagtttgggtaatatggtaaaattttatttttataaaaaatataaaaattaggttagagtggtggcgcgtatttgtagttttagttacgtgagaggcggaggtgggagaatcgtttgaattcgggaggtagaggttgtaatgagtttagatttcgttattgtattttaggttgggcgatagagcgatattttgtgtgaaatttttttttttttttttaacgggttttttagagaagtgtgtgtatgtgcgtgtgtgtgcgcgagcgtgtttgtttgggtttaaattttttgtcgggttatatttttttaagtttttgtattggttgtagggtgggttttattttcgggacgtttttttttttaagtttagtttgtagttggaagtttttattgatttttattttttttttttgattttcgttttttttttttgttcgttttaggattgggaggtcgatttttttttttcgtttttttttttattagttttttttagatgtatgtttgttaaagattttttagtgtagaggatgatgaatgaagattttcgagttagttcggtgggaaagtttcgtcgtttataaaagcgagggaaagggaagggaagttgggggtaggggaaaagttagagttgagaggttggggcgcgacgagtttggatatcgggcggggatttaagtttttttcgtttagttaataattgtgttttttttaggaaggcgtgaggaaatgttttaattaatttttgtattttttttttggaatttgggttgtatttttttatttattgtaaattttataatttatttaggggtttttttagtgtttgtttttagcggtttcggtgtttatttattagtgttgttttttttttttcgtaagattgcgttttagttttagttttttttttcgcgggtgttttttaaatcgttttattattttcgggtttagggaggcggaatcgtgtttgtttttcggtttttttaagaggcgtcggttttattttttttagagtcgcggtttgacgcgagatgatagtaacgagttcggtatgtttatgtaaataagcgtttttttgtgggttaatggggagcggaggtgtcggaattacggattaatggggcgggggcgttggggtttattatataaggagcggtttcgttataaaaggaaatattgtatttttttatatggggggaagggtcgggggattttttcgtcgttagcgcgtggtttcggttttttttattcgtcgtttcggtcgcggttagtagtttttgtttttcgggggacgttgacggtcgttcggcgcgtcgttttagtagacggatagggggcgttgcgcgcggtttggggtaattcgggttataggggtaggaaagtgagggtttaggtcggttcgggcgtgtaggggtttcgggttcgtagcggcggtcgcggtagcgatagcggtattagtagtagcgggagtgtcgggttgagtcgggaagtcgatggcggcggttgcggcggtttcgatttttcgttgattgttcgttcgtttttttgtatcgagcgttatgttatcgatttaagttggggtcgcggcggttttgggtcggggttcggttttggggggtagtttgaatcggatttcgacggggcggtcgggcggcggcggcgggatacgcggggttaacgggggtcgggttttcgggaatggcgcggggttcgggttcggtcgtttggagcgggaggttgcggtagcggcggtaattatttcggcgtttatcgcgggggttttttatagcggtagcgagggcgattcggagtcgggcgaggaggaggagttgggcgtcgagcggcgcggtttgaagcggagtttgagcgagatggagatcggtatggtggtcggtgggttcgaggcgtcggtagcggttatcgggggttacgggtcggtgagcggcgcggtgagcggggttaagtcgggtaagaagattcggggtcgcgtgaagattaagatggagtttatcgataataagttgcggcgttatacgatttttagtaagaggaagacgggtattatgaagaaggtattaagtcggggggttggtcggtttcggggttcggttggggtggggatgtgtaaagggagttcgggaggatcgtagagtcgaggcggaggtgagaggttgcgagttcgtaggaggtgtgtgggaggggatggtttttgttcggggagggtcgaaggggaggggtcgtcggggaaatgtggggagaggggagatttcgcgaacgttcgtaatcgtggggaaaggcgtagaggtgggagtgatcggcgttagagaggaagagggtttttgttgagtgaaggggtgaggagcggtgatgggaggttacgaggttgtcggggaggtggataatgagaattcgggattagtaggtttagtgtatttcggtgttcggacgagggcgtcggaaaagtagggagtaaacgagaaggtatggaggtgaggaggttggagttgtatgataataatgagcgaatatgtgtgggaggaagtgggtattacgagagtagtgttggttggaaggataggtagggttagggattaggtaagggagcggggtaggagaattggtgttgttttgagtagtaggaatttagttttgcgtcggtcgtgagttttttatggtatttattgggaattatatgtttttggtaggattcgttgtagaattttttgtcgttaggataagtggggtttttagttttagggagaatttatgtttggatggggtttgggggaagttagggaggtttgtagaggtatttaggaattttttttttgttagttagtgaaaagtgttgaggaaaggagttattttggggtgtagacgataagggaagagatgaaagtagaggaattgggagataaggagttggatttttgggaatattggttggtgtttatttttgttttatgtagaaattagagttgtttttaaggtggtttgtagaattttgttgggagagtatggtatttatggggttatttttgaaggttttttttttgggtttatggtaggatgttt

SEQ ID NO: 296 - DNA, 6874 bp, Artificial Sequence
  chemically treated genomic DNA (Homo sapiens)
aaatattttgttatgagtttaggaaggggatttttaaggatggttttatagatgttatatttttttaataaagttttgtaaattattttggaagtagttttggtttttatatgggatagaaataaatattagttagtgtttttaaggatttagttttttgttttttagtttttttgtttttatttttttttttatcgtttatattttaaaatgatttttttttttaatattttttattggttggtagaagaggaatttttaggtatttttgtaagtttttttgattttttttaaattttatttaagtatagattttttttagggttggaaattttatttgttttaacggtaggagattttgtagcgggttttgttaggagtatgtggtttttagtggatgttatggaagatttacggtcggcgtaggattaggtttttgttgtttagggtagtattagtttttttgtttcgtttttttatttggtttttaattttgtttgtttttttaattagtattattttcgtggtgtttatttttttttatatatgttcgtttattgttgttatgtagttttagtttttttatttttatattttttcgtttgttttttgttttttcggcgttttcgttcgaatatcggagtgtattggatttattgatttcgggtttttattatttattttttcggtagtttcgtagttttttattatcgttttttatttttttatttagtaagggttttttttttttttggcgtcggttatttttatttttgcgtttttttttacggttgcgagcgttcgcgggattttttttttttttatattttttcggcggtttttttttttcggtttttttcgggtaggagttatttttttttatatattttttgcggattcgtagttttttattttcgtttcggttttgcggttttttcgggttttttttgtatatttttattttaatcgggtttcggggtcggttagtttttcggtttggtattttttttatgatgttcgttttttttttgttgaaggtcgtgtagcgtcgtagtttgttgtcgatgaattttattttgatttttacgcggtttcgggtttttttattcggtttggtttcgtttatcgcgtcgtttatcggttcgtagttttcggtggtcgttgtcgacgtttcgggtttatcgattattatatcgatttttatttcgtttaggtttcgttttaggtcgcgtcgttcggcgtttagtttttttttttcgttcgatttcgagtcgttttcgttgtcgttgtagagggttttcgcggtgggcgtcggggtggttgtcgtcgttgtcgtagtttttcgttttaggcggtcgggttcgagtttcgcgttattttcggggattcggttttcgttagtttcgcgtgtttcgtcgtcgtcgttcggtcgtttcgtcggggttcggtttaggttgttttttagggtcgagtttcggtttagagtcgtcgcggttttagtttgggtcggtaatatggcgttcgatgtaggagggcggacgggtagttagcgaggaatcggagtcgtcgtagtcgtcgttatcggtttttcggtttaattcggtattttcgttgttgttagtgtcgttatcgttgtcgcggtcgtcgttgcgaattcggggtttttgtacgttcgggtcgatttgggtttttatttttttgtttttgtggttcgggttgttttaggtcgcgcgtagcgttttttgttcgtttgttagggcggcgcgtcgggcggtcgttagcgtttttcggggggtaggggttgttggtcgcggtcgagacggcgggtggagggggtcgggattacgcgttggcggcggagggatttttcgatttttttttttatataaagagatataatgtttttttttatggcgaggtcgttttttatatggtgagttttagcgttttcgttttattggttcgtggtttcggtattttcgttttttattggtttataagagggcgtttatttgtatagatatatcgaattcgttgttgttatttcgcgttagatcgcgattttgagaggggtggagtcgacgttttttaaaggaatcggagagtaggtacgatttcgtttttttgaattcgagaatgatagaacggtttgggaggtattcgcggagaaggaggttgggattggagcgtagttttgcggaagagagggagtagtattagtaaatgggtatcgggatcgttggaggtaaatattggggaaatttttgggtggattgtggggtttgtagtaaataaaaaaatatagtttaaattttaagggaggagtgtagggattgattggagtatttttttacgtttttttaagggaggtatagttattggttgagcggagagagtttgggttttcgttcggtgtttagattcgtcgcgttttagttttttagttttaattttttttttatttttaattttttttttttttttttcgtttttgtaggcgacgaaatttttttatcgggttggttcgaggatttttatttattattttttgtattggggggtttttggtagatatatatttggaaaaggttggtggaggggagggcgagagagagagatcggttttttagttttgaggcgggtagggaggagagacggagattagggaggagagatggagattagtgaagatttttagttgtaggttggatttggggaggaggacgtttcgaggataaagtttattttatagttagtgtaaagatttgggaaagtgtggttcgatagaaagtttaagtttaagtaagtacgttcgcgtatatatacgtatatatatatatttttttggaaagttcgttggagaaaaaaaaaaaagttttatatagggtatcgttttgtcgtttaatttggagtgtagtggcgggatttgagtttattgtaatttttgtttttcgggtttaagcgatttttttattttcgttttttacgtagttggaattataggtgcgcgttattattttggtttaatttttgtattttttgtagagatggggttttgttatgttgtttagattggtttcgaatttttggttttaagcgatttttttttttcggttttttaaagtgttgggattataggtatgaattatcgtgtttagtagaaaaaaaaaaaaaaaaaaaaaaaaatttaaaagattagaattggggtgttgtaaagtgaggtttaagttttgggtttgggttttttttttaaagtagtgaaaatagtttggattttgttgttatagaattatttaaatttggaatttgttttttggtaagttttgtgtttggaaataagtgataagtgatttgatttttttagacgtaatatttattaatgttgttatttattttttgagttttttttttttttttttttgagatagagtttcgttttgtcgtttaggttggagtgtattggtacgatttcgatttattgtaatttttgtttttttagtttaagcgatttttttgttgttttagttttttaaatagttgggattataggtgtttattattatatttggttagttattttgtgtttttagtagagatggggtttcgttatgttgtttaggttggtttcgaattgttgattttaagtgatttttttatttcggttttttaaggtgttgggattataggtatgagttattatgtcgggtttattttatgaaatttttaatgtagatttaatgatataaagattaaagggtagagtaattggttagtggttaggtaataggagttatttggagtaagttattttattttagggataaagtattttggtatgtttaaggggatgggaggtagtgattatttttgttcgaaaaattatggagattaaataaagtagttgattgtaatttagttattattggtagtggtagtgatattaatttagtatattataattaatatttaaaagaataaattaatgggtattataaaaagtaagggtaaatattgttgtataaaatgtttgtttgtattatatataggttgaattttataaaattgttattttataggttaagaaggtgggatattgttaattttttataatttagtgtatgtgtgtaatggatgataatattaattgtattttttattgtgagttataatttaaaagtttgaaaaatattgaaataaaatatgtgtaagtgattagtaaaatatagtgtgtattttgtgtgtatagtgaataaaatatagtgtgtattttttgttatatagagataaggtttttttatgttgtttaggttggttttaaatttttgggtttaagcgatttttttatttcggttttttaaagtgttgggattaaaggtttgagttattgtatttagtttttaatagttttaaagaggttttttttttttttattaatttattttttataataggtatttaaatatatggaacgtgttagtttaagaggaagaataggttaaatagataaataggttttagaagggttttagggattataaatgatgtttggggttatgttttgtttgagtattataatattatagttaaagttttgggattttatttttatttgttttttaaagatttttttatttgcgttttttagtttagatatatgtaggggtgatattttttagtagggataattgttttttgttatatttataggggagggtgtttgggaagaacgtagtttttagtttttttttaaataggttgttttttttttaattttttttaatttttgggttattgtatattagtgttagtgttatagtttttttgtttgtttgggatggtttatttttatgttttttgttattatagggagttaggaggagatttttatttatattattggattattgtaggttttagagttaaaagtattgttagggataaagttaaaattaaaaattgttttatagaggtgttttatttggattttataatatttaaaaattataagagtttatataaaaatttgaatgtttggtcgggcgtggtggtttatgtttgtaattttagtattttgggaagttaaggtggatggattatttgaggttaggagtttaagattagtttggttaatatggtgaaacgttatttttattaaaaaaataaaaaagtagtcgggtatagtggtatatatttgtaattttagttatacgagaggttgaggtaggagaattatttgaatttgggaggtagaggttgtagtgagtttaaatggggttattgtatttcggtttgagttacggagtgagatttttttttaaaaaaaaaaaaaaatttgaatatttgattttttttaaaaaaattagaatttttggtaatattgggtttaggtatttataaaagtattataatttggagttgatggtggttatagaagaggttttttattttattatagattttacgtagtttattgagtttaggtaagtttttgtttggttgttttgaaatgtgaagttgaaatgttttttcgaaaaggtttgattagagtagtattttgtaatagatgggagtttatgtttattttagattatgaagggtttttgtaagtgtatgggaattttagttagattttttatattatatagattttattttgattttttttttttttttttgatttttattatttaattaataataaataaaaattaaggattgtttttaaaaattattgttatggttgggtgtagtgatttatatttaaaattttagtattttttgaggttaaggtgggaggataatttgagttcgggagttttgatattagtttggataatataatgagattttattttttaaaaaaaaaaaatataggtaggtaaggtgggttatgtttgtaattttagtattttgggaggtttaggagggtggattatttgaggttaggagtttaagattagtttggttaatatggtaaaaattttattttttttaaaaatataaaaattagtcgggtttggtggtgtatgtttataattttagttatttaggaggttgaggtaggagaattatttgaatttggaggggagagattgtagtgagttaagatcgtgttattttattttagtttgggtgaaagagtgaaattttattttaaaaaaaaaaaaaaatgttggggtatagtggtacgtatttgtagtcgtagttttagttattagggaggttgaggtgggaagattgtttgagtttaggttgtagtgagttatgatggtattattgtatttaatttaggtaagaggaaaattttgttttaaaaaagaaaaaaaaattattgttaaaatattttaaatttgtttttatttggaattaatttttatttagggatttataattttgtatagaggtaaagagggtattaattgtgatggtagtattagtagtaatggaaaagaatttatgagttattgtgtttaggaaaagtttggaaagttatattttaaatattaatagtgtttatttatggagagtgaggtttgggatgagaggggtgtgtttttttgttttatataagtttgtattatgtgatttttttgataattaatatgatttttatattttttttttaaaattaagtaaaaataggtcgggtgcggtggtttatgtttgtaattttagtattttgggaggttgaggcggatggatcgtttaaggttaggagtttgagattatattggttaatatggtgaaattttgtttttattgaaaatataaaaaaaattagttgggtgtggtggcgggtatttataattttagtttttggggagtttgaggtaggagaatcgtttgaatttaggaggtggaggttgtagtgagt

SEQ ID NO: 297 - DNA, 16842 bp, Artificial Sequence
  chemically treated genomic DNA (Homo sapiens)
ttttttaaagtgttgggattataggcgtgagttattgtatttggtttgttatttatgtatttatttttttttgagataagtttttgttatgttgtttaggttggttttaaatttttaggtttaagagatttttttaaagttttgggattataggtgtgagttattgtgtataattttgaagtggttaattttaataatatatttattttagtttaatatatttaaaattatattattttaatatgtaattattattaaaattattaatgagatattttattttatttttatttatttatttttttgagacggagtttcgttttgttttttaggttggagtgcggtggcgcgattttggtttattgtaagtttcgttttttgggtttacgttttttttttgttttagtttttcgagtagttgggattataggtgttcgttattacgtttagttaatttttgtatttttagtagagattaggttttattacgttggttaggatggtttcgaatttttgatttcgtgattagtttattttggttttttaaagtgttgggattataggcgtgagttattgtgtttggttagtgagatattttatttgtgttttttttttttttttttgagatcgagttttattgtgttgtttaggttgtagtgtagtggtataattttggtttattgtaatttttgttttttaggtttaagcgatttttttattttagttttttgagtagttgggattataggcgggcgttacgatatttggttagtttttgtatttttagtagagacgggggttttattatgttgtttaggttggttttgaatttttgattttaggtgattatttgttttggttttttaaagtgttgggattataggtaaaagtcgttatattaggtttatttttttttttttcgagacggagttttattgttgtttaaggtggagtgtaatggtaagattttagttttttgtaatttttgttttttgggtttaagcgatttttttgttttagttttttaagtagttgagattacgggcgttcgttattacgtttggttaatttttgtatttttagtagagatagggttttattacgttggttagattggttttaaatttttgatttcgggtgatttattcgtttcggttttttaaagtgttgggattataggtgtgaattatcgtgtttggtaggtttatttttaatttttttaattttggaaatttagtgtgtagggtaggtatggtgttttatgtttgtaattttagaattttgggaggtcgaggtaggtggattatttgaggttaggagttcgggattagtttgaataatatggtgaaattttgtttttattgaaaatttaaaaattatttagttatggtggtgtatgtttgtagttttagttattttagaggttgagataggagaattgtttgaatttgggaagtagaggttgtagtgaattaagattatgttattgtattttagttcgggtaatagagcgagatttcgttttaaaaaaaaaaaaagagagttagtgtggagggaagtgtttttgttgggttcgggtgttttgtgggattttgaggaaaagttcgtattaggtagatgttgttttgtttttatgggtaaaggatattttaataaatcgaggagtaaaatgttttcgtatgtttttttcgcgtagatttgttaggaagagtataagaagaaatattcggatttttttgttaatttcgtggaattttttaagaagtgtttggagagatggaagattacgtttgtaaaggagaagtgaagtttgaagagaaggtaaaaagtgataaagttcgttgtgatagggagattaaaaattatattttttcgaaatgtaagaaagggtaagaaaggaaagaaaaaggatcgtaatgtttttagaaggttattatttgttttttttttgttttgttttgaatatcgtttaaagattaaaagtggatatttaggtttatttgtcgtggaaattgtaaagaaattgggtgaaatgtggtttgggtagttagttaaagataaataattatatgagtagaaagtagttaagttataggagagatatgaaaagggtattgttgtatatcgtgttaagggtaaaagtgaagtaggaaagaagggtttaaagaagaataaattagaagatgaggaggaggaggaggagaaagaagatgaagatgaggaggaagagggtgaagatgaagaataaatggttattttttaatgatgtttgtgtagtgggtttgttttgttaagaatgtgaattttagtatagtttagtattagttttagtataaaattgtataaattttcgtatagtttataagattttttgtatagaaaatattttttttttttttttttttttttgagatagagtttcgtttttgttgtttaggttggagtgtaatggcgtgatttcggtttatcgtaattttcgtttttcgggttttggtttaagtagtttttttgttttagttttttgagtagttgggattataggtatatgttattacgtttagttaatttttgtatttttagtagagatggggttttattatgttggttaggttgtttttaaatttttgatttcgtgattcgtttgtttcggttttttaaaatattgggattataggtgtgagttatcgtattttgtttaatgtttttaaatatttaatggtttttaaaaaatttattgtgtatggtagtatagtatatttgtaggaattagtattaatagtatattttgcgttttttaagatgttgtattttttaatattttgtaataaaattatgcgtattaaaaaaataaagaaatttcgtgtgtagtttatatttatagtatattttcgtttaggtatttgagagaatgattaggaggggtttttggaggaggtggtttttgaacggagaatttatttttaaggattttgtttgtaatggttattaagtattttttgagttatttttatgtgttttgtagttttttgaaggggcgtgggatttatcgatgttaattatttagtattatttttagattttaagaagttggggtgtgagttagtaattagtatagaaaagagatattaaaataagtttgagttggggagtgtttttttaattttagttttttggaagagattttttttttttttttgagatagagtttcgtttttattgtttaagttggagtgtagtggtacgatttcggtttatcgtaatttttttttttcgggtttaagcgattttttttttttagttttttgagtagttgggattatagatatgtatttgtaatttttattaaaaatataaaaattagtcgggcgtggtggcgtacgtttgtaattttagttattggggaggttgaggtaggagaatcgtttgaaattaggaggcggagattgtattaagatagtttgttttagttaaataatttggcgttagtgtaggaaaaggtggaaggtacggggttagtataggagggtttaatatttttaattttattaagttatattttggtaatttttgttttttacgagaagttttcgttgggtttgttttagcgttgttttgaggttttttttatgagtttcgatagggtagaggtcgttttgagcgttttttttttttttggtttaagagtggtttaaaagaaggatttttgattggaattggttattttgtgttattttttgatttttgatttcgttttaaagggggatgcgggggaggggttttggtaggggtggtttcgttttttttaggttcgtaagtttaggttttcgtttatcgggtttagtttattttgcggtcgtttagggaggtcgttggtattcgtgatttacgatttttttttcgagttttatcgaggttatagtcgtggtttcgtttttttatgtttgtttttcgttttttgttcgtgacgggcgttttcgaggattaatgagcgcgttgtatttatttttcgggcggggttaagcgtcgattaatcgtcgttcgggcgttcggtcgggtttaaacgttttaatcgttagcggcggcggggcgggtagagggtcggggatggtaggtttaattaacgggtgggtacgtcgttttcgcgaggaggcgtgttttgcggtcgggcgtgcggtgttcgcggcggcgtagggagggggagggaggtaaataagatggcggcggcgtgtcgggcgcggaagggggaggcggttcggggcgttcgcgagtgaggcgcggggcggcgaagggagcgcgggtggcggtatttgttgtcgcggttttggatgggttgggtttttttcgtcgtttcgttttttttatacgcgcggcggtcgcggcgagggggacgcgtcgttcggggttcggtattttcgggaatttttcggttcggagtttgcggtttgcgtcgtttcggtcgtcgggagtttcgtggagttttcgtcgtcgcgtcgtttcgcggatcggacgttgagggtattcggggcggggcgcgcgttcgggtagacgtttgcggggaggggggcgtttgtcgggtttcggcgattattttgggggtcgcgggtcggttcggggggcgtttagtgcgggttttcgcgggcgtcgggtagcgattagttttgagcggagttgttggtcgcggcgggaggtttttcggacgtttttagtttttcgaacgttcgttcgggtcggcgggagtcggcgtttttcgggaggttcgttcggtcgttcgcggcggagcgtttgtttttgggataggcggtgggatcggggcgtcgtcggagacgtttttagcgaagttgggttttttaggtgtgggggtttcggggggtagcgacgtcgcggattcggtttgtgggatgggcggttcggagaagattgcgttcggtcgtgtttatatttgttcgtgggtttgaggttttcggaggatgatttagtattgaaaagtttcggtcggtttttttagggttttcgaggacgaagttgattttgatcgggtcgttttttagttttgaggttcgggttttattggaattcgcgtttgagtcgtcgtttcggattttcggtgttcgtcggttcgtagattttgtatcgggtttggattcgtagtcgggattgacgtgtagaataatcgtttttgttggaagaagggttttttttttttttttggggtttttgttgtttttttttttttttttttttttgtaaaattttggagaagggaagtcggaatataaggaaggatcgtttattcgcggatttagggttggcggcgggattttaggattttgggtttagtatggaggtggtggattcgtagtagttgggtatgtttacggagggcgagttgatgtcggtgggtatggatacgtttatttatcgtatcgattttatcgaggttatttattagtcgcgtcgtaagcgggttaagtttatcggtaagtatttgatgggggatttgttgggggaaggtttttacggtaaggtgaaggaggtgttggattcggagacgttgtgtaggagggtcgttaagatttttaagaagaagaagttgcgaaggatttttaacggggaggttaacgtgaagaagtaagtatggtttgttggggtcggggtcgggtcgggttagttacggtgttgatggttttgttttttttttttttttttttttttttttttttatttttttttaatattttgagttggattcgtttggcgtttgtgtttttcgtgttagggagagcgtggttgggggtttgcgttacggatttttatttaggtaaggttagttgtcgtagcggggcgtgcgtttgtatgggtttttggattttagttaaaatgttttggtagcgaaatttttttgagaagggagcggtttttaattttttaagattagttttttggtttttttagttgtttaaggagtagaggcgtttagtggaattagtttgtgtttgtttgggtttcgagagtttgtgtgcggtcgttaatacgttttttgcgtagtgtgtggtcgttatcggggttaggcgaaatgtgatttgtttattttgttagaggggaattttgggttgttaaaaataattgtttgtatcggtttattagttagtaggagggaaacgtagtttttttttatttgttagggatgtgacgttggaagtatttttggttttcggggttggaagttttgttcgagggggattgtgtttttttttcgaattgtattcggaagattttatttttttaattgatttttttaggtacggggttgtcgttgggtatttcggacgtttttgtatttgtgcgcggagaagtttttatttagggtagtattggtcggtttgagttttttttagttggtgggggtggtcgggggtgtttttgttttatcgtagttagatacgttgtatttgtcgtcgtttggcgggttttgtttaggttttgttttttttttagtttttttaatttttaaaattttgttttttgtttttaagaaaggattttatttgttgggttaggtttcgagggattggtaaggatattttgcgtagggtattatgattttggaaggaggttcggggaggggttgttgcggtgtttgtttttattttttttttgtttaggggttttggggtttttgtcgtgtttgtttttattttttttttgtttaggggttttggggtttacgtatatttttttttttttttttttgagacggagtttcgttttgttttttaggttggagtgtagtggcgcgaattgggtttattgtaagtttcgtttttcgggtttatgttatttttttgttttagtttttcgagtagttgggattataggtattcgttattacgttcggttaattttttgtattttttagtagagacggggttttatcgtgttagttaggatggttttaattttttgatttcgtgattcgttcgtttcggttttttaaagtgttggtattataggcgtgagttaacgcgtgcggtttttttttttttttttttttttttttttgagacggagttttatttttgttgtttaggttggagtgtagtggagtggttttggtttattgtaattttcgttttttgggtttaagtgattttcgtgttttagtttttcgagtagttgggattataggtgtttgttatagtgtttagttaattttttttttttttttttagtagagacggggttttattattttggttaggttggttttgaatttttgatttcgtgatttatttgttttagttttttaaagtgttgggattaaaggcgtgagttatcgcgttcggttagtacgttttttaattagtatgtaggttgtgatatgcggaaattaggggtataggttttgaagtttgtattttggagttggagtagttagggttaaatgggagcggttgggaagggtgtgtttttacgaggtttttttgatgttttagtgtttagtttggattcgggtagaaggtgtggttagtgttttgagttagtggagtagttgtttgtgtttggtttttgtgagatgggttggttaggggttaggtagagtttgtgtttggtttttgtgagatgggttggttaggggttaggtagagtttgtgttgggggtagtaggtgttttttaaaggggttagtgatagttttttttttagtagtgagaaatttacgtttaggggtcgggcgcggtggtttacgtttgtaattttagtattttgggaggttgaggtgggtggatcgtttgaggttaggagttcgagattagtttggttaatatggtgaaattttatttttattaaaaatataaaagttagtcgagtgtggtggcgtgtgtttgtaattttagttattcgggaggttgaggtagaatattgttggagtttgggaggcggagtttgcggtgattcgagatcgtattattgcgttttagtttgggcgatatagcgagattttgttttaaaaataaataaataaataaataaataaataaataaataaataaatttggtttgagttttgataaatgtatatgtagggttaatgggaagatagacgttggagggtggaagtttgattgtgagagtgagttttttgtttttttgaatagttagtggaggaggttttgggagtttaggtgagtatttgaacggtagggtagagtttgagggttttggtggagataggtaagaaggttgtaggaatttagtttggtttagtgtttgggagaacgggagggaatacggaggtagggaggtagaggggttggtaggatttggattggattgtgcgtcgtagttatttatagtttgattttattgttttgaagtgagtgatgtatttttattagtgtttagcgtttaattttattttggttttgagtgtgtaacggttttgtttttgcggggttttttgggatgaggggtgagttttgtttttttttggttattgtttgttattaggagttgtttcgtttatagttgtgatttaggagttattgtattttttttagttttttgggtgttgttagggggtttttttattttgggagttggtgtgttttgattggaggttgttatgtgtagagtgttgttaaggagaaggggtgtttattgtttagttttgaggtttaaggttttggttagttttgttgttagcgttgtagggaaaaagttttttttgtgtgtgggaagtttaataaatttcgtttagattgtgtttcgtagcgagtgtttggaattttttagataagttttaggcgttcggttttttagttggtgtggaaagcgtgggcgattattaaggggggtgggttggggtagatggagtcggcgtgagtttcgttttttttttttttttttagaaaggtagttttggagtttatgttttgtttcgtttttatcggtaaaaagtataattttattagaaataggaaagttttaaaaagtattaatgagttaaaaagagggttgggtatgttcggttatgtttgtaattttagtattttgggaggttaaggcgggtggattattcgaggttgggagttagtttgattaatatggtgaaattttgtttttattaaaaatataaaattagttgagtgtggtggcgtacgtttgtaattttagttattttggaggttgaggtaggagaattatttgaattcgggaagtagaggttgcggtgagttaagattatgttattgtattttagtttgggtaataagagtgaaatttcgtttcgaaaaaaaaaagggttggggtcgggcgtggtggtttacgtttgtaattttagtattttgggaggtcgaggcggtttgattataaggttagaagtttgagattagcgtggttaatatggtgaaattttttttttattaaaaatagaaaaattagttaggtgtggtggtatatgttaataattttagttattttatttgaggttaggagtttaagattagtttggttaatatggcgaaatttcgtttttattataaatataaaaattagttaggcgtggtggcgcgcgtttgtagtttagttattggggaagttgaagtaaggagaatcgtttgaatttgggaggcggaggttgcggtgagtcgagatcgtattattgtattttaggttgggtaagtttaggagagaagagcgaaattgtgttttaaaaaaataattaattaaaataaaattagtgttataggttgtttttggtaggtagtgggtttttagggtggagtagggaagggttggaaagggtcgtttgtgtttagttcgatttttcgtgtttttcgggggatagtacggttagttgttgttgcggagtttatagtggggttttgggggggggggtgtaggtagaaggtcgttatgtttttttttttttttttattttagtgagagtgggttcgaaggtagggagtttgttcgttttgtggagttttcgtagaggtatttagggttgtcgtgagcgtatagtttggcggtgttttacggttttgtttttttttgttatttttatttgttgtaaaatattgtgttttcgtattttttttttttatttgtttggaaatgtgaaaattattgttgtcgtaggaaacgggtttagattcgggttgtggtttttttattcgtatcgttttcgcggtgtttagttaggaggtgggaggtgggcggtatttagtgtgtttggttgcggcgatgattggtagatgtttggatttatggtaaagaggattttcgcgagttgggagttagttttggattttgtaggtttttatattttaggcggtttttatggggttttagtatttgttgaggtttttgcgttagttatgtgaggtttgggtgttttcgaggtttttgtttgtgtttttttttgggtagcgggagggagagttttgagatttagagggagtttaggggttgggtagtcgtagaatagcgggggtaatgggtttattgggggttttgggttgtgtatatagtgggttttcggtgtttagttagttggggtaggtttggaatgttggttttttttttaggatttggggcgttgttgtagttgtcggggaattagtgaggcggttggacggttcgtatattttataaacgttatcgtattgtttaaattggatttaatttttttaatatttttttttttttttttttttttttttttggagatagggttttattgtatcgtcgaggttggagtgtagtggcgtaattatagttttgggtttaggtgatttttttgtttttaaggtagttgggattgtagatgtgtattattatattcgattagttttttgtagagatggggtttcgttatgttgtttaggttggttttaaatttttagatttaagttattcgtttgtttgggttttttagagtgttgggattataggtatgagttattgtttcgttacgtttatttttatttatttatttatttatttttgagacggagtttcgttttgttttttaggttggagtgttgtggtacgattttggtttattgtaagtttcgttttagttttttaagtaagttggaattataggtgtttgttattaagtttggttaattttgtttttgtatttttagtagagacggggttttatcgtgttagttagtatggtttcgattttttgattttgtgattcgttcgtttcggttttttaaagttttgggattataggtttgagttattgtgttcggtttatttttttattttttattttatagagataagggtttgttgtgttgtttaggttggttttgaatttttgattttaagtaattttttttggttttttaaagtgttgggattataggtgtaagttatagtattgggtttaaagtttattttttttttttttttttttttttttgagatggagtttcgttttgttatttaggttggagtgtagtggcgtgattttggtttattgtaagttttgtttttcgggtttatattatttttttgttttagtttttcgaatagttgggattataggcgtttgttattatgttcggttaatttttttgtatttttagtagagatggggttttattgtgttagttaggatggtttcgattttttgatttcgtgatttgtttgtttcggttttttaaagtgttggggttataggtgtgagttatcgtattcggtaaagtttatttttttaaagtgtgtaatttagtggtatatagtatattgatagagttgtataattattatttttattagtttttagaatatttttgttattttagaaggaaatttcgtttttgttagttattattttttattttttttttagtttcggtatttacgtattttttttttgtttttggattggtttgttttgaatattttatacgagtggtgttatatatcgcgtggttttttgcgttcggtttgttttacggagtgtgttgtttttaaggggtattcgcgtcgtggtttgggttcgaatttttttgttgtttacggttgcgttattttttagtgtgtggagggttacgttgcgtttgattgtttatttgtggttggatatttgggttgttttcgtttttgtttgtgaattgtggttgttttggtgtacgtgtgtttagtcggcgtttttttagaatttttgagggttttgttttagttatattaggagggatttagggattagggtacgcgggtttggagttgggtgtttttgggtttttatgtgttttttagttttgttttgagtcgtgggaggtcggggcgagggttaggtttattttttttttgtatgatttgtttttaggtagacggaggtttttagttttatttttttgtgagtttgagtggcgtttatgatttttttttttattttttgttttgttaattaataagttagttaaatagtttatgttgtttgggtaagtttagtaggtttttaacgtggtatttcggagcggttggcgatgttttaagagtcgggttttttttttttggaggttttttttgtttttcgttaagtttttaggtttcgttgggtttttttttttgttttttttttggttggagacgttagaggaagtttggcgatttagagaagttgatgtgtatttattatttcggaggtgattgttattaggcgggggtggttttatttttattttttttttggtataaatcgggggacgtacgtgtttgcgtagaatgttttggttttttttaattaaatagataatttagtgttttttggtttatgttgatttgtttaggagtgtttgggtttttttacgttttagttgttgtgtgttttgttgttgtgaagtgttttcgttgaggtggaggtagggtagggcgttttcggtgagggcgagtttttttgtgttcgtttttttatttgtagaatgatggtttatggaggagatatggtgtcggtaggtggtggtcggcgtagggaggtttttaggagggagttttttatttttatttgtttttagggtcgtgtagtttttcgagcggtttttacgaggttttgaggttgtatgtaggttgagtttttggttttattgtttttttttagggttaggattgtgttggagtttgggtgggtgtggggtggtttttgtataggtagtaggaggtgggttagagcggtgttggatttgaaggttcgtggtttttttagttttattgaggaggttggaatagtgttttgggttattttttttgtcggtagtcggtttttgttgagggagggggtgttttcgttttttggtggagtattaggtttttggggtttgtgcgttcgagtatttggtttttgttgtttgaaaatagtatttttttcgtttttcggttatcgtattttttttgaatagaaggtaagttttgttttttaggaatggtttgtgatttttattagcgggggaggttaggggtatatagagttttggggaataaggggatttggggttgagtcgggtttttcgggtttatttcgagtttttttgagtagtttggtaggtaggaaggcgttgggtttcggggtttttgtcgagtttagttttatttttagcgttttttttaatgttttgggtgtttgttaggttgtggatataggttttggttagttttataaataattttgtcgggttttgttgggaattggtgttattattatatagtttagagagaacggaaatatagggttttttagcgagtagattaggtttgcggtgattagtggaagtgggggacgtttttagggttgggtagttcgatagggtatcgggtatagttaggggtcggaattagttgtttattggtttcgtttttgggggattgtgtttttttgtgtttcgtttttattatattttgttttttttttattttgtttttttagtttttttttagattggcggttttttgtttaggtttagttttagtatagtttgtagttttggtagagtttaggttttggttttttgaggttgttttgagggtagtgagtaatgagttttgggattggtgtattgggagggaaaggtgagttaaggttttttgtaagaggtagttttgagttgggggtggggaaggttgggtcgtgggatatttttgatattttaagttttttttttgagatggagttttgttttgttatttaggttggagtgtagtggtgagatttcgattttttgtaattttcgttttttaggtttaagcgatttttttgttttagttttttgagtagttgggattataggcgtttattattacgttcggttaatttttgtatttttagtagagataaggttttattatgttggttaggttggtttcgaatttttgattttaggtgatttatttcggttttttatagtgtcgggattataggcgtgagttatcgcgtttggttttttagttgttttttatgttttatgtttgggttttttgttaagaattaaaaaagaaaaaaaaaattatggagatggaatttatatattgtataatttattcgtttatagtgtataatttagtggtattaagtatatttatacggttgtgtaattattatttttaattttagaacgttcggttattttaaaagtaagttttatttttattgtgttattttttattttttttattagtttttggttattttgaatttattttttggttttggattggtttgttttggatattgtatagaaatgggattttgtcggtcgggcgcggtgatttacgagagtaagagatttagattattttggttaatatggtgaaattttatttttattaaaaatataaaaattagttgggcgtggttgcgggtatttgtagttttagcgatttaggggttgagttaggagaaatcgtttgaattcgggaggtagaggttgtagtgagttgagattatgttattgtattttggtttggcgatagagtgagatttcgtttttaaaaaaaaaaaaataagaaatgggattttgttattttagcgtttttcgaggtcgaggtgggtagatgatttgagtttagtagtttaaacgagattagtttgggtagtacggtgaaattgtttttattaaaatataaaaattagttgggtatggtagtatacgtttgtagttttagttatttgcggggttgagatgggaggatcgtttgagtttgggaggtgtattttagtttgggcgatagggaaattttgttttaaaaaaaaaaaaaaaagtgtattatatattgtgtgttttttagtgttttattgtgatatttttaaggtgtagttaggttgtggttcgagttagagttttattggtttttgtggttgagttttgttgagtgcgtggatgggttgtgttgattttcgtttgtggaagggtttttgggtggttttatatttcggttgttgtgcgttttgttgttgtgagtatttcgtgtttcgtttttgcgtggcgtgtattgttttttagggtgtgtatttgggagtggagttgttggtttatagggtaatagatttttggagaagttgtagacgtttttacgtttatttattgggtgtgaggattttgtttttcgttatttttgtttttgtttaatttttttttttatgagatagggttttattttgttgtttaggttggagtgtagtagtacgattataggtaattataggtttaagtgatttttttatttgagtttttcgagtagttaggatttgaggtacgtatttttatatttggttaatttttgtatttttagtagagatagggtttcgtcgtgttgtttaggttggtttcgaatttttgagtttaggtgatttattcgtttcggttttttatagtgttgggagaaatgaagtgtttgcgatagggcggtagttgtagagggggttgtgttttttggtttgttgtgttttatttttgtgataggtaggtgggcgtggttaattgggcggtagttgtagagggggtagtgataggcgggtgggtgtggtaggattttataatgtttttttttgtggcgttttttttttcgtttgtttttttttatgggttatttttttagtttatttgcggtttattttttaaggagtgggattttcggagttgggagtttttggttgcgtgggattgtattgtgtgacggagttattattagggttttaatttattttggtttttgttatagtttgggttttatttgtgttattattgtagtagtttggtttttaggaagtaaaattgttattgagttataaagtttaattaagagtgttttttgggaggtcgaggcgggcggattataaggttaggagatcgagattattttggttaatatggtgaaattttgtttgtattaaaatataaaaaaattagtcggttgtggtgatacgtgtttgtagttttagttattcgggaggttgaggtagggaaattatttgaatttgggaggtagaggttgtagtgagttgagatcgggttatcgtgttttagtttagggatagagtaagattttgttttagaaaaaaaaaaaagtgttttaattgtgttttttaaagttttcgtcggtcgatgatagattagagggcgttgtgtttttattttttatcgttttgagtttggacgcgtggtttttgtagggtttttttttatagtattgtgaatttatagtttttttttagggaagggaggaggtacgttatttttatagggagatggggaggtcgattttagggatttaggttattattttgacgttgggtcggttgatatatttttgttttttttgttttagg

SEQ ID NO: 298 - DNA, 16842 bp, Artificial Sequence
  chemically treated genomic DNA (Homo sapiens)
tttgggatagagaggataggggtgtattagtcgatttaacgttaggatgatggtttggatttttggagtcggtttttttatttttttgtggaagtggcgtatttttttttttttttagagagaagttgtgagtttatagtgttgtgggaaagggttttgtaggggttacgcgtttaggtttagggcggtagggggtgggagtatagcgttttttagtttgttatcggtcggcgagggttttggaggatatagttaggatatttttttttttttttgagatagagttttgttttgtttttaggttggagtacggtggttcgattttagtttattgtaatttttgttttttaggtttaagtgatttttttgttttagtttttcgagtagttgggattataggtacgtgttattatagtcggttaatttttttgtattttagtatagatagggttttattatgttggttaggatggtttcgattttttgattttgtgattcgttcgtttcggttttttaaaggatatttttaattgagttttgtaatttagtaatagttttgttttttagaaattagattattgtaatggtagtatagatggagtttagattgtggtaggagttagggtgagttggagttttggtgatggtttcgttatatagtatagttttacgtagttaagggtttttaatttcgagggttttattttttggagggtgggtcgtaggtgagttggaaggatggtttataggaaggggtaggcgaagaaggagacgttatagaaagagatattgtggggttttgttatatttattcgtttgttattgttttttttgtagttgtcgtttagttggttacgtttatttgtttgttataagggtggggtataataggttagagagtatagttttttttgtagttgtcgttttgtcgtagatattttattttttttagtattataggaggtcgaggcgggtggattatttgagtttaggagttcgagattagtttgagtaatacggcgaaattttgtttttattaaaaatataaaaattagttaggtgtggaggtacgtgttttaagttttagttattcgggaggtttaggtgggaggattatttgagtttgtagttatttgtgatcgtgttattgtattttagtttggataatagaataagattttgttttataaaagaaaaaattaaataaaaataaaaatgacgaggagtaaggtttttatatttagtgggtgggcgtggaagcgtttgtagtttttttaaaggtttgttattttgtgagttagtagttttatttttaggtatatattttgaggaatagtatacgttacgtagaaacggagtacgagatgtttatagtagtaggacgtatagtagtcgagatgtggaattatttaggggtttttttatagacgaggattagtatagtttatttacgtatttaataagatttagttataaaaattagtgaggttttgattcgagttatagtttagttgtattttgaggatgttatagtgagatattaaaggatatatagtgtgtgatgtatttttttttttttttttgagatagggtttttttgtcgtttaggttggagtgtattttttaggtttaagcgatttttttattttagtttcgtaagtagttgggattatagacgtgtgttattatgtttagttaatttttgtattttagtagagatagttttatcgtgttgtttaggttggtttcgtttgaattattaggtttaagttatttgtttatttcggtttcggaaaacgttgggatgataggattttattttttgtttttttttttttggagacggagttttattttgtcgttaggttagagtgtaatggtatgattttagtttattgtaatttttgtttttcgggtttaagcgattttttttgatttagtttttgagtcgttgggattataggtgttcgtaattacgtttagttaatttttgtatttttagtagagatggggttttattatgttggttaggatggtttggattttttgttttcgtgagttatcgcgttcggtcgataggattttatttttatgtaatatttaggataagttaatttagagttaggaagtggatttagagtggttaggagttggtggaggggatggagagtgatataatgggaatggggtttgtttttggggtgatcgaacgttttggaattagaagtagtggttgtatagtcgtgtgaatgtatttaatgttattgaattgtatattgtgaacgaatgagttgtatagtatgtaaattttatttttatagtttttttttttttttttaatttttaataggaagtttaagtatggagtataaaaaatagttggggggttaggcgcggtgatttacgtttgtaatttcgatattatgggaggtcgaggtggattatttgaggttaggagttcgaaattagtttggttaatatggtgaaattttgtttttattaaaaatataaaaattagtcgggcgtggtgatgggcgtttgtaattttagttatttaggaggttgaggtaggagaatcgtttgaatttgggaggcggaggttgtagagagtcgagattttattattgtattttagtttgggtgatagagtaagattttattttaaaaaaaaaatttggggtgttaggggtattttacgatttagttttttttatttttagtttagggttgttttttgtaggaagttttggtttattttttttttttagtgtattagttttagggtttattgtttattgtttttagggtaattttagaaggttaaggtttgagttttgttagggttgtaggttgtgttggggttgggtttggataaggggtcgttagtttggggaggggttaggagagtaggatgaagggaaagtaaggtgtgatggggacggggtatagagggatatagttttttagaagcggagttagtgagtaattggtttcggtttttggttgtgttcggtgttttgtcgggttgtttagttttgaaagcgttttttatttttattggttatcgtaggtttggtttgttcgttgagaagttttgtgttttcgttttttttgggttatgtggtggtggtattaatttttagtagggttcggtaaggttatttatagaattggttagggtttgtgtttatagtttggtaggtatttagggtattgagggggacgttgagggtgaggttgggttcggtaaaggtttcggggtttagcgtttttttgtttgttaggttgtttaggagagttcggggtgggttcgagaggttcggtttagttttagatttttttgttttttagggttttgtgtgtttttaatttttttcgttgatgaaggttataggttatttttgggaggtaagatttgttttttatttagaggagatgcggtggtcggggggcggggaaggtgttgtttttagatagtagaggttagatgttcggacgtataggttttaagagtttgatgttttattaggaggcgaaagtatttttttttttagtaggagtcggttatcggtagggaaggtggtttaggatattattttagtttttttagtggagttgagggagttacgggtttttaggtttagtatcgttttggtttattttttgttgtttgtgtagggattattttatatttatttaggttttagtatagttttaattttgaggaggggtagtgaggttaggagtttaatttgtatgtagttttagagtttcgtgggggtcgttcgggaggttgtacggttttaaaagtaaatgagggtggaggatttttttttggaaatttttttgcgtcggttattatttgtcgatattatgttttttttatgagttattattttatagatggggaaacgggtataggaggattcgtttttatcgaaggcgttttgttttgtttttattttaacggggatattttatagtagtaggatatatagtagttgaaacgtggaagagtttaggtatttttgagtaggttagtatagattaagggatattgggttgtttgtttaattaaaagggattaaggtattttgcgtaggtacgtgcgtttttcgatttatgttaggggaggagtgggggtggagttattttcgtttggtggtagttattttcgggatgatgggtgtatattagtttttttagatcgttaggttttttttgacgtttttagttagaaaaagagtagaagaggaggtttagcgaaatttaagagtttggcgaggaataggaagagtttttaggagggggaagttcggtttttggggtatcgttagtcgtttcgaggtgttacgttaggggtttattgggtttgtttaggtagtatggattgtttagttgatttgttgattagtaggataggaaataggaaggagagttataaacgttatttaagtttatagagaggtggggttaggagttttcgtttgtttagaaatagattatatagggaagagatgggtttggttttcgtttcggttttttacggtttagagtaggattgggaggtatatggagatttaggaatatttagttttagattcgcgtgttttggtttttgaattttttttgatgtggttgaaataaggtttttaaggattttagagggacgtcggttgagtatacgtgtattaaagtagttataatttataggtagaggcgggagtagtttaagtgtttagttatagatgagtagttaaacgtagcgtggttttttatatattggaaagtgacgtagtcgtgaatagtagagaggttcggatttaggttacggcgcggatgttttttgaggatagtatatttcgtgagataagtcggacgtaaaaggttacgcggtgtgtgatattattcgtgtgaaatgtttaggataggttaatttagaggtaggaagggaatgcgtgggtgtcgggattggggagggaatggggagtgatggttgatagagacggggtttttttttggggtaataagaatgttttggaagttgatagaggtgatagttgtgtaattttgttaatgtattatatgttattgaattatatattttaaaaaggtgaattttgtcgggtgcggtggtttatatttgtaattttagtattttgggaggtcgaggtaggtagattacgaggttaggagatcgagattattttggttaatatagtgaaattttatttttattaaaaatataaaaaaattagtcgggtatggtggtaggcgtttgtagttttagttattcgggaggttgaggtaggagaatggtgtgaattcgggaggtagagtttgtagtgagttaagattacgttattgtattttagtttgggtgatagagcgagattttattttaaaaaaaaaaaaaaaaaaaaaaaaggtgaattttaggtttagtattatggtttatatttgtaattttagtattttgggaggttagagaggattatttaaggttaggggtttaagattagtttgggtaatatagtaagtttttgtttttataaaataaaaaataaaaaggtgggtcgggtatagtgatttaagtttgtaattttaggattttgggaggtcgaggcgggcggattataaggttaggagatcgagattatattggttaatacggtgaaatttcgtttttattaaaaatataaaaataaaattagttaggtttggtggtaggtatttgtagttttagtttatttgggaggttgaagcggagtttgtagtgagttaagatcgtgttatagtattttagtttgggggatagagcgagatttcgttttaaaaataaataaataagtaaataaaggtgaacgtggcgaagtagtggtttatatttgtaattttagtattttgggaggtttaggtaggcggatagtttgagtttaggagtttgagattagtttggataatatggcgaaattttatttttataaaaaattagtcgggtgtggtggtgtatatttgtagttttagttattttgggggtaggagggttatttgagtttagagttatgattgcgttattgtattttagtttcggcgatatagtgagattttgtttttaaaaaaaaaaaaaaaaaaaaaaaaaaaggtgttaagaaaattgagtttagtttgagtaatacggtggcgtttgtgggatatacgggtcgtttagtcgttttattgatttttcgatagttatagtagcgttttagattttgagagaggaattaatattttaggtttgttttagttggttgggtatcggaagtttattgtgtgtatagtttagaatttttagtggatttattattttcgttgttttgcggttgtttagtttttgagttttttttgggttttagagttttttttttcgttgtttagagaggggtataaatagaggtttcgaggatatttaggttttatatggttggcgtaggggttttagtagatgttggaattttataaaggtcgtttgggatgtaaagatttataaagtttaggattgatttttagttcgcgaaaattttttttattataggtttaagtatttgttaattatcgtcgtaattaggtatattgagtgtcgtttattttttattttttggttggatatcgcgggggcggtgcggatgggagagttatagttcggatttgggttcgttttttacggtagtagtgatttttatatttttaaataggtagaaagaaaagatacgaaagtatagtgttttgtaataggtggaagtgataggaaagggtagggtcgtgggatatcgttaggttgtgcgtttacggtagttttgggtgtttttgcggaggttttataaggcgggtagattttttgttttcgagtttatttttattggggtggaaagggggagggaggtatggcggttttttgtttgtatttttttttttagaattttattgtgggtttcgtagtagtagttagtcgtgttgtttttcgagaagtacggggagtcgggttgggtataggcgattttttttagtttttttttgttttattttaggaatttattgtttattagaaatagtttatggtattgattttattttaattaattgtttttttgagatataatttcgttttttttttttaggtttgtttagtttggaatgtaatgatgcgatttcggtttatcgtaattttcgttttttaggtttaagcgattttttttgttttagtttttttagtagttggattataggcgcgcgttattacgtttggttaatttttgtatttgtagtagagacggagtttcgttatattggttaggttggttttgaatttttgattttagatgaagtagttgggattattggtatgtgttattatatttggttagtttttttatttttagtagagagagggttttattatgttggttacgttggttttaaatttttgattttgtgattaaatcgtttcggttttttaaagtgttgggattataggcgtgagttattacgttcggttttagtttttttttttttcgagacggagttttatttttgttatttaggttggagtgtaatggtatggttttggtttatcgtaatttttgtttttcgggtttaagtgatttttttgttttagtttttagagtagttgggattataggcgtgcgttattatatttagttaattttgtatttttagtagagatagggttttattatgttggttaggttaatttttaatttcgggtgatttattcgttttggttttttaaagtgttgggattataggtatgatcgaatatgtttagttttttttttaatttattgatgttttttggaatttttttatttttaataagattatattttttgtcggtgagagcgggataaggtatggattttagggttgtttttttgggaaggaagggaagagacgggatttacgtcggttttatttgttttaatttattttttttggtgatcgtttacgttttttatattaattggaggatcggacgtttgaggtttgtttggaaggttttagatattcgttgcgagatataatttgagcggagtttattaaattttttatatataaaggaggttttttttttgtagcgttggtagtaaggttggttaaggttttgggttttagggttgggtagtggatattttttttttttgatagtattttgtatatggtagtttttagttagaatatattagtttttagaataggaggattttttggtagtatttagggggttggaggaaatgtagtggtttttgaattatagttgtaagcggggtagtttttgatggtagatagtgattaggaagggatagggtttattttttattttagggggtttcgtaagggtaaagtcgttatatatttagggttaggatgaaattggacgttgaatattagtgagggtgtattatttattttaaggtagtggggttaagttgtgggtagttgcgacgtatagtttagtttaggttttgttaatttttttgtttttttgttttcgtgttttttttcgtttttttaggtattgggttagattaggtttttgtaatttttttgtttgtttttattaagatttttaggttttgttttatcgtttaggtgtttatttgagtttttaggattttttttattgattgtttaggaaagtagggggtttatttttatagttaggtttttattttttagcgtttgtttttttattgattttgtatatatatttgttaaaatttaagttagatttatttatttatttatttatttatttatttatttatttatttttgagatagagtttcgttgtgtcgtttaggttggagcgtaatggtgcgatttcgggttatcgtaagtttcgttttttaggttttagtaatgttttgttttagtttttcgagtagttgggattataggtatacgttattatattcggttaatttttgtatttttagtagagatggggttttattatgttggttaggttggtttcgaatttttgattttaggcgatttatttattttagttttttaaagtgttgggattataggcgtgagttatcgcgttcggtttttaagcgtgggttttttattgttgggagagagattgttattggtttttttagagggtatttgttatttttagtataggttttgtttagtttttgattaatttattttatagagattaggtataggttttgtttagtttttgattaatttattttatagagattaggtataggtaattgttttattgatttaaggtattggttatattttttattcgggtttagattgggtattgagatattagaaaggtttcgtggaaatatattttttttagtcgtttttatttaattttgattgttttagttttagagtataaattttagagtttgtgtttttggttttcgtatgttatagtttgtatgttgattaagaagcgtgttggtcgggcgcggtggtttacgtttttaattttagtattttgggaggttgaggtaggtggattacgaggttagaagtttaagattaatttggttaagatggtgaaatttcgtttttattaaaaaaaaaaaaaaaaaattagttgggtattgtggtaggtatttgtaattttagttattcgggaggttgaggtacgagaattatttgaatttagggggcggagattgtagtgagttaagattattttattgtattttagtttgagtaataagagtgaaatttcgttttaaaaaaaaaaaaaaaaaaaaaaaaaaaggtcgtacgcgttgatttacgtttgtagtattagtattttgggaggtcgaggcgggcggattacgaggttaggagattgagattattttggttaatacggtgaaatttcgtttttattgaaaaatataaaaaattggtcgggcgtggtggcgggtgtttgtagttttagttattcgggaggttgaggtaggagaatggtatgaattcgggaggcggagtttgtagtgagtttagttcgcgttattgtattttagtttggggaatagagcgagatttcgttttaaaaaaaaaaaaaaaaaaatgtacgtgagttttagggtttttgagtaggagagaggtgagagtagatacggtaggagttttagggtttttgagtaggaggaaggtgagagtagatatcgtagtagttttttttcggatttttttttaaggttatggtgttttgcgtagggtgtttttgttagtttttcgaggtttagtttagtagataaggtttttttttggaaataggaggtaaagttttgaaagttaagaaggttgggaaaggagtagggtttgggtagggttcgttaggcggcggtaggtgtagcgtgtttggttgcgataaggtagggatattttcggttatttttattagttgggagaggtttaggtcggttagtgttgttttaggtaggagttttttcgcgtatagatgtagaggcgttcgggatgtttagcggtagtttcgtgtttgaagaagttagttggaaaagtaaggtttttcggatgtaattcgggagggaggtatagtttttttcgggtagggtttttagtttcgggggttagggatgtttttagcgttatatttttggtaaatgaggaaaggttacgttttttttttgttgattgataagtcggtgtaaatagttatttttggtagtttagggtttttttttgataggataaataaattatatttcgtttggtttcggtaacggttatatattgcgtagaaaacgtgttggcggtcgtatataaattttcggggtttaaataaatataggttgattttattgggcgtttttgttttttggatagttgggggagttaaggggttagttttaggggattgggggtcgttttttttttaggagggtttcgttattagggtattttaattggagtttaagagtttatgtaaacgtacgtttcgttgcgataattggttttgtttgagtgaaagttcgtaacgtaggtttttaattacgttttttttggtacggaggatataggcgttagacgggtttagtttagggtgttaagaggaagtaagggagggagggaggagagaaggaaggaagatagaattattagtatcgtgattggttcggttcggtttcgattttagtaagttatatttatttttttacgttggttttttcgttggggatttttcgtaattttttttttttgaggattttgacggtttttttgtatagcgttttcgagtttagtattttttttattttgtcgtaagagtttttttttagtaggttttttattaggtatttgtcgatgagtttggttcgtttgcggcgcggttggtagatgatttcggtggagtcgatgcggtggatgaacgtgtttatatttatcgatattagttcgtttttcgtgaatatgtttagttgttgcgggtttattatttttatgttggatttagggttttggagtttcgtcgttagttttgagttcgcgggtgagcggtttttttttgtgtttcgattttttttttttaaaattttataaagaaaaaagaaaaaaaaaaggtaataaaaattttaaaaggaagggaaaaattttttttttaatagaaacgattgttttatacgttagtttcggttgcgagtttaagttcggtgtagggtttgcggatcggcgggtatcgggggttcgggacggcggtttagacgcgagttttagtgggattcgggttttagaattgggagacggttcggttagggttaatttcgttttcggggattttggggaggtcggtcggggttttttagtgttaggttatttttcggggattttaggtttacggataagtatgaatacggtcgagcgtagtttttttcgggtcgtttattttataggtcgggttcgcgacgtcgttatttttcgggatttttatatttggagagtttaatttcgttgggggcgttttcggcgacgtttcggttttatcgtttgttttaggagtaaacgtttcgtcgcggacgatcgagcggatttttcggggggcgtcgattttcgtcggttcgggcgagcgttcggggggttgggggcgttcgggaggtttttcgtcgcggttaatagtttcgtttagggttggtcgttgttcggcgttcgcgagggttcgtattgggcgtttttcgagtcggttcgcgatttttaaggtggtcgtcggggttcggtaggcgttttttttttcgtaaacgtttgttcgagcgcgcgtttcgtttcgagtgtttttagcgttcggttcgcggggcggcgcggcggcgggggttttacggggttttcggcggtcgaggcggcgtaggtcgtaggtttcgggtcggggggttttcgaaggtgtcgggtttcgggcggcgcgtttttttcgtcgcggtcgtcgcgcgtgtggaggaggcggagcggcgaggggggtttagtttatttaaggtcgcggtagtaagtgtcgttattcgcgtttttttcgtcgtttcgcgttttattcgcgggcgtttcgggtcgtttttttttttcgcgttcgatacgtcgtcgttattttgtttatttttttttttttttttgcgtcgtcgcggatatcgtacgttcggtcgtagggtacgttttttcgcgaggacgacgtgtttattcgttggttgaatttgttattttcggttttttgttcgtttcgtcgtcgttgacgattggagcgtttggattcggtcgggcgttcgagcggcgattggtcggcgtttggtttcgttcgaggggtggatatagcgcgtttattggttttcggagacgttcgttacgggtagggggcgggaagtaggtatggggagacgaggttacggttgtgatttcggtggggttcgggaagggggtcgtaggttacgggtgttaacggtttttttgaacggtcgtagggtgggttgagttcggtgggcgggaatttgggtttgcggatttggaaggagcggggttatttttattagagtttttttttcgtatttttttttggggcgaggttaagggttaaaaagtaatataaagtggttaattttagttaaaaattttttttttgagttatttttggattaggggaaagagaaacgtttagggcggtttttgttttatcggaatttatgggggaagttttaggatagcgttgggataagtttagcgggggtttttcgtgaaaaataagagttgttaaaatatggtttgataaggttgaaaatattgaatttttttgtgttagtttcgtgttttttatttttttttgtattagcgttaggttgtttagttggaataaattattttggtataattttcgttttttggttttaagcgatttttttgttttagtttttttagtagttgagattataggcgtgcgttattacgttcggttaatttttgtatttttagtagaaattataggtgtatgtttgtaattttagttatttagaaggttgagggaggagaatcgtttgaattcgggaggaggaggttgcggtgagtcgagatcgtgttattgtattttagtttgggtaataagagcgaaattttgttttaaaaaaaaaaaaaagattttttttagaaaattgaagttgaaggaatattttttaatttaaatttattttggtattttttttttgtattgattgttggtttatattttaattttttggaatttggagataatgttggataattggtatcggtaggttttacgtttttttagagaattgtaggatatatggaagtgatttaggaaatatttggtgattattatagatagaatttttgaagatggatttttcgtttaaagattattttttttaagaattttttttagttatttttttaagtgtttggacggagatgtgttgtgagtgtgaattatatacggaatttttttgtttttttgatacgtataattttattataaaatgttaaaaaatgtagtattttaaaaaacgtaagatgtattgttgatattaatttttataagtgtgttgtgttgttatatataataaattttttaaaaattattaaatatttagggatattaggtagggtgcggtggtttatatttgtaattttagtattttgggaggtcgaagtaggcggattacgaggttaggagtttgaaagtagtttggttaatatggtgaaattttatttttattaaaaatataaaaattagttgagcgtggtggtatgtgtttgtaattttagttatttaggaggttgaggtaggagaattgtttgaattaggattcgggaggcggaggttgcggtgagtcgagattacgttattgtattttagtttaggtaataagagcgaaattttgttttaaaaaaaagaaaagaaaagaaaagtattttttgtatagagaattttatgagttatacgaaaatttgtatagttttatattgaagttaatattgagttgtattagaatttatatttttagtaaaataagtttattgtataggtattattaaaggatagttatttattttttatttttattttttttttttttatttttattttttttttttttttttttttttttattttttggtttgtttttttttgagttttttttttttgttttatttttgtttttagtacgatatgtagtaatattttttttatattttttttgtagtttaattgttttttgtttatatggttgtttatttttggttgattgtttagattatattttatttagtttttttgtagtttttacgataaataggtttgggtgtttatttttgatttttgggcgatgtttagagtaaaataggaagaaggtagatggtggttttttaggagtattgcgattttttttttttttttttttatttttttttatatttcggaggaatgtaatttttaatttttttgttatagcgagttttgttattttttgttttttttttaaattttattttttttttgtagacgtggttttttatttttttaaatattttttggagaattttacgaaattgatagaagagttcgggtgtttttttttgtgttttttttggtaggtttgcgcgaagagggtatacgaggatattttgtttttcggtttgttggggtgttttttatttatggggatagaatagtatttatttggtgcgagtttttttttagagttttatagagtattcggatttaatagagatatttttttttatattgattttttttttttttttttgagacggagtttcgttttgttgttcgggttggagtgtaatggtatgattttggtttattgtaatttttgttttttagatttaagtaatttttttgttttagtttttggagtagttgggattataggtatatattattatggttggataatttttggatttttaatagagatagggttttattatattgtttaggttggtttcgaatttttaattttaggtgatttatttgtttcggttttttaaagttttgggattataggtatgaggtattatgtttgttttatatattgaatttttaaagttagaaaaattaaaaatgggtttgttaggtacggtagtttatatttgtaattttagtattttgggaggtcgaggcggatggattattcgaggttaggagtttgagattagtttggttaacgtggtaaaattttgtttttattaaaaatataaaaattagttaggcgtggtggcgggcgttcgtaattttagttatttgggaggttgaggtaggaggatcgtttgaatttaggaggtagaggttgtagggagttgagattttgttattgtattttattttgggtaataatgagatttcgtttcgaaagaaaaaaaaatgggtttggtatggcggtttttgtttgtaattttagtattttggggggttaaggtaggtgattatttgaggttaagagtttaagattagtttgggtaatatggtaaaattttcgtttttattaaaaatataaaaattagttaggtgtcgtggcgttcgtttgtaattttagttatttaggaggttgaggtaagagaatcgtttgaatttgggaggtagaggttgtagtgagttaagattgtgttattgtattgtagtttgggtaatatagtgagattcggttttaaaaaaaaaaaaaaagggtataaataaaatattttattggttagatatagtggtttacgtttgtaattttagtattttaggaggttaaggtgggttgattacgaggttaggagttcgagattattttggttaacgtggtgaaatttggtttttattaaaaatataaaaattagttgggcgtggtggcgggtatttgtaattttagttattcgggaggttgagataggagaaaggcgtgaatttaggaggcggagtttgtagtgaattaagatcgcgttatcgtattttagtttgggagatagagcgagatttcgttttaaaaaaataaataaataaaaataaaataaaatattttattaataattttaataatgattgtatgttgaaatgatgtaattttggatatgttaggttaaagtaaatgtattattaaaattaattattttagggttatgtatagtggtttatatttgtaattttagaattttgggaggattttttgagtttaggagtttgaggttagtttgggtaatatagtaagaatttgttttaaaaaaaaataaatatataaataataggttaggtgtagtggtttacgtttgtaattttagtattttgggagg

SEQ ID NO: 299 - DNA, 7321 bp, Artificial Sequence
  chemically treated genomic DNA (Homo sapiens)
aacgtttttgggatattggttttatattaagagatagaatagggatttaaattaggttttttaggttttaaagtttaaggttattatgtaatgatagagaagtagatttgaagattttagagataggagtttttagagatttattttgtatttgtagttttttatttttttattgttaaatttattttgttttttaaaaattatagtatattgggtagatagggtttttggttagtttagtttgtgatttgggttgggatgtgttggttgttgtgattttgataagaggagggggtttagagtttttattgatttttgtttgtttgttttggattttgttttatagagtagtttttgggaagagtttattgtttttaggttacggttattttttggtttgttttttggtttttgtagaagagaagttggatcgatatgatagtgtatatttgaagttttgtttattttttgtattagtatcgattaagttttgtagtgtgttgggtataatgttaggtattgagaggttattatatagaaatttgagtgttttgttgtgtttagtgagttgatgttaggggaaaagggaattagataagttaaagggagtttattgaattttaaggagtgatgagaagttgaagagatagaaatttggaggggtagaggtttattttttgtagggattaggagaaggtttttggatgaggtgtttggaaaaaagagtagtgtttgggaaggggaaggcgggaagggagggagagaaaagtagacgggtaggtgggatgtatgttgtgggaaggtagaggtgtttgggatgggagtaggagttgatgaagagggtagggaaggtggttgggaagggggttgggattagttggcgtaggggtttgaaagtgattagttttttgggtgggagatatttaagatattttaagtaagggtgtgatgagtttaagattgggttgttgagagatggttagtattaagtttggtttatgtaaagtgttagaagtatgtttgtatagggggagggtggataggagatggggagagttaattatgatttgtgtttgttatgttttttagtattacgttcgaatttatttattgtttataattttttataagagatagatattattgttattattatttttatggtatagagaaagagacgttggtttattatatgtatgtgggaggtgggggttagggtggatagaaagtagttatggttgttgaggattgagaatggggagtgtagttgtgttgttggtgtcggtgggatagtatatgggtttagatttgttttgagcgttatttatatatagttaattgtttgtttgatgtgtttatagtttttttatttggtatgtttaaattgaatttttgatttttgtttttttttttttatatttcgttattaagttagattttttttttgttgtttattttagttaaggttatcgttatttagttggttatttaagttagaaggttgggtggtattttgggtgttttagtttttttgattatttattttattttttattttttgaatatttttttaatttattaatttttttttttatttttcgttattatttagtttaagttgtttttattttttatttagacggtttattttttttttttgttttgttttaggtagtagttagagttattatttagaaaggttagtttgtcgtaggtttttttttgtttcgtatattttattttgagtggtatggtttttgttgatttttttatgttatttagtttatggtttttttgagttttttagttttaattgtagagattttttttagatttaggtaggtaggtgtttttttatttatttatttagtaagcggtaatttttttatttatatttgttgggtttagggtgttgaagtagataggtttggtttcgtttttagggagtttatattgcggtgtggaggtaaagttataaaatgaatttattggattttagtatatgttgtttttttgtttgaaaaagtttttgtttaaatttttatttatgcggtgtttgtttggggtaattttttttggatggttaggttgggtttggcggtttttttgaatagtattgattttagttggtaagggtagtttgttagtatgtatggtcgttttttttttcgatagtaagttttatatgggtaggtttttgtttgttttgtttatagttgttttttaggtttaggttagtagatttttgttaaatgtttgtagaatgaatgataggtttttttttttttttttttttttagaaggagtattgttttgtcgtttaggttggagtgtagtgatatgattttggtttaatgtaattttcgtttttcgggtttacgtgatttttatgtttcggttttttgagtagttgggattataggagtagtgtgttataattttttattgtggtaaaatatataaaatataaaatttattatttaattatttttaagaatatagttcggtggtataagtatatttatgttttgtatttattattattatttatttttaggatttttttattttttttagttaaaattttgtatttattaaatattaattattaatttttttttttttttaataattggtaattattattttattttttgaatttatgattttgattattataggtattttatataagcgaaattatatttttgttttttgtgattgttttattttgtttagtataatgtttttaggggtcgtttatgttgtagtatgttagaatattttttttttttaaaaatttatttattttgagatagagttttattttgttatttagttggagtgtagtggtaggattatggtttattgtagttttaattttcgaggtttaattgatttttttattttagttttttaggtagttgggattataggtatgcgttattatatttagttaattttaaaaattttttgtagagaagggggttttattgtgtttcgtaggttggttttaagtgatttttttattttggttttttaaagtgttgggattaggtgtgagttatagtgtgtggtttttagagtattaattttaaaaagttataattataaattttttttttgtttttttgagatatatatttatgtattttttataatttaggaatgttttttttaaggatttgaaatttatttttttggaatgtaattattataaaggtagggtttatgttttttagtttatgtgggagaatagaattttaatttttttaattgttagttagtagatatagttggtttaattatatttacgttaagtattttttttaattttttattttttagattttaagtgagtttttgtatgtttttttgtttatttttttattttttttttggaatgtttaattatttttgcgtaaatggaatggagtttagttgttttttttattgttagtagttattgaataaaatttatttttattattttaatgtttggttttgtttatttttaataatattattaattagagtttaatttttatttatggttttttttgtttggttttttagtgaagatgaaattgttttgagtaaaatgtgtaaatattaaatgtattattagataattttgataaatttatatatttaaattttttattaagatatatattaaggatgaggagaaatttgaatttttgtggattgttaatgggaatgtaaaatggtttagtttgttgtaaaaaatggtgtggtggttttttaatatattaaattagaattagtatatgatttagtaattttatttttgagtgtatatttaaatgaattaaaaagaaagtagggatttaaatagatattcgtatatttatgtttatagtcgaattatttataatagttaaaagatggaagttattcgtgtttatgattgtatgaatggataaataaattgtggtgtatatatataatggaatattatttggttataaaaaggaaagaggttaggtacgatggcgtatatttgtaataacggtattttgggaggttaacgtgggtgaattgtttgagtcgaggagtttaagatcggtttggggaatatagtgatattttgtttttgaaaaaaaataaaataggattagttaggtatggacgtgtgtgtttgtagttgggaggatggtttgagtttaggaagtttaggtagtagtgagtattattgtattattgtattttaagttgggtggtagggcgagattttgttttaaaaaaaaaaaaaaaaaaaaaaaaggaaaaaaaggaagcgttttgggaaagggaggttttggttggaataaatggtgaatttttttggtatttttgagtttttttgggtaggtattttaaaggggtttaggtttatttagagattcgtttttaggttgttaatttagtatgatgttatgttagagtttagttaagttttttagtgtagtggttagggtagtcgttaaatgttgaggagtttttgtagtttttaattagtaggcgagtttttagggatgaaaggtattgataatttattttgaatgtattaaaaaataggatggattgttggatgtagagacggtatgtgataaagcggatatagtaaatgttattggtagagagtttgttatttagttattagaatatgagttttaggagggtagggattttgttggtttggtatataggcggttaataaatatttgtagaatgaacgaataatatttgtaacggttttaggataaataagtgtataaaaagaggaagttttttttgattttgttgtggcggggattcggacggtggaacggacgtatagaaagtgcgcggagtttggcggagtcgttttggttttttggagtttttgttttatggcgggttttttcggggttgcggaatttttttggtcgttcgtggcgttcgttttatggtcgttttttggggacgtaggagtatgcgtagaattgttttcggttcggatcgttatggtagcggcgtcgtcgcgggtcgggttttagtaatttcgttcgggttcggttgttttaatagtcgtttttattgttttttttcgggtatgaatcgagttttttgttgtcgttcgttgttttattcgtcgttgtcgtcgtatttcgattttgggttagcgttgggaatatgtttttggtcgtttattgttatttgcgggtcgtgggtaaggggagttatggagaggtgacgtttgtgaagtatcggcgggacggtaagtaggtttgtaggggtggggttcggtaaggggcgggggcgggtagaagtgcgtcgagggcgtcgatcggtagattaggtcgggggtggtcgtaagaggtttatttcggatggcgtttttttagggaaatggttttagattaagacgaggtttggtttttttgtaatatgcgtttagaattatttttatttttttgttgtgttaaatttttttttttttaatttttattttttttaattataattttaagttttatgtaaaaatttttagtttttgtttatttatttttttgttgtattaattggtatgcgtgatttatatattttttttttaatttcgatatttttatgagagtcggtattatgtatttttaggatttaatatagcgtttagtaagtattattttttgaatgaagggttttaaacgtttttattgtagattgttggatttatttaaaattcgatttatttttttttcgttaaatttttttttatgtttttcgttttagtgaatagtgatattaatttattagttgtttaagtcggatatttggagttatttttaagtttttttacgtattttaatattgattatatttatttattattaagataataggtttttttttatttttattgttattattttaatttaggatattttgttgtttttagtaaagttatggttacggttttttaattggtcgtcgttatttgatttgtttttttttaatttattatttttattgtagttttagtgattttttttaaatttaaatttgatgttgttatttttttgtttaaaatattttattttattatttttaggataatgaattaattatttaatgtggtttattaatagggtgataatataatgtataaattgggataattttgaaattgaaaggtattattaatagttatattaggatagtaggattgttttaggtaagttgagaagagatgttttttttaaatatagggtttaattgtttgtttttttttgtttttggtgttagttgttttgcgtggaatataagtttatgtataagaaatttatttagtaggtattgggggaattattggattttggggttgatgatagggaattagtaatagttagttatttgagttttagtttatattttataaaatatatttatttatgtgttgaagaaatgaattgtatggtttttgaaatgattgagggtaatgtattaggtattagaggttattgattttttttaagtgtgaataattttgtatgttgaagattagtgattattaaatttatggggttatggatttttttgagtatttaacgtaatttatagattattttgtttgtaaatgtatagttaagttatattttatttatttttttgggagagtttagatattaaggaatttttttttttattttttattttttttgagatagagttttgttttgttttttaggttggagtgtagtggtgcgatgttggtttattgttgtaattattgttttttaggtttaagtaatttttttgtgttagtttttcgagttgttgggattatgggtatatattattacgtcgggttaatttttgtatttttagtagagataggttttattatgttgattaggttggttttgaatttttgattttaggtgatttattcgttttatttttttaaagtgttgggattataggtgtgagttattgtgtatggttagatattaaggaattgttaatataggttttataattgatttaatggtatgttattttgaatttattttttttagttattaatgaaattgtgaaatgtagatgggaaaggtaatttttgtggttttatattgttataaatttaatttataagaagtattaataatagtaaatatttttttcgattttgtgtttggtgaaaaataaaatgaataggttatttgataggttttataaggttggttttgagggtatttttgagagtttttagataattttgaggttataaattttacgtttatttgtatattgtaaaaatatatggtttgtttttagt

SEQ ID NO: 300 - DNA, 7321 bp, Artificial Sequence
  chemically treated genomic DNA (Homo sapiens)
attaaaaataaattatgtatttttataatgtgtaaataaacgtaagatttgtggttttagagttatttaagggtttttaagaatatttttaaaattaattttgtggagtttgttagataatttatttattttgttttttattaagtataaaatcggggaaaatatttgttattattgatattttttataagttagatttatagtagtgtagggttataaaaattattttttttatttgtattttataattttattaatgattaaaaaaagtgagtttaagataatatattattggattaattataaaatttgtgttagtaattttttaatatttggttatatatagtggtttatatttgtaattttagtattttgggagggtgaggcgggtggattatttgaggttaggagtttaagattagtttggttaatatggtgaaatttgtttttattaaaaatataaaaattagttcggcgtggtggtgtgtatttatagttttagtaattcgggaggttgatataggagaattgtttgaatttgggaggtagtagttgtagtagtgagttaatatcgtattattgtattttagtttgggaggtagagtaagattttgttttaaaaaaaataaaaaataaaaaaagaaattttttaatatttaagtttttttaaaaaggtgaataaaatatagtttgattatatatttgtagatagaatagtttgtggattacgttagatatttaaagggatttatggttttataagtttaatagttattgatttttagtatataaaattatttatatttaaaagaaattaatagtttttaatatttaatatattgtttttaattattttaaagattatataatttatttttttaatatatagataaatgtgttttgtgaagtgtaaattaaagtttaaataattagttattgttagttttttattattagttttaaaatttaatgatttttttaatgtttattgaataaattttttatgtatgagtttgtgttttacgtaaagtaattagtattagagataaggaagaataggtaattgggttttatatttagggggaatatttttttttagtttgtttggagtagttttattgttttggtgtaattattaataatgttttttagttttaaaattgttttagtttgtatattatattgttattttattaataaattatattgaataattggtttattattttgagagtaatgggataaagtgttttaaatagaggagtgataatattagatttaaatttgagaaagattattgaggttgtagtgaaagtgatggattggagaaaagtaagttaagtggcggcgattagttgggaaatcgtggttatagttttgttagagataatagggtgttttggattggggtggtagtagtagagatgagaggaggtttattgttttagtgatagatgaatataattagtgttggggtgcgtggggaggtttaaaaatgattttaggtgttcggtttgggtaattggtgggttggtgttattatttattgaaacggaagatatgagagaaggtttggcgggaagaaaatgagtcgagttttaagtgaatttagtagtttatagtagagacgtttggggttttttatttaaggaataatgtttgttaggcgttgtattaagttttgggaatgtatgatatcggtttttatgagagtatcggggttgggagaaaggtgtgtagattacgtatgttaattagtataataaagaagtagataggtagagattgaaaatttttatataaaatttagaattgtaattaaagaaaatgaaaattaaaaggaaaaaaatttaatataataaagaagtagaagtagttttgggcgtatattatagggaggttaggtttcgttttggtttgggattatttttttgaggaaacgttattcgagatgagttttttgcgattattttcgatttaatttatcggtcggcgttttcggcgtatttttgttcgttttcgttttttgtcgggttttatttttgtagatttgtttgtcgtttcgtcggtgttttataagcgttatttttttatagttttttttgtttacgattcgtaggtagtagtaggcggttaggggtatgtttttagcgttggtttagagtcgggatgcggcggtagcggcgggtagggtagcgggcggtaataagaagttcggtttatgttcgagagggggtagtgggggcggttgttgaggtagtcgggttcgggcgggattgttggggttcggttcgcgacgacgtcgttgttatagcgattcgggtcgggagtagttttgcgtatgtttttgcgtttttaaaggacggttatagagcggacgttacgagcggttagagaggtttcgtagtttcgggaggattcgttatagagtagaggttttaggaggttagagcgatttcgttaggtttcgcgtattttttgtgcgttcgttttatcgttcggattttcgttataatagagttagggaaagttttttttttttgtgtatttgtttgttttaaggtcgttataagtattgttcgtttattttgtaaatatttgttgatcgtttatgtgttaggttaataaagtttttgtttttttggagtttatgttttaatgattgggtgatagattttttattagtaatatttgttgtattcgttttattatatgtcgtttttgtatttagtaatttattttattttttgatatatttaaagtaaattattagtattttttatttttaaaaattcgtttgttaattgagaattataaagattttttagtatttaacgattattttaattattgtattaagagatttgattaaattttaatatggtattatgttaagttaatagtttaagggcggatttttaggtgggtttaggtttttttaaaatgtttgtttaagaaagtttaggggtgttaaaagaatttattatttgttttagttaaagttttttttttttagagcgttttttttttttttttttttttttttttttttttttttgagatagggtttcgttttgttatttagtttggagtgtagtggtgtaatggtgtttattgttgtttagattttttgggtttaagttatttttttaattataggtatatacgtttatgtttggttaattttattttatttttttttagagatagggtgttattatgttttttagatcggttttgaatttttcggtttaagtaatttatttacgttggttttttaaaatgtcgttattataggtgtgcgttatcgtgtttggttttttttttttttatggttaaataatattttattatatgtatatattataatttgtttatttatttatgtagttatggatacggatagtttttattttttggttattgtgaataattcggttatgaatatgggtgtacgaatatttgtttgagtttttgttttttttttaatttatttgggtatatatttagaagtgaaattgttggattatatgttaattttagtttaatgtattgagaaattattatattattttttatagtaagttgaattattttatatttttattagtaatttataggggtttaaatttttttttatttttgatatatattttgataggagatttgggtgtatgaatttgttaaaattatttaatggtatatttagtatttgtatattttatttaaagtaattttatttttattagaaaattaaataaaaagaattataaataaagattgaattttagttaatgatattattaaagataaataaagttaggtattaaaatgatgaaaatagattttatttagtaattattgatagtaggggaagtagttgaattttattttatttgcgtaggggtgattgggtattttaaaggaagaataagggagtaggtaggggagtatgtaggggtttatttagagtttgggaagtgaaaaattaaaaggagtgtttagcgtaaatgtgattaggttaattgtgtttgttagttggtaattagggaagttaggattttatttttttatatagattgggagatatgagttttatttttatgatgattatattttaaaggaatggattttaggtttttgagaaagatatttttaggttgtaggaaatatataggtatatattttagagggatagaggaaggatttgtaattgtagttttttaaagttagtgttttagaggttatatattatgatttatatttaattttagtattttgagaggttaaggtgggaggattatttgagattagtttacgaaatatagtgagatttttttttttataaaaaatttttaaaattagttgggtgtggtggcgtatgtttgtagttttagttatttgggaggttgaggtgggagaattagttgagtttcggaggttgaggttgtagtgagttatgattttgttattgtattttagttgagtgatagagtgagattttgttttaaaataaataaatttttaaaaaggaaggatgttttgatatgttataatatggacgatttttgaggatattatgttaaataaaataaggtagttatagaggataaaagtatgatttcgtttatgtgaggtatttgtagtagttaaagttatagatttagaaagtagaatggtggttgttagttgttggagagaggagggaattggtggttggtgtttaatgggtgtagagttttagttggggaaaatgaaaaagttttggagatggatggtggtgatggatgtaaaatatgaatgtatttatgttatcgaattgtatttttaaaaatggttaaataataaattttatgttttgtatattttattataataaaaaattatggtatattgtttttgtaattttagttatttaggaggtcgaggtatgagaattacgtgaattcgggaggcggagattgtattgggttaagattatgttattgtattttagtttgggcgatagagtaatattttttttaaaaaaaaaaaaaaaaaaaaaaatttattatttattttatagatatttagtaagggtttattagtttggatttggaggataattatgaataagatagataagggtttgtttatgtggggtttattgtcgaagagggagacggttatgtatattaataagttatttttgttaattgaggttagtattgtttagaaaagtcgttaggtttagtttggttatttaggagaggttgttttaagtaagtatcgtatgagtggaagtttaaataaaaatttttttaggtagaggagtaatatgtgttaagatttagtggatttattttgtgattttatttttatatcgtaatgtgaattttttgaggacgaggttaggtttgtttgttttaatattttaaatttagtaggtataaatgaaggaattgtcgtttgttgaatgaatgaatggagaagtatttgtttatttggatttaaaagaagtttttgtagttgaagttgagagatttagaggggttatgggttaggtgatatagaggggttagtaggggttatattatttaggatagggtgtgcgagatagggaaaggtttgcggtagattgatttttttaaatggtgattttggttgttgtttggagtagagtagaaggaggagatgagtcgtttaaatgagggatgagggtagtttgaattaggtggtgacgggggatggggagagaagttaatggattagagggatatttagagggtgggaggtggggtaggtggttaaggagattgaggtatttaggatgttatttagttttttggtttggatggttaattagatggcggtggttttgattggagtggataatagggggaagatttggtttagtaacggggtgtggggaggaggagataaaggttaggagtttagtttggatatattagatggaggggttgtgggtatattaagtagatagttggttgtgtgtgggtggcgtttagagtaggtttgggtttatgtgttgttttatcggtattagtagtatagttatattttttatttttaatttttagtaattatagttgttttttgtttattttggtttttattttttatatgtatatggtgggttaacgtttttttttttgtattatgaggataatagtaataataatatttgttttttgtggggagttgtgagtagtaaatgaattcggacgtgatgttaagaagtatgataggtataggttatagttagttttttttattttttgtttattttttttttgtgtaaatatgtttttagtattttatatggattaggtttggtgttagttattttttaatagtttagttttgaatttattatatttttgtttaaaatattttaagtattttttatttaaaaggttaattatttttagatttttgcgttagttggttttaattttttttttagttattttttttattttttttattagtttttgtttttattttagatatttttatttttttatagtatatattttatttgttcgtttgttttttttttttttttttttcgtttttttttttttaagtattgtttttttttttaggtattttatttaggaatttttttttaatttttgtaggagatgagtttttgtttttttaaatttttatttttttagttttttattattttttgggatttagtgggttttttttgatttgtttgattttttttttttttgatattagtttattgaatatagtagggtatttaggtttttgtatggtggttttttagtgtttggtattgtgtttaatatattgtagggtttggtcgatattggtgtaggaaataagtagaattttaaatgtatattgttatgtcgatttagttttttttttataaaggttagaagataggttagaaggtgatcgtggtttaaggataataaattttttttagaagttgttttgtgagataaagtttaggataagtaaatagagattagtgagggttttgggttttttttttttattagggttatagtagttagtatattttaatttaggttatagattagattggttaggggttttgtttgtttagtatgttgtggtttttggggaatagggtgggtttggtaataaaaaaataagaaattgtaggtgtaagatgggtttttgggaatttttgtttttaggatttttaagtttgtttttttgttattatatgatggttttgggttttagagtttgagagatttggtttgaatttttgttttgttttttggtatggggttagtgttttaggaacgtt

SEQ ID NO: 301 - DNA, 10552 bp, Artificial Sequence
  chemically treated genomic DNA (Homo sapiens)
tttttttttttggatttttttttttaaatatttttttttttgtttaattttgaattaatttataatattttatttaaatattattttttttgaaagttttttttgtttttagttttttttttattttttattatgttttttttgttttttattggtttttagttttatttttaattttgtattagttattttttgattgttagtttgtagttttttttaaatattgcgaggtttttaatggtaggaagtgggttttttttatttttgtttatttaagattttaatagggtttggtatttaataaaagttattgattgataaagatttagtttttatttttaggaatttagttataatgatttgtatatatttaattttattagattataagttttttgagggttggatggttgttttatttgaaatgtttttttttgttttttgtttcgattaaggatgaatattgattgtggtgggaaaattagatgaggtttatgttgttggttggttatttagtgatttttatttttgtttttaggagtttgaattttgtttgagatttttttagtttggggaagtgaattaggattgttttaagttaattagaaaaatgttatttttttttgttagtgatttattaagggatgtatatgtgatgttgatttgggtaatgagataaaagggagtttgaggttggtcgtagtggtttatatttgtagttttagtattttgggaggtcgaggcgggtggattataaggtaggaaatcgagattattttggttaatatagtgaaattttatttttattaataatataaaaaattagttggggtggtggtacgtatttgtagttttagttatttaggaggttgaggtaggagaatagtttgaattcgggaggtggaggttgtagtgagttgagattgtattgttgtattttagtttgggcgatagagtaatatttcgttttaaaaaaaaaaaaaaaaaaaaaaaagagtttgttgagtgtttatgggaaaggtttttttttttataatagagaggtattgggttaagtagttatttttgttttttttttgttttgggtagtgttgggttaaggatatgatatttggaggtgtggtagttattttgtaattatgaggtaataaatataagtatgaaaagttaatatgttgagtaggatgggaggggaaaaaatgaaatagatattgttgagttattgaattaattgttgatttattagtttattaataaataataaaggtaaggtgtggtggtttatagttgtaattttagttttttgggaggtcgaggtggacggattatttgaagttaggagtttgagattaatttggttaatatggtgaaattttatttttattaaaaatataaatagtagttgggcgtggtggtatgcgtttgtaattttagttatttaggaggttgaggtaggagaattgtttgaatttagtgagtttagattattgggttgttgtggtttattttgggtaatacggcgagattttgttttaaaataaatagtaaatgttatggtgttttaagttaatatttagatgtttttatttgtttgtagttgaatattttttgagtggtttatcggataagtgtagttgtggtaaattttattttttaaaaatggttttaataatatttttggttttttaagtttttttagatttttgttattgttttatgaggaggtggagtttgtattttttttttttgaaattgggtgggtttttgtggtttttttttatagtggtaatgatattaagtattttttattaaaaggtattgtagtattttatttggttttttttcgggaatatgttttagaatttaggttttattttgtgaggaagtttaagaaaaatggagacgtttttagtttttagatttaagtgagtttttagttaatagttagtattaatttgttagttgtgtgaaatgttttttggatagggttgattgattttgattgatattataaatagagatgagtttttttgttgagttatgtttaaattgtagatttttgagaagaaaaaaagattgttgttttatgtttataaattttggggtggttttttatatagtagttaatatttggaaatttttttttgtagtgttttttataaatgttaggattgataaaaatagtattgaaataatttgaaggagggatagatgagagggttaggggagggataagggaatagagaagttttttgggaagaggtgtttttttttgtaaaatagttttattgagatataatttatatattgaaagtgtataatttaatgttttttagtatatttagagttgtataattattattataattaattttagaatatttttattattttaaaatgaaattttatattttttaattattttttttaatttatttatgtttttttttattagggttttagataattataaatttattataggatttgtttattttgaatatttttaaatttgttaaagttatgttattaaaaggtattatagtaaagagtattatgtaatttgtattatattgggggtttggtatagaagtggcggtggtggtattaggtagggtttgatttacggggtttagggtgattatgtgggttatgtaaatggtattatataaatatgttatgtttggttaagttttttgtagaaaaggggttttattatattgtttaggttggtttcgaatttttgttttgttttggtttttaaaagtgttgggattataggtgtaagttattatatttagttttttgaatattgttatgtaattgttttttattttttgttaggtgttggtttgaggatttattaggatattaaaatgtgagtatatttatgtattatagttgattttgtagaatttatggaaacgaaaagttagtttattttatatataggttttatattttatattgtattttttaattatgttttattgtggatgtggaattttttgatagagagggttgattgtatttattgaaaataaaataaaataaaataagggttgtattggtggatttatgtagtttaaatttttgttgtttttaggttaattgtatatttagagtttataggaaaatattttttttagtaattttgtttattattttttttttaagttattattatgattagttacggtttgttatttaaatttaaatttaaataaaaatgtggttttttagttatgttagttatatttaaagtgtttaatagttatatgtggttaatggttattatttcggatagtatatatttagaatatttttattattttagaaatttttattgggaatattttgcggaaaaagggggttattataatgtgagtttattttttggaaaaattttgggaaggggataaaggaggtttgtttggtattgtgtaatggtaatttggtatttaatttttaaaaatgtttatttaatttttatttattagttaggtgtggtggtttttgtttgtaattttagtattttgggaggtcgaggtgggaggattgttgtagtttaggagtttgagattagtttgggtaataatagggagattttgtttttataaaatattaaaaataaaataataattttgatgttgtggagttaggatagttttgggttaaaatttttgttttttttagttgtgtaaatcgtgggttttagtttttttatttgttaacggtaggtatttttttttagggttgttttgaggattaagtgaaagtttaagattgtgtttggtatatagtagttttttagtaaatgttttttttttatgttagggaatggtttttttatttcgttttgggtttatgggtggttttgaagggtgggtgtttaggtgttaagttttgtagatggtatatttttgggaaaagtaaggtaattaaaaatagtgagaggttgttttggttaagtttttttttataattttttttatgggttaattgggtagaatttgttatttttttaatatttattgatggtagtggtattcggaagtataatagttgaagtcggagttttgagtggagagaaaggtttgttttttaggtttaaaaagaggttatatatttatggttgtttagtttggtggtgtaggttttgaaattagattaaattggatttaaatttttaaatttatattttaagttatgtgattttgggttagatattttatttttttggttttatgaagtaggaataataataatatcgtttaggttgttaggagtattaaatgaggtaaagtattgaaaacgtttagggattgtgttaaattattaaataaataaaaacggggatgattttatcggtttgatataggggattaaatgagataatatatgaagataagtatacggtaaatgtttaattaatgttgtttatttttatgtttgtaaattgatttaaaggggaggtttttaagaaagatagtggggtaatttgcgcgttgatgtattgtaggagaaaatgtgtagggggttcgttgggattagagtttaattaggtaagcggtagaaaattataaatatttttaggcgtttttggggtagcgtcgtttttttaaaattacgtaaaatttggtttgttaagaattgttagtttttttaaaggaggcgttttacgtattttagtttgtgaaatgggatttaggatttaggtagaggtgcgttttcggtttggggatcgagtattttgtgcgtttcggtaacgtaggaagatagcgttattgatattttagagattagcgggtatcgtttggaggcgtttttattatttggcggtttcgggttcgcgttttatcgcgttataagatttacgttcgaattacgtgattagggtcgtggtttcgtttcgttttcgcgtcgcgcgtcgttttcggtaggggcggaaagcggaagtgtgggagggtttgcggggcgggtttaggaggttcgcgggaggatggagtagtgagcgggtttgggcggttgttggtagcgttatggagacggtatagttgaggaattcgtcgcgtcggtgaggggttattggttaagaggacgggtatggggttaggggaagaaaaggcgggaattggttgaggggatatatttgtgtgggagttttcggagttaagcgatttagtcgatggggtatttgttgagtgaggggggggacgtttggtgggtgagggttcggttgaggggagtatttgttaaggaggttagatttgggatcggttagagggagtattcgttgtggtgagattgtgttgaggaacgtggggataagttagggagagtatttgttgaggtcgggttattcgggggaacgttatttaagtagggatttacggaggtgggggcgaatgttgaagtagggtgagaatttgtgagggatttttttaagggggtggatcgagaattggttaagaggaaggtcgggtggattttttaagggtttgaagttttatttgaggggtgcggtggggggatttgtggaggggaaaagttttgcgtttaaggttgaaagtatgcgaggaaaggttgagggtttagtaagggaggggatggtggagggtagtattttagaggatgttgttggtggtgtttttattgtaggatggtattttttattattgatgtttagtgtttttttaatggtttttatattttttttagttttttagaatttgatattgggaggtaggtaaggaaataagaggatattttcgagatggggagattgaggtttagagtagttgggaagtgtttttttttttatttcgggttattgaattttgttagtttgtgttttttttaggttttagttgttttgtgaatattagtattaaattttagtggtatttggaattgttttagtttaagattaggatggtggttgattttagaaaattttaatttttggattttttttgtggatatttcgggttttttgttattttattatatttggagaaaagtagggattagagatcgaaggagttatgtttttttgaggtttagtgtggttatttttattttatagagacgtttgattttttgtagtagaatgagttttaaagaaggaagtgtttagggtgtggaagtgtagggtaattaagaggtgaagagaagggattgattgtttgggtagtatttttaggggttgtttgagtttggggatgtttgaggtgtataaatattgtagaaggtaaataggtggttgggatgggttttggatttattttagcgtagtgtgttgagattgtaatagtaatgattattatatttatattgtatttatcgggtgttaggtattgttttaagtgttttttatgtgttttgttgaagtatatgaaattgttgatatttgattatttttgaattataaaaattttatttgaatttatttgaattttataataattttgtgtggtagatatttttatatgtttgttttatagatgataaaattgagatatagagggtagtgatttgttgggagaagttatagtaagtaagagatagagttaggattttaatgtttatggggtttggtttaaagtttatgttttttttttttttttgagacggagttttattttgtcgtttagtttgaagtgtagtggcgtaatttcggtttattgttattttcgttttttgggtttaagcgatttttttgttttagttttttgtgtaattgggattataggtgcgtgttattacgtttggttaattttttgtagttttagtagagacggggttttatcgtgttagttaggatggtttttattttttgatttcgtgattcgtttattttggttttttaaagtggtgggattataggcgtgagttatcgggttcggttatgtttttaattgttttattttgatgtttttttaaaagtatttttgttttataggtttttgtgtatgttagtagatatttattatagtattatagtgatttaattatgaatgtatattagttatgtttttttttgaattatgttcgttcgttttttttggttttttttttcgaggttttggtttaattgaaaagaggattaggaatttgagttttgtttttttttttgttttgttttatataattttgagtaaaggattaaagttttttggtatgtttatttttgtattttttggattttaaaaaatgtattaaaagtataagagaagagtattgtaggattgggttttgaagtggttggtgatttttagtttattgtaattagtagattgtttaatttgaagtagattaattttattattacgtgtattagtttattaggataagataaagtgttatggagtgggtggtttaagtaacgtaaatttatttttttattgttttgaaggttagagatttgaaattaaggtattgttagagttgttttttttgacgtttttgtttgattcgtagatggttatttttttgtgtttttatgtttttttttttgtatttgttagtgttttaatttttttttataaggatattagttatattggattagggtatgtttatatgattttattttattttaattatttttttaaaggttttgtttttaaatatagttatatttttaggtggtgggtattaggattttagtatatgaattggggtaagttggggatatagttttattatgtaagattttgtttatttattatgtatagttgttgtaatttatattaaattttgtgtggaaaaagaaatagttatatataaaatgaattttatgggagttttgaaatgggagaaagttttgagaattagttagatttgtaagtgattattttatagatattattatttgtgtttggaaagatataggtgtttttttagaaatttagatggtatgtgtttttaataattttagtgtaggaaatgttttttgtgttcgtgagtttgatatttgtgtgtgtgtgtgattaagtgatgatagattggtgttttatataggagttaataattttaaaaaatgagttgttattagattaatgttatagtggaaggcgtagagtgtatttttgggatgttggttatttatatggttatttgatttaggagaggagtatttattagtatttggtttatggatgttttgttgattaggtttgtttatttatgagtaagtgttgaaatcgtttggaatttggggaagttttagataagagaattgtattattagagttaggttgttttggtaatagtgttttttttgtgaagagttatggtataaaatattattatgaattatttattaaaatatttttatagaaatgttgataatttagtaatattttttaggtgaaattttgttttattgtgataatttaaagattgttgatgaaattcgtgatttttattattatatttgtgaatttattttataaatatattttgattattttttggttattaggtattagagatgtaatagcgttttaagtttaagttgtttttaatagtttcggattaaaaataaataaaaaagtatttagattgttttaaagatgtattcgagtcgttatatgttaaatgacgagttaatgggtgtagtatattagtatggtatatgtatatatatgtaattaatttgtatattgtgtatatgtattttaaaatttaaagtataataataattaaaaaaaaagaaaaaaaaagtttgttaaagtattattagaggtttgtagttgtttattttaaggtagtggtaattttttttgttatgttgtggtttttgaagtagttgaaatagtgatttttgtattttgtaaattatagagagttaatattttaaagaaatatatttgatttttttttgtataagttgtttatataattttgattatatttgagaagtgaggtattgtttaatgtttatataattataatttaggattttattaaaaaaattttggtatatgagatgttcgttttgatttttgagtttatagaagttttagttttgaagtttaagaggagttttattttatttttttttattttgaaggtaggagtttttatgatgttattggtatttaatttttaggattttttgatttttaaaggttattgtgattattttgttttgttgatattaagttaaggtagttttgatttggagtagttttttatttttttagtttatagtttttgatatttataaattataagattgtttttttgagattagtgtttattggtagatatatttgatgtggttagggtttttgttggtttgttttattttttgttttttaattttaatttgttttatttaggaaggtatatatttgtgtgtgtgtgtgtgtgtgtgtatgtgtgtgtatttaagttttttgttgtaataattgatattatttagttagtttaaatttttttttttttataaagaggtttttagtgtgattatttttatattttatcgtttttttagttttttattttttgttgttttttgtagttttaggaagttattgtgtagattatatatatatatatatatatatatatatatatatatatatatatattttttggtaagttttttttttaagtttattagtaatttttagagattttagagttttaaaaaaatgttaatttataattttttatgtttgttatgattgtttagtatagttagaaatttgaattatttggaaattgtgagtagttaagtatttttgatttttgggattagttaaaggtatgtatttatttataggaaggtttttgtgagaatatttgaaatttatagttgtttagtgattttttatttttgattatatttaaatgtatattttttattttttgtttttgtgatatttatagaatttatgtgttttgataaatttataaaaaatttgttaatggaagagtaaaggtttttcgtgttttttttagtttgtagtttaatttatagttatgttttaatttatagttattttatattaaatattttttttgaagagataattatattattttaatttatgaaattttaagatttaaatagattttgaaggatatatcgaatgtttgaatttatagtattttagttatatgattttttttttttttttttttttttttgagatagtttttttttgttatttaagtttgagcgtagtggcgtaatttcggtttattgtaaattttgttttttgggtttacgttatttttatgttttagcgttttgagtagttgggattataggtatgcgttattacgtttagttaatttttttgtatttttagtggagacggggttttattatgttagttaggatggtttcgattttttgatttcgtgatttgtttgtatcggttttttaagaaattttgttttttaaaatagttttaattagtgaagtttgtatagagaagtttttgagatgttaattataaaaaaaagatatattttatgttttagtttttagtaaataaaatgtattttgtgtttatatttttttatttatagg

SEQ ID NO: 302 - DNA, 10552 bp, Artificial Sequence
  chemically treated genomic DNA (Homo sapiens)
tttgtgaataaagaaatataaatataaaatatattttatttgttaggaattagaatataaaatatattttttttttataattagtattttaggaatttttttatatagattttattagttaagattgttttaagaaataaggttttttgggaggtcgatataggtagattacgagattaggagatcgagattattttggttaatatggtgaaatttcgtttttattaaaaatataaaaaaattagttgggcgtggtaacgtatgtttgtaattttagttatttaggacgttgaagtataagaatggcgtgaatttaggaggtagagtttgtagtgaatcgaaattgcgttattacgtttaagtttgggtgatagagagagattgttttaaaaaaaaaaaaaaaaaaaaaaaaagttatgtggttgaaatgttgtagatttaagtattcgatgtattttttaaaatttatttaaattttgagattttatgaattaaaatgatgtaattatttttttagaaaaggtgtttaatgtaaggtaattatgaattgaaatataattatgaattggattgtagattaaggaagatacgggaaatttttgtttttttattagtaagttttttgtaagtttgttaaaatatataaattttgtaggtattatagaaatagaaagtggaaagtgtatatttagatatgattaaaagtgaaaaattattaggtagttgtgagttttagatatttttataaagatttttttatgagtagatatatatttttgattagttttaaaaattaaaggtatttggttgtttataatttttagataatttagatttttgattatgttagataattataataaatatgggaggttataaattaatatttttttaaaattttgagatttttgaaaattattaatgagtttaaagaaggaatttgttaaggaatatgtgtgtgtgtgtgtgtgtgtgtgtgtgtgtgtgtgtgtgtgtagtttatataatggttttttgaaattataaagaataataaagaatagagagttgaggaaacggtgaaatatggaagtagttatattggagatttttttgtagaaaaaaaaaggtttagattagttggataatattaattattataataaaagatttaaatatatatatatatatatatatatatatatatataaatgtgtatttttttaaataaaatagattaaaattagaagataaaaaataaaataaattaataaaaattttgattatattaagtgtatttattaataaatattgattttagaaggataattttatagtttatgaatattaaggattataaattagagaaatggagaattgttttaagttaaaattgttttaatttgatattaatagaataaaatgattatagtgatttttgaaaattaaaaggttttaaaaattaaatattaatgatattataaaaatttttatttttaaaatgaaaagggatgaagtgaaattttttttaaattttagaattgaaatttttataaatttagaagttagaacgaatattttatatgttagggtttttttggtaaagttttgaattgtaattgtataaatattggataatattttattttttaagtataattaaagttgtataaatagtttatataaaggaagattaagtatgtttttttgaagtgttgattttttgtggtttataaaatgtaaaagttattattttaattattttagggattatagtataataaaggaaattgttattgttttgagatagatagttgtaaatttttgataatattttgataaattttttttttttttttttttaattattattatattttaagttttagggtatatgtgtataatgtgtaggttagttatatatgtatatatgtgttatgttggtgtgttgtatttattaattcgttatttagtatatgacggttcgaatatatttttgaaataatttaagtgtttttttgtttgtttttgattcggggttattaaaaataatttgaatttaaggcgttattatatttttggtgtttgataattaagaggtggttaaaatatatttgtgaaatggatttataaatgtaatgatgggaattacgaattttattagtaatttttgaattattataataaaatagaattttatttaagaagtattattgaattattaatatttttataaaaatattttgataagtgatttataataatattttatattatgattttttatagaaaaaatattattattaaaatagtttgattttgataatatagtttttttatttgggatttttttaggttttagacggttttagtatttgtttataaatgaataagtttgattaatagagtatttatggattaaatattggtggatgttttttttttaagttagatggttatgtggatggttagtattttaggaatgtattttacgttttttattataatattaatttaatggtaatttattttttaaaattattaatttttatatgagatattaatttgttattatttaattatatatatatataaatgttaaatttacgaatataaagggtattttttgtattggggttattggaaatatatgttatttgaatttttgaaaagatatttgtatttttttaaatataagtaatggtgtttatgaagtagttatttataggtttggttaatttttaaagtttttttttattttagaatttttataaagtttattttatgtgtaattatttttttttttatatagaatttgatatggattataataattatatatgataaatggataaaattttatataataaaattgtgtttttagtttattttaatttatatgttgaagttttaatatttattatttaagaatgtgattgtatttggagataaggtttttaaagaggtaattaagataaaatgaggttatatgggtatgttttaatttagtatgattggtgtttttataagaggagattaggatattgataggtatagaaggaagaatatggagatatagggagatggttatttacgagttaagtaaaggcgttaaaagaaataattttgataatgttttgattttagatttttagtttttagaatagtgagagaataaatttacgttgtttaaattatttattttatgatattttgttttgttttgataaattgatatacgtgataataaaattgatttgttttaaattaggtaatttattagttataatgagttgggaattattagttattttagaatttagttttgtaatgttttttttttgtgtttttaatatattttttaaaatttaaaaggtataggaatgagtatgttaagaaattttagttttttgtttaagattatgtaagataaggtaaagggggaaataaaatttagatttttaattttttttttaattaaattaaggtttcggagaaagaaattaagaagaacgaacgaatatagtttagaaagaaatataattagtgtgtatttataattggattattatggtattatagtaaatatttgttaatatatatagagatttgtgaaataggggtatttttagagaggtattagagtgaggtagttaagagtatggtcgggttcggtggtttacgtttgtaattttattattttgagaagttaaggtgggcggattacgaggttaggagatagagattattttggttaatacggtgaaatttcgtttttattaaaattataaaaaattagttaggcgtggtggtacgtatttgtggttttagttatataggaggttgaggtaggagaatcgtttgaatttagaaggcggaagtagtagtgagtcgagattgcgttattgtattttagattgggcgatagagtgagatttcgttttaaaaaaaaaaaaagaatatggattttggattagattttatagatattaaaattttagttttgttttttatttgttatgattttttttagtaaattattattttttgtattttagttttattatttgtaaaatagatatatagggatatttattatataggattgttgtgaggtttaaatgagtttaaatgaggtttttatggtttaaaaatggttaaatattagtaattttatatgttttagtaggatatatggaaagtatttagaatagtgtttggtattcggtaagtgtaatatgagtgtaataattattattattatagttttagtatattacgttagggtgaatttaaagtttattttaattatttatttgttttttgtaatgtttgtgtattttaaatatttttaagtttaaataatttttaagagtgttgtttaggtagttaattttttttttttattttttggttgttttgtatttttatattttgaatatttttttttttagagtttattttgttgtaggaagttagacgtttttgtgaaatagaagtaattatattgaattttagagaagtatgattttttcggtttttagtttttatttttttttagatgtggtagagtggtaaaagattcgggatgtttataagggaaatttaggagttgagattttttaggattagttattattttgattttgaattaaagtaattttaggtattattaggatttggtgttgatatttataaaataattgaggtttgaaaagggtatagattggtagggtttagtgattcggagtaaagaaggaaatattttttaattattttggattttagtttttttatttcgaaaatatttttttatttttttatttattttttaatgttaggttttgaagagttgaggaggatgtgaagattattaggaagatattgaatattagtaataaaagatgttattttatagtggggatattattaatagtattttttgaaatgttattttttattatttttttttttgttagatttttaattttttttcgtatgtttttagttttaggcgtaaagttttttttttttatagatttttttatcgtattttttaagtgggattttagatttttagaaagtttattcggttttttttttggttagttttcgatttatttttttaaagagattttttatagatttttattttgttttagtattcgtttttattttcgtgagtttttgtttggatagcgttttttcgagtggttcggttttagtaggtattttttttaatttgtttttacgttttttagtatagttttattatagcgagtgttttttttaatcggttttaagtttaatttttttagtagatgttttttttagtcggatttttatttattagacgtttttttttttatttagtaggtgttttatcggttgggtcgtttagtttcggggatttttatataggtgtatttttttaattagttttcgttttttttttttttgattttatgttcgtttttttagttagtggttttttatcggcgcggcgggttttttagttgtatcgtttttatggcgttgttagtagtcgtttagattcgtttattgttttattttttcgcggattttttgagttcgtttcgtagatttttttatattttcgtttttcgtttttatcggaagcggcgcgcggcgcgggagcggggcggagttacggttttgattacgtggttcgggcgtgagttttgtggcgcggtggggcgcggattcggaatcgttaagtggtgaaggcgtttttaggcggtgttcgttggtttttagagtgttagtggcgttgtttttttgcgttatcggagcgtataaaatattcggtttttaggtcgagaacgtatttttatttgggttttgggttttattttatagattgagatgcgtgaagcgttttttttagaagagttgataatttttagtaaattaagttttgcgtgattttggggaggcggcgttgttttaggaacgtttggaggtatttgtggttttttgtcgtttatttggttgaattttggttttaacgggttttttgtatatttttttttataatgtattaacgcgtaaattgttttattgttttttttaaaggttttttttttaagttagtttgtagatataaaaataagtaatattaattaagtatttgtcgtgtatttgtttttatatattattttatttaattttttgtgttaagtcgataaggttattttcgtttttatttatttaatgatttaatatagtttttaaacgtttttagtgttttattttatttaatatttttaataatttagacggtattattattatttttattttataaggttagagaggtgaagtatttagtttaaggttatatagtttagagtataggtttggggatttaaatttagtttggtttgattttagggtttgtattattaaattggatagttatgggtgtgtaatttttttttgggtttgagaaatagatttttttttttatttagagtttcggttttagttattgtgttttcgaatgttattattattagtaagtattaggaaaatggtagattttatttaattgatttatggggaaagttataggagaaaatttaattagagtaattttttattgtttttaattgttttgttttttttaaggatatgttatttatagaatttaatatttgagtatttattttttagggttatttatgggtttaaaacgggataaaggagttattttttgatataggaggaaaatatttgttgagaagttattgtgtgttagatataattttggatttttatttaatttttaaaatagttttaggaagaagtatttatcgttaatagataagaaagttgagatttacggtttatatagttaaggagagtaaaggttttaatttaggattgttttgattttataatattaaagttgttgttttgtttttggtgttttgtagaaataggatttttttattattatttaggttggttttaaatttttgggttgtagtagtttttttatttcggttttttagagtgttgggattataggtaagagttattatatttggttgatgaataggaattgggtaaatatttttgaaaattaaatattaaattattattatataatgttaaatagattttttttgttttttttttaggatttttttagaagatggatttatattatgatggtttttttttttcgtagagtgtttttaatgaaaatttttgaaatgatgggaatgttttaaatatgtgttgttcgaaatagtaattattagttatatatggttattgagtattttaaatgtggttagtataattgaaaggttatatttttatttaaatttaaatttaaatagtaaatcgtggttaattataataatagtttaagagagaaatggtgagtagggttattgggagaggtatttttttataagttttggatatatagttgatttgggaataataagggtttgagttgtatgggtttattaatataatttttgttttgttttgttttgtttttaataaatatagttagttttttttattagagggttttatatttataatgaaatatggttggaaaatatagtatgggatgtgaaatttgtgtatagggtgggttgatttttcgtttttataggttttgtagggttaattatagtatatgagtatatttatattttagtattttaatagatttttaaattaatatttggtagaaaatggggaataattgtataatagtatttaagggattgggtatgatggtttgtatttgtaattttagtatttttggaggttaaggtagaataggagttcgagattagtttgggtaatatggtgaaattttttttttataaaaaatttagttaagtatggtatatttgtgtaatgttatttgtatgatttatatggttattttggatttcgtggattaggttttgtttggtgttattatcgttatttttgtgttaggtttttagtgtgatgtaagttgtatgatgttttttgttgtagtgttttttaatggtatagttttggtaggtttggagatgtttagaataggtaaattttgtggtggatttgtggttgtttaaggttttggtggaagggagtataggtgaattggaggggatgattaaaaggtgtgagattttattttggggtgatgaaaatgttttaaaattggttgtagtaatggttatataattttgaatatattaaaaggtattgaattgtatatttttaatatgtgagttatattttaataaagttattttataaaaaaagatatttttttttagaagatttttttgtttttttgttttttttttgatttttttatttgttttttttttaaattattttagtattgtttttattagttttggtatttataggaagtattgtaggaagggatttttaggtattgattgttgtgtaagaaattattttaaagtttataggtatagaataatagtttttttttttttttagaaatttataatttgagtatggtttagtaggaaggtttatttttgtttatggtgttaattaggattaattagttttgtttaaaaggtattttatatagttgataggttggtgttagttgttggttggaagtttatttgggtttgaaggttaggggcgtttttattttttttgagtttttttataaaataaagtttgggttttaaagtatgttttcgagggagagttaagtgggatgttgtagtgttttttagtggaagatatttaatgttattattattgtggaggggggttataaaggtttatttagttttaaggagaagggatgtagattttatttttttatagggtagtggtaagggtttggaagagtttggggaattagaaatattattggggttatttttggaaaataaaatttgttatagttatatttattcgataaattatttaggaaatatttagttgtaagtaagtgaaaatatttaaatgttggtttaaagtattatggtatttattgtttgttttgagatagagtttcgtcgtattgtttaggatggattatagtagtttagtgatttgggtttattggatttaagtaatttttttgttttagttttttgagtagttgggattataggcgtatgttattacgtttagttattgtttgtatttttagtagagatggggttttattatgttggttaggttggttttaaatttttgattttaagtgattcgtttatttcggttttttaaagagttgggattatagttgtgagttattatattttgtttttattgtttattaataagttaataagttagtagttgatttaatgatttagtaatatttattttattttttttttttttattttatttagtatgttggttttttatatttgtgtttattgttttatggttgtaaaatgattgttatatttttaggtattatatttttaatttagtattatttaaagtagaaaaagagtaagaatggttatttgatttagtatttttttgttatggggagggaaattttttttataaatatttagtagatttttttttttttttttttttttttttgagacggagtgttgttttgtcgtttaggttggagtgtagtagtgtaattttagtttattgtaatttttatttttcgggtttaagttatttttttgttttagttttttgagtagttgggattataggtgcgtgttattattttagttaattttttgtattattagtagagatggggttttattgtgttagttaggatggtttcgattttttgttttgtgatttattcgtttcggttttttaaagtgttaggattatagatgtgagttattgcgattagttttagatttttttttattttattgtttagattagtattatatgtgtattttttgatgaattattggtaagagaaaatgatatttttttaattggtttagagtaattttgatttatttttttaggttgggagagttttaggtaaaatttaggtttttggaagtaaagatggaagttattgagtagttagttagtagtatgggttttatttggtttttttattatagttagtgtttatttttggtcggggtagagggtaaggggaagtattttagatggaatagttatttagtttttagaaagtttatagtttggtggagttaagtgtatgtagattattataattgaatttttgaaggtagagattagatttttattaattaatgatttttattggatgttagattttattagggttttggataaataaagataaaaaggatttattttttgttattaaagatttcgtagtgtttaaggaaaattataaattggtaattaaagggtgattaatgtaaagttagggataaagttagagattaatagggagtaaagggagtatagtggggggtggggagggggttggaagtaggaaaggtttttagagaagatgatgtttgaatggaatgttataagttaatttaggattaggtaggagaaaaagtatttagaaaaaaaaatttaggagaaggag

SEQ ID NO: 303 - DNA, 6107 bp, Artificial Sequence
  chemically treated genomic DNA (Homo sapiens)
tatatataaaggggtagagtaaagtgaaagtttgaagaaagttgttaagtatggataagatgaaattaatgaattagtagttatgtaaattttaaaagaaaataatatgtataaattaaaaataaaatttagtttgaaagaatttttaagtgtataggttataaaatttgataagagtttgtatttaattttttaaaaaatttaagaatcgattgaataattaagagaaaataattaaaaagagtgagatagagagaattagagataaagaaataatttgaggattaataaatttatttataggtaaattagaaataataagaaataaagtagatttagttaaatatttagttttcgaaaaaaaagaaagggagagagagaaaattattgtgagttaggaagaaaaaataaagtagattattataattagagaaaagataatagatttagatgataaaaagttaattaatatttttgaagaaaagtatttaataaataaaaaggtatttaaaattatataagaaaaaattttttgaatgaagatttaaatttgcgtattataatggtggatatatagtattatatatttgttaaatattatataatatataatattaagagggaattttaatgtaaattttgggttttgggtgattatgatgtgtattaaagagtgtattgtgtttaagaaataaaagatggtcgggtgtggtgatttttgttattattttgggaggttaaggtaggatgattatttgaggttaggagttcgagattagtttggttaatatggtgaaattttgtttttattaaaaatataaaaaattagttgggtttggtggcgggcgtttgtaattttagttgtttaggaggttgaggtaggagaattgtttgaatttgggaggtagaggttgtagtgagttaagattacgttattgtatattagtttgggtaataagagtgaaattttattttaaaaaaagaaaaagaaataaaagatgttggttgatttgtattagtatatatttttgttaagttttttaatattttagttaaagaaagttttttttagtagtttggaaagaagagtaagttatttaaaagaggataaaggattggttgtttttatatttttttaaaataatatttaatgttaaaggggtaagggaggaaaattaatcgagtttaggttaaagggaagtaggatggagatataatgtgtttattttgatgttattgtaatataatagtaatagaataatattttgaaagtggagagtattgatagatgtagtatgtgggattatatttttatagagtttatttagtttattaataaagaaagtaggaatgagatatggtggtagaaaggtttggaggtgtataaggtatttttttaaatggagaattaagaagagattattgagggtttatggttatagaaattaaaaattttaaatttaattatgtaaaatttatataattagggaaacgtgagaggtgagttgaagtgaagtggagtgagagaggtaattggtttatgtattatagtagagttattgatattgtttgaaattaaagtttatggtttagaagaaatgacgaaaattgtttattattgttatttttttttttttttaattaaagtggggttattttagaaatgatatatttgtggtaaagaattatttttataaaattagtaattttttagattttattttagaattttttattttgttaaatttaagtagaattaaatattatatttaatatggataaaatgtataataaatgtattatatttaaaatgatgtttatttttatatttattgttatgtgtatatatagaaagagataattttgtaagggttatttaacggtaatgatgattatgtttgaaatttgggatgtttttattttttttgtgtttttatttttttaagggattgtttattaggaatatttgttattgttattaaaaaaattatttttttaaattaaatattattttttagagtagttttaggtttatagtaaaaatgagaggtaggtatcgaggttttttatatatttattgattttatatatgtatagttttttttattattaatagttttattagattggtatatttgttataattgatgaatttattttgatatattataattatttaaagtttgaagtttatattgatgtttttttttggtgttgtatattgtatggtgtttaataaatgtatagtgttgtgtatttattattgtaatattatatagtatatttttatagttttaaaaaatttttgttttttttttatttattttgttttttttattagtttatggtagttattgatttttttattatttagatagtttggttttttttagaatattatttgttgaaattatatagtatgtagtttttttagagggttttttttatttggtaatatgtatttagattttatttatttttttttataatttgttagtgtattttattttagtgtggaataatattttattatattgatgtataagagtttatatatttatttatttattgaatgatattttgtttgtgtttaagttttggtaataaatttagtaaataaagttagcgtaaatatttgtgtgtagatttttgtgtgaatataaggtttgaatttttttgggtaaatattaagaagtataattattgggtattattttaggtaaatattaattattttgggtaaatattaagaaggataatttttttataattatttatgttgtaagaggatgtttagttttataagaaattgttaaattgttttttatagtggttgtattattttgtatttataatagtaatgaatgagtatttttattgttttatatttttattagtgtttattgcggttagtgtttcgaatttgggttatattgatattttattgtttttatttgtatttttttgatgatatataatgtgaattattttttaggttaggtatggtggtttacgtttgtaattttagtattttgggaggttaaggtaggtagattacgaggttaggagatcgagattattttggcgaatacggtgaaatttcgtttttattaaaaatataaaaaattagtcgggtatggtggcgggcgtttatagttttagttattcgggaggttgaggtaggagaatggcgtgagtttaggaggtagagtttgcggtgagttgagatgatcgggttattgtattttagtttgggtaatagagtgaggtttcgttttaaaaaaaaaaaaaattattatatgatattaagtaatgcggaaggtgatttaaagggggaaaggaatatagtagtgtaaaggaaggaggttgtagatggatttagaattttttttttatttttattaggtgaaagtttgagaaaattgtaatttttgtgtaggttgggtttgttttgtatatattggttttttagtgtttatttttaataatgttgataattttgaaaattatttgtagatattttgtaggttttattttaggaataatggttattttttcgggtagttgaagtaaaattaagtttaatgataagtaaatataattattattaaaattttttatttatgtttgttaaagtaatttaagtatgatttgagaaggattttgtattttatatttgagtttttgtggatgaattgtaatttagtttaataggtagataagattgaaaatttaatttaggagtatgtgtttttaataatagttgagttttggttaattttagtggttatattttaattatttatatattgttgagtgtttaaattgtgtttaaagaaggtaaaagttaatttgtaattaatttagttgtttttttgttttatttttaatttttgtatgttatttttttttttttgtttataaatatgttttgattatgaggtatttttggagtttttgaattcgttgtgattttggaagttgttttattcgtaaattatttattatttaattaaattgttttaaatttaattttgttgaagtttttttttaataggtttagaaaaaataatggtaaaaatgaatgaaaatttaataattttggaagtagaaaaggttgggggttttaataagtgtaaatagttttatttttatattttttttatggtaattataatttagtatattatatatatatttttttgtttttcgtattttggtttagggtaaagttttttaaaataggtattgttaattagtgttattaagaaggtttggatgtcgttttgtgggaatattttaaagaggaatgtttaaaaggaaaagggggatgggttgggagaagggtattaggcgggtattttaaaattatttttagggttataggtttaatttatttggttgtggacgttagagtcgttatggtaagaaggaagtaaagttttttgtaataattaaagtttttagaagtagcgtgttttattgtttattagtgcgtcgtgaagtttggtgtttatttatagggttttttttagtattgtttaggtttttcgagtgttttagtatagtagtttggagtttgttggtttggtgattaagatatattttagggaatatgttatgtagtggagtttttttttcggtattgtatagtaaaaggaaagggtcgttgggtgtttgtgggttttgggtagttatagaagttatcgcgttggcggggaggagggggatcgatgcggtttatgtttcgggtagttttattttttttgtttgcgaagggtttttgttcggcgggaggagagaggcgcgttttattcgggtttttttatatttgtcgtcgtttgggtcgatttcgcgggtttcgttcggcgttttagtcgattttcgtttagtttcgggtttatgggcgcggttagtagggcgggttagggcggcggggcgcgatattgggaggaagtgcgggtcgtttgttcgggcgcgttaaggaagttgtttaaaatgaggaagagtcgcgggttcggcggttgaggttatttcggcggcggttggagagcgaggaggagcgggtggtttcgcgttgcgttcgttttcgttttatttggcgtaggtaggtgtggtcgcgttttttattcggtcgggattttttggtaaggagaggaggttacggggaacgacgcgttgtttttatgtttttttttgttttatttttatcggtcgaggtaaaagtgttgaaattatgtgaataaaatataggtgggtttcgttagtttcgtttttgaatttattcgcgttcgggatttagaagttgcgtcgggagagaggggtttaggtttgggcggaggggacggaggttagatcgtgcggaaagtgattcgggtattttagggcgtttaggtttttagggagcgcggaaagtgcggtcgcggttcggttttcgggagacgcgggattgggattaggtatagcgcgaggaagtcgattttggagttagaatatttttttttggttatttatacgaatttattggaaaatgtcgtagtgtttattaaagttatttaaagtagaaatgtttagacgttttatgagtttagataaattttttattataaaaagaaatagtagttgtatttaaataataatttttttgaattattattaaaatttagtataattatttttgtggatatatttttattgttaagtaatttatttagttaatgaatttggagagtaagaaagttttatgtagtaaaatgtaaatttgagttaagagttaagggtgtttttttttgtttgtttgtttgtttttggtaatgtggttttaaaattttaagtttatttaaaaattatataaatgtaatttatttttttgttggaatgtttaaggattagaaagataattggagaagtgagagtttgaatttttttttacgttggaaatagtgttgtaaaatattttttgagttttgtttgatttagtaaagatttagtcgaatttaagtagagtttaaagtattgtagcgtgtagtaaaaaaaaaaaagagttgaagatgttgtgttatatttgatttttggtattaaaaataaaaaaaggaattatttaattt

SEQ ID NO: 304 - DNA, 6107 bp, Artificial Sequence
  chemically treated genomic DNA (Homo sapiens)
ggattaaatggtttttttttttatttttaatattaagaattagatatggtataatatttttaatttttttttttttttattatacgttgtaatgttttgaattttatttgagttcgattgaatttttgttaagttaggtaaaatttaaaaaatattttgtaatattgtttttaacgtaaaaaaagatttaaatttttatttttttaattgtttttttagtttttgaatattttaataaaagaatggattgtatttatatagtttttaggtgggtttaaggttttggagttatattgttaaaaatagataaatagataaaaagaaatatttttaatttttaatttaaatttatattttattatataaaatttttttgttttttaagtttattggttaagtaaattatttgataatgaaaatgtatttataagagtaattatgttaaattttagtagtggtttagaagggttgttgtttgaatgtaattgttgtttttttttgtagtaaaagatttgtttaagtttataagacgtttggatatttttattttgagtaattttgataaatattgcggtattttttagtggattcgtgtaaatggttaaaggaaaatgttttagttttaagatcgattttttcgcgttgtgtttgattttaatttcgcgtttttcgagggtcgggtcgcgatcgtatttttcgcgttttttgggggtttgggcgttttggggtgttcgggttatttttcgtacggtttgattttcgtttttttcgtttaggtttgagtttttttttttcggcgtagtttttggatttcgagcgcgggtaggtttaggagcgaagttggcggaatttatttgtattttatttatatggttttagtatttttatttcggtcgatgaaggtagaataagaaagggtatgaaagtagcgcgtcgtttttcgtaattttttttttttattagaaagtttcggtcgggtaggggacgcggttatatttatttgcgttaggtgaggcgagggcgggcgtagcgcggggttattcgttttttttcgttttttagtcgtcgtcggggtggttttagtcgtcgggttcgcggtttttttttattttgggtaatttttttaacgcgttcgggtaggcggttcgtatttttttttagtgtcgcgtttcgtcgttttggttcgttttgttgatcgcgtttatgagttcggagttgggcgggaatcggttgaagcgtcgggcgaggttcgcggaatcggtttaggcggcggtaggtgtagaggagttcgggtggggcgcgttttttttttttcgtcggataagggtttttcgtaggtagagaaagtggggttgttcgggatatggatcgtatcggtttttttttttttcgttagcgcggtggtttttgtgattgtttaggatttatagatatttagcggttttttttttttgttatgtagtgtcggggaagagattttattgtatggtatattttttggagtgtattttggttattaaattaataagttttaagttattgtgttggagtattcgggaggtttgggtagtgttgagagggattttgtaggtgaatattagattttacggcgtattagtgggtaatggggtacgttgtttttgaaggttttaattattataaaaggttttgttttttttttattatgacggttttgacgtttataattaaataaattaaatttatagttttaagaatggttttgagatattcgtttgatattttttttttaatttattttttttttttttttggatatttttttttaaaatgtttttataaaacggtatttagatttttttgataatattggttggtagtgtttgttttaaaaagttttattttaagttaaaatgcgagaagtaaaaaaatatatatataatgtgttggattgtaattgttatggagaaaatatagggatgggattatttatatttattggagtttttagttttttttgtttttagggttattggatttttatttatttttgttattattttttttaaatttgttaaaagaaaattttagtagaattaaatttaaagtagtttaattgagtaatgaatgatttgcgaatggggtagtttttagaattatagcggatttagagattttagggatgttttatggttagaatatatttatagataaaaaaagggaagtgatatatagaaattggaggtaaggtagagaaataattggattggttataggttggtttttgttttttttgaatatagtttgaatatttagtagtgtatgaatggttgaagtatggttattgggattggttaagatttagttattgttaaaggtatatatttttaaattaggtttttaattttgtttgtttattaagttaggttatagtttatttataaggatttaaatatagaatatagagttttttttagattatatttaggttgttttaataaatataaatggaagattttgataatggttatatttgtttattattggatttaattttgttttaattattcgaaaaaatagttattgtttttgagatggagtttgtagaatgtttatagatggtttttagagttgttagtattattggagatgaatattaggggattagtgtgtataaagtaaatttagtttgtataaagattgtagtttttttaggtttttatttgatggaaatgagggggaaattttagatttatttataattttttttttttatattgttgtgtttttttttttttttgagttatttttcgtattatttagtattatgtagtaattttttttttttttgagacggagttttattttgttgtttaggttggagtatagtggttcgattattttagtttatcgtaagttttgttttttgggtttacgttatttttttgttttagtttttcgagtagttgggattataggcgttcgttattatgttcggttaattttttgtatttttagtagagacggggttttatcgtgttcgttaggatggtttcgattttttgatttcgtgatttgtttgttttggttttttaaaatgttgggattataggcgtgagttattatgtttagtttaaaagatggtttatattatgtattattagggaaatgtaaatgaagatagtaagatattagtatggtttaaattcggaatattgatcgtagtgaatattagtgaggatgtgaagtaatagaaatatttatttattgttgttgtgaatgtaagatggtatagttattgtggaagatagtttggtagttttttatgaaattaaatatttttttataatatgagtaattataagaggattgttttttttggtatttatttaaagtagttggtatttatttaaagtagtatttagtaattgtgttttttggtatttatttaaaggagtttaaattttatgtttatataaaaatttgtatataaatgtttacgttggttttatttattaagtttattgttaaaatttggatataaataagatgttatttagtaagtgaatggatatataaatttttgtatattagtgtaatggaatattgttttatattaaaatgaaatgtattagtaagttatgaaaagaaatggatgaaatttaaatgtatattattaagtgaaagaagttttttgaaaaggttatatattgtataattttaataggtgatattttggaaagagttaaattatttggatagtaaaaagattagtggttgttatgggttggtggggagggtaggatgaatagaaggagaatagagattttttagggttgtgaaagtatgttgtatgatattataatggtggatatatagtattatatatttgttaaatattatataatatataatattaagagggaatattagtgtaaattttaggttttgggtgattatgatgtgttaaagtaggtttattaattgtaataaatgtattagtttgatggggttgttgataatgggaaaggttgtgtatgtgtgaggttagtgggtatatgggaaatttcggtatttgttttttatttttattgtgaatttaaaattgttttaaaaaatagtgtttaatttaaaaaaatagtttttttggtaatagtggtaagtatttttaataggtaattttttaaaagaataaaagtataaaggaaatagaaatattttaaattttagatataattattattatcgttaggtgatttttataaaattatttttttttatatgtatatatggtaatagatataaaaatgggtattattttaaatataatatatttattatatattttatttatgttaaatatgatatttaattttatttaaatttaatagaataaaaaattttgaaatgggatttaaagaattgttgattttatagaaatgattttttgttataaatgtattatttttgaaatgattttattttgattaaaggaaaagaaaagtgataataataagtagttttcgttattttttttaaattatgagttttaattttagatagtattagtaattttgttatgatatatgaattaattattttttttattttattttattttagtttattttttacgtttttttagttatatgagttttatatagttaagtttaaaatttttgatttttgtaattataaatttttagtggtttttttttagttttttatttaaaaggatattttatgtatttttagatttttttattattatattttatttttattttttttgttgatgagttggatggattttgtgaagatgtgattttatatattgtatttattaatgttttttatttttaggatgttattttgttgttgttgtattgtagtgatattaaggtgggtatattgtgtttttattttatttttttttggtttagattcggttgattttttttttttgtttttttggtattgaatgttgttttggagaaatgtgagaatagttagttttttgtttttttttaggtgatttgtttttttttttaggttgttggaggaaattttttttaattgagatattaagaaatttgataaggatatatattgatatagattaattagtattttttatttttttttttttttttgagatggagttttatttttgttgtttaggttggtgtgtaatggcgtgattttggtttattgtaatttttgttttttaggtttaagtaatttttttgttttagttttttgagtagttgggattataggcgttcgttattaagtttagttaattttttgtatttttagtagagatagagttttattatgttggttaggttggtttcgaatttttgattttaggtgattattttgttttggttttttaaagtgatggtaggagttattatattcggttattttttattttttaaatataatgtattttttaatgtatattataattatttaaagtttaaagtttgtattgaggtttttttttggtgttgtatattgtatggtgtttaataaatatataatgttgtgtatttattattgtaatgcgtagatttagatttttatttaaagaatttttttttgtgtgattttaaatatttttttatttgttaagtgtttttttttaaggatattaattaattttttattatttaagtttattattttttttttgattgtagtaatttattttgttttttttttttggtttatagtgatttttttttttttttttttttttttttcgggaattaaatgtttagttgggtttgttttattttttgttatttttaatttatttgtaggtaggtttattggtttttaaattatttttttgtttttggttttttttattttattttttttagttatttttttttggttatttaatcggtttttgagttttttaaaaaattgaatgtaggtttttattaaattttgtagtttgtgtatttaaaaatttttttagattggattttatttttaatttgtgtatgttatttttttttaaggtttgtatagttgttagtttattgattttattttgtttatatttggtagttttttttagatttttattttgttttgtttttttgtgtgtg

SEQ ID NO: 305 - DNA, 7934 bp, Artificial Sequence
  chemically treated genomic DNA (Homo sapiens)
agttgttgggttattgggtatatgtatgtttagttttagtagatattgttagttttttgaagtgtgttaatttgtatttttattagaaatgtatgagagtttcgattgttttatatttttgttaatatttggtattgttatttttttaagtttagttattttggtgattaaaattattgatttttataaaaattttgtgatgtattggtattgttataatttttattttatagataagggggttggggtttagtaaggagaagttatttattttagattacgtaggatgttagtagtaagtgggtaatagtaggtttgtgtgatttttttgtttttgtggttgtatgaattttttattttttttttttgagatagagttttattttggtatttaggttgaggtgtagtggttttatttcggtttattgtaatttttattttttggatttaggtgatttttttattttagttttttgagtagttgggattataggcgtatattattacgtttggttaatttttgtattttttgtagaaacggggtttcgttatgttgtttaggttggtttttaatttttgggttttagtgatttgtttgttttggttttttaaagtgttgagattataggtatgagttatagcgtttagtttgtatgaaattttaaagttagaatatttgagtgtgttaaataattttttatttttataattattttttatagcgtttatttttatttgatagtagaaatataatttggttattttttggtaaatttagttaagtaagtgtatgattatttagttattttagggaatatttagttgagtgttttgtttttttatttttatttaggggtatggttgtattttgtggaggttatgtggttatggtatggagtgggaagtgagggggttaaggttgtttggtttttggttatcgttatttttttttattgtttagggaggtaggtagattttatttttgttagttgtgggttgtcgtttttggtttttattgtgtttatagatgtttgtattcgtgttatggtttttggtttggattgtggttttagtgttttttttattaggtttattattatagaagtttttttttggttatttgtttttttttagtaattttatgttgttttagggttttataatatatgttaatgttttttgggatttttataaattaggtatgggtttgagatgtttttagggttttttgtttaggtatatttagttgttatttttatttgattgttattatatttttttattatggaagattatttagattttatttatagatagattttttttttttttagaatttttaaatttatttggggttttaatttttttttatttttgggttgaggggatgggagaatgagagagagtttttttttagagatttatattagaagttaatagtatgtagtgtttttttttttattttaagtttggtatatattttttttttaatttttttaatagaggaaggtgaggtttagagaggtgaagtaagttatttaagattatataatagaggtaggtggtttgattttagagtggttatgtttatttttgtattagaggattaagattgagagagttgatatatagtaggatgtagttaggggattttttattatgtggattgaatatttttagtttatatgttgttttatgggatggaatatatgtttaagtttatagtttgttttatggatgggtgtataagaaatggaatgagaattgaattttgggttgtaaagttttgtttgtttgtttattttgagatggatttttgttttgtcgtttaggttggagtgtagtggcgtgattttcgtttattgtagtttttattttttgggtttaagtaatttttttgttttagttttttaagtagttgggattataggcgtttattattatgtttggttaattttttttttttttttttttttttttgtatttttagtagagacggggttttattatgttggttaggttggttttaaatttttgattttaagtgatttttttgttttggtttttttaagtgttgagattataggcgtgagttattgcgtttagtcgagggtttcgttttagatgtattgatagggttgttttttataggaatttttttgtgaatgttttatagtaatgaagattttaatgaagatttaaaaaggaagattatttttggaattgaatttattataaaaattggatttttttatttggaatatttgaatttaaggttttagtttttttggaggtagtatgttgggaatagttgtaaattagaaaatgtttttgtatttgaggaatggggttaagattgattgtttgggttgtgatggtagatacgtagttggagttggagtgacggttgggaaagtttttttggttttgttttttttttttgtaggataaggggttttgaatattttttggtgtggagtatgtggagtgattggagtaagggtggagttttagtttttttagggttagttttggaaatataggtatttttgttttttatatttatatatgtatttatacgtattaaggggattttgtgggggttagttttttttgatttggggtgattattatggataaatgaatggagaggagttatttttagtttgttttatcgtgttatagttattttggttttttcgagtggaggtttgagagaaggtagggttgatttagaaagtatggcgttaaattagttatttttgacgaatatttttggtttttttttggtagtgttttattattgatattttattatataggtttatgtatttattttgggtttgaggattatttggagaattggtttaaagggtagaaaaatttgtttttagggagttattagattgagagtggatttaggaatttgtattttttttgagttaatttatttttaaagttaaaaaatttgaatatgtaatatatttatgtgaattgatatttaaaagatataaaggggtataaggtgaaaaattattttaatttattttttagtgatttagttttttttttttgaggtgattaattttttgtgtattttttttgagataatttatatatatagtattatatataagtaaatgaaatatgttttatttatttttttgagattgggttttattttattatttaggttggagtgtagtgatattattttggtttttcgtaatttttgttttttgggtttaggtgatttttttattttaatttttagagtagttgggattatacgtttatattattatatttatttaatttttgtttttttgtagagacggggttttattatgttgtttaggttggttttaaatttttgagtttaagtgatttgtttatttcggttttttaaagtgttgagattataggcgtgagtttttacgttcggttttaaaatttgttttaaaagtagatattttttggtgattttaataaagggggtttttagatatatttggaaaaatatatttttatttttatgttagattttgtgttgggttttcgggttgtgtgatttgatattgtatagttttgtttagaatgtttaaagagagttaataaggtattattttttatgttataggcggggagtaaaggggttttagtgggttttgtttaggaggtttgaagttagagttgttgagggtagggttgtgttgtaaagaaaatgtttgagagttgtaggcgttttattttttgttattagttgtggtatttggtagatattggataggtttgtagataaagatttggtaatttaaggagttgtttggtttttttgtttagttttattttagaggtattgtatatttttggtttttttagggggttttgtgtggaagtattttttgtttttttggtgttagggatattattacgtgtttgttggttaggcgagttcggcgtttagttttttaggatggggagagtaatgttttcgagtagaatagggtggggtttttagattatttttttttttttatagttggttttattttatcgattttattaaagtttttttgggagtattttagagaagagttacgtttaggtcgggttttggttgtttggtttacggcggaatttttagtattacgtttcgtacgtcgggtttaaagtatgtttagtgaaggagtaggtatttattgttagatggagttatttttttagatttggggtttttttataacgatggttatgtttggtatggaagtttttttagaagttaatagtaggaaataagggttaatagtatttaattgtggagtaaggtttaaattttagttttgttatttaatcgtttcgaatttgtttttttattgtagaggcgaaaaggttaatattattttatttcggagggttatcgtggagaatggaagttggataagttgtattagtttagtagtaaaatatatatatataagcgttttatttttattttattttattttaggaatgaatatatatattcgcgcgcgtatatatattttaggaatgaatatacgcgcgtatatatatacgtagttttttttaggagtgaatatatatatatacgtttcgttttgttgtttttaggaatatatatagagacgtatatattcgttcggttttgttttttttaggttttttaattggggttttttattcggtttagggtatcgttgtttgaaagatttttttaggttagtcggggttcggtatttagttgacgagatagcgcggcgtttttagagttggggagaggcgaaaattttttcggtttttcgatttttcggttagtcgttttcggtagttttttgtcgtttttcggtttgggttcgtttagtcgttttcggtttgtcgttaggcgatttcggcggttagtttagtcgcgatgtgacgtcgcgcgtttcggggttttcggcgtttgcgtttttttttataaagtagacgtcgcgtcgcgttgcgacgttgtagtggtttcgttttcggttttttttttttttcgttaacgtttttcggttttcgttagtttttcgtcggtcgtttttttaatatcgaatatcgtgagtagtcgtttattgaattggaaagggtcgtggttatcggattgcgtgtcggttggttttatcgttgcggtttgggtttgttcgcggcgggcggtgattgggtttggttttttttcgggttcggtggatcgcgttgtcgattttgtttttcgggagatattattaggtttcgtttatttgtttcgttttcgatttagcgaggttttttttggtcgggcgtttttacggcgttttataagtgagtcgaatttcgggttgggttttttttgtatcggtcgagcgttagtcggcgcggagttcggttgtaaggtttaggttgcggtcgggggttttttttggttttaagtttgttgtttcggggattagggcgggggtggcggcggggttgtgaatgggggttttttggttgtcgtgagcgtgggcgtgtgtcggtgtttggtttttgttgtggtcgggagggagagttgcggtggtggtttgaggtcgttcggtttttggtttttattttttttttatcgtgtttggcgttattagttatcggtcggttttggttaatcgtgtgcgggcgtcggttttttgtatatagtcgtttgttttatttgaatattttttagcgttgttttgttatgatttggagtcgttgagtagatattatcgttagagtggtgtgatttgtaggagttttaattgtgtataatttaattttaggtatttggtttttaaagaaataggacgtttatttgttttgatttatttttaatggaaattttacgtttgggttttagggatatgtattttttttttagagcgtgatagtagaatgtattcgttttatagaataatatcgttttttttattgtgtagtttaaaaagtagtgttagaatttcgggttatttaaagcgtaggggttttttttttatatgatgtgatagaattcgttttatgttggttatggagaattatttataagtgtaggagtttttaggtttttttttttagaatggaattgttttgaaagtattttaaataaatattttatttattattatttaaaaattttgtattttattttattgtaatattaaaatttatttttgagtttagtattattaagtgtatcgaattatagattaatcgattgattagttgttatttagtaaggttttaatttttttaagagtaatttaatttataaatttgattatgattaagtatttattttgagttatttgaaagaaatatgaaacggtcgttttgtttttagagtaattttaattaattgtattgttagatttgtgattttgtattgtttattttagtattatttaatataaaaattatatgtttaaatgttttataattaaaaattgggtttaggttaaaatatttttttttggagatattttttgttgtggttttgttataggaagggttttttattttgtatttttttttattaagtagggataattgtattattggtaagcgttaagtaatatggagaagtagatatgtttgtgaatcgtaaagtgaaatttgattttttttaattatggatgagtgagagtaggatattttagtggttggttttaaaatatgttttatttttttgttttttttgtttaataatttgtttgttttggggttggcgataattgttttagagaagttgaatgaatattttaatcgatgtaatgggttataagtttttgaatataaaatgggtgtgatgtatgttttaaatgttaaatgatatatttttgggaaaatatatgcgatttgtaatataatatatttagaaaattttagaggtgttataagttaatagtgatattatcggattatgaatatttgagaagtatgggttttttaaaagttgtatgtgagttttaagaggttttgaattaatttgtataaggtattgttattttttttgttgttgttgttttttttgtttgtatgtttttttttttaaaaaaagaatttgaagatggtaagaaattgttggatttttaattttaaatgtttttttttttttttttgttagaatttaagttttttgaaattaaatgtttaattttttatgtaagattatattttttttttaacgatttataattaatttgaattaataaatgcgtttttagagtaagtaaaaggttattattatggagattttgttaagagattttaaagttggttatttggatagttagtattgaaagataaaaagggttttgaaatgaagtttttaagtagatttagggaattgtatttatatttgtttatttttaaattattttatttttttgtatatggttttgtattgttttagatataaatgagtatattttgatgtattttttggatttgaatttatttttataggtaggatttattgtggggaaaatttttattttatttagtagcgttgtttgttttggattgattttttttaggttcgtatgtagttaattgtggtagttaattgtttagatggagtttagtatttagtgggagacgaaaggtaggtagaaagtaaatataaatatgtatgttttattaaatttatattaatagtgagtttagtagggtaggttttaaaagtttttgtttttagtagttatattttgaaaaaattttaatagaaatattcggagattaatttgtgaataattgtttataatagtgttttatagggttatgtattgtaggtttttagaattttgtggttaataagttagagttttttgatggattgtagttgatgaaatgttatgtagaatttttttttttaaattttatatttaatgttttttttttttaga

SEQ ID NO: 306 - DNA, 7934 bp, Artificial Sequence
  chemically treated genomic DNA (Homo sapiens)
tttaaaaaaaaaggatattaaatataaaatttaagagagagagttttatatgatattttattaattatagtttattagaaggttttaatttattgattataaagttttaagaatttataatatataattttgtaaagtattgttgtaagtagttatttataagttagttttcgagtatttttattaaaatttttttaaagtataattattaggaatagaagtttttaaggtttgttttattgaatttattattggtataaatttaataaaatatatatatttgtatttgttttttgtttgtttttcgttttttattgaatattggattttatttgaatagttaattgttataattaattatatgcgaatttgaggaaggttagtttaaaataaataacgttattaaataagatagaaattttttttatagtgagttttatttgtgaagatgagtttagatttaaagagtatattagaatatgtttatttatgtttgaggtaatgtaagattatatataagagaataaaatgatttaaagataagtagatgtgagtataattttttaaatttatttaaaagttttattttagagttttttttattttttagtattgattgtttaggtgattaattttgagattttttggtaagatttttataataataattttttatttgttttgaaaacgtatttattaatttagattaattatgagtcgttaggaaaaagatataattttatataaaaagttaagtatttaattttaaaggatttgagttttggtaaaaaaaaaaaaaaaggtatttaaaattaaaagtttaataattttttattatttttaaattttttttttaaaaaagaaaatatataaataaggaaaataataataataaaaagaatagtaatattttgtatagattaatttaaggttttttaaaatttatatataatttttaaaaggtttatgttttttaagtatttataattcggtgatgttattattaatttatggtatttttgaagttttttaggtgtgttgtattataaatcgtatatatttttttaaaagtgtattatttggtatttaaaatatgtattatatttattttatgtttaaagatttatgatttattatatcggttaaaatatttatttagtttttttgagataattgtcgttaattttaaagtaaataggttgttaggtaaaggaagtaaaaaagtaaagtatgttttaaaattagttattgaaatattttatttttatttatttatagttggagagaattagattttattttgcgatttataaatatgtttgtttttttatgttgtttagcgtttgttaataatgtagttgtttttgtttaatggagaaggatgtagagtagaggattttttttgtgataagattataataaaaggtatttttaaaagaaaatattttaatttgagtttaatttttaattataaaatatttaaatatgtaatttttatattagatagtattgaaatgaatagtgtagaattataaatttaataatgtagttgattaaaattattttaaaagtaagacgatcgttttatattttttttaaataatttaagataagtgtttagttatagttaagtttgtggattgggttatttttaagggagttgagattttattaaatagtagttggttaatcggttaatttgtaattcgatgtatttggtaatattaaatttaaagataagttttagtgttatagtagaataaagtgtaaaatttttaagtaataatggatgaaatatttatttgaaatgtttttaaaataattttattttaaagaaagaggtttaaaggtttttgtatttgtaaataattttttatggttagtataaagcgggttttattatattatatagaaaaaaaatttttgcgttttaagtgattcgaaattttgatattgttttttagattgtatagtggaggagacggtattgttttatgaaacggatatattttattgttacgttttaaaggaaaaatgtatgtttttaaaatttaaacgtgaagtttttattaaaagtgaattaaagtaggtagacgttttatttttttaaaagttagatatttagagttaagttatatatagttaaggtttttataagttatattattttgacgatggtatttgtttaacgattttaagttatggtaaaataacgttaagaaatatttagatggagtaggcggttatgtgtagaaagtcggcgttcgtatacggttagttaggatcgatcggtagttagtgacgttagatacggtggagaaaggatgggagttaagaatcgggcggttttagattattatcgtagttttttttttcgattataataaaagttagatatcgatatacgtttacgtttacgatagttaagggatttttatttataatttcgtcgttattttcgttttggttttcgggatagtaggtttaagattaagagaggttttcggtcgtagtttgggttttgtagtcgagtttcgcgtcggttgacgttcggtcggtgtagagaaggtttagttcggggttcggtttatttatggagcgtcgtgaggacgttcggttagaggaggtttcgttgagtcgggggcggggtaggtgaacggaatttggtagtgtttttcgaagaatagggtcgataacgcgatttatcgggttcgaaagaaggttaggtttagttatcgttcgtcgcgggtaggtttaaatcgtagcggtgaggttagtcggtacgtaattcggtagttacgattttttttagtttagtgggcggttatttacggtgttcggtgttaaggagacggtcggcgggaggttgacgagagtcgggaggcgttagcgaaggaagagaaaaatcgaagacgaagttattatagcgtcgtagcgcggcgcggcgtttgttttataggagagggcgtaggcgtcgaggatttcggggcgcgcggcgttatatcgcggttgggttggtcgtcgagatcgtttgacggtaggtcgagaacggttgggcgggtttaggtcgggaggcggtaaggagttgtcgggggcggttggtcgggggatcggggggtcggaagagttttcgtttttttttagttttgaaagcgtcgcgttgtttcgttaattgggtgtcggatttcgattggtttagaaaggttttttaggtagcggtgttttaagtcgagtgaaagattttagttaaaaagtttggaaaaaataaaatcgggcgagtgtgtgcgtttttgtgtgtgtttttgggaataatagaacggggcgtgtgtgtgtgtgtttatttttggggggggttgcgtgtgtgtgtacgcgcgtgtgtttatttttgaggtgtatgtgcgcgcgcgggtgtgtgtgtttatttttggggtggggtggggtgggggtggggcgtttgtgtgtgtgtgttttattattgaattgatatagtttgtttagtttttattttttacggtaatttttcgaggtgaaatagtgttagttttttcgtttttgtagtgagggaataggttcggaacggttaagtggtagagttaggatttgaattttattttataattaggtgttgttagtttttattttttattattgatttttaaagaggtttttatgttaaatatagttatcgttatagggaaattttaagtttagagagatggttttatttagtagtaggtatttatttttttattaaatatgttttgagttcgacgtgcgaggcgtggtgttggggatttcgtcgtgaattaggtagttagggttcggtttggacgtaatttttttttagggtgtttttaggaaggttttgatgaggtcgatggaatgaagttagttgtaaaggaaagggagtagtttgaaagttttattttgttttgttcgggaatattattttttttattttaggagattgggcgtcgggttcgtttagttaataggtacgtgatgatatttttgatattaggaagataaaagatatttttatatagggttttttgaagaaattagagatgtatagtgtttttgggatgggattgggtaggaaggttaagtagttttttgagttattaggtttttgtttataagtttatttagtgtttgttaggtgttatagttgatgatagaagatgaaacgtttgtagtttttagatattttttttgtagtatagttttgtttttagtagttttagttttaggttttttaggtagggtttattggagtttttttgtttttcgtttatggtatagaaggtggtattttattaattttttttaagtattttaagtaggattgtgtagtgttaggttatatagttcggggatttagtatagggtttggtataaaagtagggatatatttttttaaatatgtttgagaattttttttattagaattattaagaaatgtttgtttttaaaatagattttggggtcgggcgtggaggtttacgtttgtaattttagtattttgggaggtcgaggtgggtagattatttgaatttaggagtttgagattagtttgggtaatatggtgaaatttcgtttttataaaaaaataaaaattaggtgggtgtggtggtgtgagcgtgtagttttagttattttggaggttaaggtgggaggattatttgagtttaggaggtagaggttgcggagagttaagatggtgttattgtattttagtttgggtgatagagtgagatttagttttaaaaaaataaataaaatatattttatttgtttgtatatggtgttatatgtatagattattttaggaaagatatataagaaattggttattttagaggaagggaattaggttattgagggatgggttagaataattttttattttatatttttttgtattttttgggtattaatttatatgaatgtattatatatttaaattttttaattttaaaaataaattggtttaagaaaaatgtagatttttgggtttatttttaatttaataattttttgggggtaggtttttttgttttttaaattagttttttaggtgatttttaagtttagagtaagtgtataaatttgtgtagtagggtattagtggtgaagtattgttaggaaggagttaagagtgttcgttagaggtgattagtttagcgttatattttttggattaattttatttttttttaaatttttattcgggagggttaaggtagttgtagtacggtgggataggttgggagtgatttttttttatttatttatttatagtgattattttaggttagaaaggattggtttttatagagtttttttggtacgtgtggatatatgtgtgggtgtgaggagtaggggtatttatgtttttagagttggttttgaggaagttgaggttttatttttattttaattattttatatgttttatattaaggggtatttagaattttttgttttatagaggaaggaaataaaattaaagagatttttttagtcgttattttagttttagttacgtatttgttattatagtttaggtagttaattttagttttattttttaaatgtaggaatattttttaatttataattgtttttagtatattatttttagggaaattaaagttttggatttaaatattttagatgggaaaatttagtttttatgatgaatttagttttagaaatgatttttttttttaagtttttattggagtttttattgttataaagtatttataggaggatttttatgaggagtaattttgttagtgtatttaaaacgggattttcggttgggcgtagtggtttacgtttgtaattttagtatttggggaggttaaggtaggaggattatttgaggttaggagtttgagattagtttggttaatatggtgaaatttcgtttttattaaaaatataaaaaaaaaaaaaaaaaaaaaaaaaattagttaggtatggtggtgggcgtttgtaattttagttatttgggaggttgaggtagaagaattgtttgaatttaggaggtggaggttgtagtgagcggagattacgttattatattttagtttgggcggtagagtaagagtttattttaaagtaaataaataaataagattttgtagtttagaatttagtttttattttattttttatgtatttatttatgggatagattgtggatttagatatgtgttttattttataggatagtatgtaagttagaagtatttagtttatatggtgaagggttttttggttgtattttgttgtgtgttaatttttttagttttggttttttaatataggggtaagtatagttattttgaagttagattatttgtttttgttatgtgattttgggtaatttattttatttttttgggttttatttttttttgttgaaagagttggaaagaaggtatatgttaggtttggagtggggaggagaatattgtatgttgttagtttttagtgtgggtttttgagaagggatttttttttatttttttatttttttaatttagggatagggagggattaggattttagataggtttggaggttttgagagaggggagaatttgtttgtggataaggtttaaataattttttatgatgagaaagtatggtagtagttaagtagaaatggtagttgggtatgtttaagtagggggttttgggagtattttaggtttatgtttaatttgtgagaattttaggaagtattagtatgtgttgtgaggttttagaatagtatgaagttgttgagagggggtagataattaggaaagaatttttgtgataataaatttaataaagggagtattaaagttatagtttaagttagagattatggtacgaatgtagatatttgtgggtatagtagaaattagagacgataatttataattggtaggggtgaaatttgtttgtttttttgagtagtagaggaagatgacgatgattaaggattagataattttaatttttttattttttattttatgttatgattatataatttttatagaatgtaattatgtttttggataggagtggagggatagaatatttaattgagtattttttggaatgattgggtgattatgtatttatttgattgaatttgttaggaagtggttagattatatttttgttgttaaatggaaataagcgttgtagaaagtaattatgaaaataagagattatttgatatatttaaatattttgattttaaaattttatgtaggttgggcgttgtggtttatgtttgtaattttagtattttgggaggttaaggtaggtagattattggagtttaggagttgaagattagtttgggtaatatggcgaaatttcgtttttataaaaaatataaaaattagttaggcgtagtagtgtgcgtttgtagttttagttatttaggaggttgaggtgggaagattatttgagtttaggaggtggaggttgtagtgagtcgagatagaattattgtattttagtttgggtgttagagtgaaattttattttaaaaaaaaaaagtaaaaaatttatgtagttatagaggtagaggaattatatagatttgttgttgtttatttgttgttaatattttgcgtgatttgggataagtggtttttttttgttgagttttagtttttttgtttgtaaagtggggattataataatattaatatattataggatttttgtgaaaattagtgattttagttattagaatggttaaatttaaaagaatgataatattaagtattagtaaggatgtggaataatcggagtttttatatatttttggtgggagtataaattggtatattttagaaaattggtagtatttattaaaattaaatatatatgtatttagtggtttagtaatt

SEQ ID NO: 307 - DNA, 6099 bp, Artificial Sequence
  chemically treated genomic DNA (Homo sapiens)
  unsure (4928)
tcgtaggtttgtagggaaatggtgttatgttggtatttggaattgttcgttttattgtagtattcggaatgtttgattgtgtatagtggttggatttaatgtttatttatatatttttaattgttttacgtttgttttatttttggtaggtatgggatttaggttggtagcgtgagttaagtataggttgttaggttgggtaggcgaaataagtttagagggtttgagtaaaattggggtaaaagtattattagttatagaggtttttggttagaaaaaggacgttttaaagatttcgtaataataggataagtattaaaaatgataattgggcgtagtggtttacgtttgtaattttagtattttgggaggttaaggtaggaggattatttgaggttaggagtttgagattagtttggttaatatggtgaaattttgtttttattaaaaatataaaaattagtcgggcgtggtgataggtgtttgtaattttagttatttaggaggttgagataggggaatcgtttgaatttgggaagcggagtttgtagtgagtcgagattatattattgtattttagtttgggtgatagagtaagattttattttaattaattaattaattaataattgggttgggtgtagtggtttatgtttgtaattttagtattttgggaggttaaggtaggaggattatttgaggttaggagtttgagattagtttgggtaaaatatggtgagattttgtttttataaaaaaattaaaaattagttaggtgtgatggtacgtgtttgtagttttagttatttgggaggttgagatgagagaattatttgagttcgggaggttaaggttgtagtgagttttgtgttattgtattttagtttgaaaaagagtgagattcgttttaaaaagaaaaaaaagataattagtaataattgagtatattatatatgtgttaaattatgagtttataatggtattttaaaaaaaattttatcggttaattttggaagatgttggggaattaatttattattttgaaagttggtaaaataagtgagaaataattaagtatttattttgttttttttaggaaatgtatttttgtgtaataaatagttaatgtggaaaagtttttttttatagaattattttatttaatatttttataggaatttatttaaagaaggaatgataatattattttttaattttttatttattttgagatagggttttgttatgatgtttaggttggattcgaatttttgggtttaagtaattttttcggtttaattttttatgtagttgggattatagtcgcgtgttattatgtttagttttaatttttttattaatgaatttagattagtggtttttatttagggttaattttgttttttagaggataaatggtaatgtttagatatatttttttattgttatagttaggaggaggtgttattggtatttattaggtagaggttagagatgttgttaagtattttataatatataggatagtttttataataaagaattttttagtttaaaatgttaatagtgttacggttgagaaataaatattagttattaaaattataaaaagattattattgtatattttttgtatattttttgatagaagtgttaaaattatttataaattagttttgttaaaagaaatttaaatttgattaagttattaatttatattaaatatagaggatggaggaatatgttaaattattatagaaattaagattttaagaaattttataggataaatgaattagttttaaaaaatagtaagaaaaaagatggagaataagtatagatttgtaaagatttaagaaatatatggttgggtgtggtggtttatatttataattttagtattttgggaggttaaggcgaatggaatgtttgagtttaggagttgagattagtttgggtaacgtggtaaattttatttttataaaaatataaaaattagataggtgtggtggtatttatattttagtagttttagttatttagaaggttgaggtaggattgtttgagtttcgggggtggaggttgttgtgagtcgagattaatttattgtattttattttgggtgatagagttagattttgttttataaaaagagagatagatagatagatatattatttgtaaagtatagatttaatttagattttgatttaaataaataatttttaaaaattaaacgtaagatagtgagggaaatgtaaataattggatgtttgatgatatgaaggaattattgtttttttttggtgtgataatattgtgatttggttttaaagaagaatttttattatttagagataacgtattgaaatatttataggatgaaatgatatgttagaaatatatataaatatggagtggggaagagggtacgggtatagatgaaataagattggttatgaattgtttattggagaattattgatatagaagggtaaatgaaagtaggtatttttatttgggttaggttaaatatggtaatagtataattgaggtaaaggaaagttaattttgtattatgggtttttaataaaatggttttattaatttaaggtaaataaatatttatttttttattttgtgtgtgtgtgttaagatattttttattatataaataataataaaaggtttttttgagatagagtttcgtttttgtcgtttagataggagtgtaatggcgcgattttggtttattgtaattttcgtttttcgggtttaagcgatttatttgttttagattttagagtagttggaattataggcgttcgttatattaggttaatttttttgtatttttagtagagacggggttttattacgttggttaggttggttttatttttttttgattgaattatagttatagttttttttttaattagtttttcggtttttatataattatcgtaattattttataaaaaataggtatttggttttttggtttggtattattattattaattattatagtaatttttaaacgtgataaagggttagaatttagtgtcggttaaaagatttatgatattaaataaaatgaggtataaatttttagtgtttatagatgttatataataaaaagtaaatttataaattagttgtagatgttaatattaatgtgatgaatgagcgtgtgttgaagattaaacgtttttagaaaaaagaataggatgtacgtgtttcgtgtaattttgtgaggttggtttgtttttatcggttgtggaaggattgcgaatgttttttatttttttcgttttaaatttgtgtaatatttttttttgtatagcgtattaagatagtatttggtttttttttgattttaaggtattatgtattatttatgatcgtttttattttttttttagtagttttcgataagcgagtagtattttttggttttaagttttataaacgtgtaattagattttattggaagacggtaattttacgcgatacggattgtgtttgtattaatttttttttaagtttattatagaaatattaatatagtatttgagaatttttgtaggatttagtttcgttttttcgaggagtttttagtttgttttcgtattcgagacggtagtttttttttttttcgtttatcgtttcgtcgttaggtggtaggcggtttaacgacgtttttttaaatcgtttgtttcggagtggatcgtcgggatcgcgtgttattatttaattttagcgatgattggttatttcgtcgaggtcggaggaggaattagcggtagaatcggaagcgtttggtacggcgagtgtacggagttttgagattgcgtgcgtatttaggtatcgcgtcgatttaaagaggttagttgtagtttttttttcggttttagggggtagatcgtgtttttacgtggagggcggaatttttatattgaggagggttgggttatattgaggggaggagttattttgagaggaggggttataatgattagtggattttttcggaggtggggttttattgcgtgggaggaatatagagtaagggggtgtagtattgaggggttttgatatattgacggtggtagtgttatattggggaaaagtgttttcgaaagggaggtgttttattgaggaagggaggggttttcgagggatagcgttttttgaggggggtgggattttgcggaaggacgggtttttttgtaggtggaggttttttttttagagttttttgggtaaagtagtaagagggaggtttcggttgggtggttatagggcggaggatttggatttttttttttattgggaggcggtaggatgaagtgaggaggagtcggggttaagttgggtatgggtcggttaaaggttttttatagtttcggggtattataatttttcgtgaaggtagaaggtgttagggaggttagaggtttaaggtgtcggagtcgaagagatttgggaaatgggtaggttgggtcggggcgtaggttaggaaggtggataggttgttaggttatttttgattgcggttgggtttgaggggtttatttttttgtttcgttggtttttggagtttaggaattcggtaggtttttgagttcgatttttaacggatagtaatttagggaggagaggggattttttgggtagttaagtttcgtatgcgtattattagtttttaattttttttcgttatttaagtttaggtcggagtttatttgattcgggcggtttagggtatcgcggtcggaaagcggggaggcgggggtgcgtatttgagggggcgtggtcgttgtcgggaggtcgggttggaaggagttaagcggaggttcggtttagtttcgttttcggtaggtcgcggagtttgattttcggcggttaagcggagtagtcgncgttcgttcgttcgttcgttttcgttcgcggtaagttagttcgtcggcgtttcggagcgttgtcgttatcgttatcgttatcgttcggtttaggtttaagtttaggttttgcgcggagcggagcggcgcggcgtttattcgggtttagttagtcggcgcggcgggggcgggtttaggattttcggcggattttttatttttagggcgggagtcggagttcgggcgttcgggatcgggttgggttcgcgtttatggtaagcgcggtttgttcgggttttggggattttgttatgtgaggtaggttcgggttgggggttcggttatggtcggggaacggtttttattgcggggttttgggttcgggtttggagaggtgtcgggggaggggttttcggggtcggggggtacgggcggaggttcgggtcggggtcgtttttttttttatcgggtttttcgtagcgtcgtgtttagtttggcgcgtgtggacgatttttattgcgcggagaagatcggggtcggttttttttttgaggtttataaggtaggatcggtcgagagggtagaggggcgggatcgagtttttaattagaggttgaaattagggggtcgggagtgcggggaagagggtttagatttcggcgattcgttcgatttgttcggttttcgtcggttgtttttgtttttaggttcggtatcgatagttagggtaagttatggtgttgaagatgaataagttttttagtaatcggggtaatatattacgggaagtgtagttgatgaatcggtttaggtattttaatattttaaggtgagcggttttagtttttgggtagtttgttgggcgggagagaaagggaaagatttcgcgggaaaagtggaattgaggaggagttgaggtttttaatagtttatttttttattttttttatttttttgtaggtttatgggagtttgtgtgtattagggatagttgtacgtttttatagaggtgaggataggttacgaaggagggatttttatttttttttatttttaaggataaagggagttaataggtttggtggatttacggaggattagtgagaggtaataggatttttttttaggggaggtttttttgaatttttttttaggtaaattatatataaaaggttttaattggttttatttt

SEQ ID NO: 308 - DNA, 6099 bp, Artificial Sequence
  chemically treated genomic DNA (Homo sapiens)
  unsure (1172)
agaataagattagttgaggttttttatatgtggtttgtttaaaggaaagtttaggaaagttttttttgagaggagattttgttgttttttattagtttttcgtagatttattaggtttgttgattttttttatttttgggggtgaaggggggtggggatttttttttcgtggtttatttttatttttgtaagagcgtgtagttgtttttggtgtatatagatttttatgaatttgtaagaggatggggaagatagaaggataggttattaaaggttttagtttttttttagttttatttttttcgcgggatttttttttttttttttcgtttagtaagttgtttagagattggggtcgtttattttaggatgttggggtgtttgagtcggtttattagttgtatttttcgtagtgtgttgtttcggttattggggagtttgtttatttttagtattatgatttgttttgattgtcggtgtcgaatttgggggtaggagtagtcggcgagggtcgggtaggtcgggcgggtcgtcggagtttggattttttttttcgtattttcggttttttagttttagtttttggttgaaggttcggtttcgtttttttgttttttcggtcggttttattttgtagattttagagaagaagtcggtttcgatttttttcgcgtagtgaaaatcgtttatacgcgttaggttagatacggcgttgcggagagttcggtaggaggaggggcggtttcggttcgggttttcgttcgtgtttttcggtttcgggggtttttttttcggtatttttttaggttcgggtttagggtttcgtagtgggggtcgtttttcggttatggtcgggtttttagttcgggtttgttttatatggtagggtttttagggttcgggtaggtcgcgtttgttatgggcgcgggtttagttcgatttcgggcgttcggatttcggttttcgttttgagaatggaagattcgtcgaagattttggattcgttttcgtcgcgtcggttggttgggttcgggtggacgtcgcgtcgtttcgtttcgcgtagggtttgggtttgggtttggatcgggcggtggcggtgacggtggcggtagcgtttcggggcgtcggcgggttggtttgtcgcgggcggaggcgggcgggcgggcgggcgncggttgtttcgtttagtcgtcggggattaggtttcgcggtttgtcgggggcggggttgggtcgggttttcgtttaattttttttagttcggtttttcggtagcggttacgtttttttaggtgcgtattttcgttttttcgtttttcggtcgcgatgttttgggtcgttcgggttaaataagtttcggtttgagtttgaataacgggagggaattaagggttgatggtgcgtatgcgaagtttagttgtttagggagtttttttttttttttgggttattgttcgttgagggtcgggtttagaaatttgtcggatttttgggttttagggattaacggggtagaaaggtaggttttttaggtttagtcgtaattagaggtagtttagtaatttgtttatttttttggtttgcgtttcggtttagtttgtttattttttaggttttttcgatttcgatattttgaatttttggtttttttaatattttttatttttacgggaggttgtgatatttcggggttataggaagtttttggtcggtttatatttagtttagtttcgatttttttttattttattttgtcgttttttaataaagaagagagtttaggtttttcgttttgtgattatttagtcgggattttttttttattattttgtttaaaagattttaagagagaagtttttatttgtagggaagttcgttttttcgtaagattttattttttttaaagaacgttgtttttcggagattttttttttttttagtgagatatttttttttcgggggtatttttttttagtgtggtattgttatcgttagtgtgttagaattttttagtgttgtatttttttgttttgtgttttttttacgtagtgagattttattttcgaggaaatttattagttattgtgatttttttttttaaggtgatttttttttttagtgtgatttagttttttttagtgtgagggtttcgttttttacgtaggaatacggtttgttttttaaggtcggaggaggggttgtaattggtttttttaagtcggcgcggtgtttgggtgcgtacgtagttttaggatttcgtgtattcgtcgtattagacgttttcggttttgtcgttggtttttttttcggtttcggcgaaatagttaattatcgttagggttgggtggtgatacgcgatttcggcggtttatttcggggtaaacggtttaaaagggcgtcgttgagtcgtttgttatttagcggcggaacggtgggcggagggagagaaagttgtcgtttcgagtgcggaggtaggttgagagtttttcgaggaagcgaggttgagttttgtaggaatttttaagtattgtattgatatttttgtagtaagtttaaaagagaattaatataagtatagttcgtatcgcgtggggttatcgttttttaatggagtttggttatacgtttatgagatttggagttaagaaatattattcgtttgtcgagggttattgagaaaagaataaagacggttataaatgatatatgatgttttagagttaagagaaggttagatgttgttttggtgcgttgtataagggaaggtattgtataagtttggagcgagaggaatgggagatattcgtaatttttttatagtcggtggaggtaggttaattttatagaattgtacggggtacgtgtattttgtttttttttttggaggcgtttggtttttagtatacgtttatttattatattaatgttaatatttataattaatttgtgaatttgttttttattgtatgatatttgtaaatattaggaatttatgttttattttgtttaatattatagattttttaatcgatattgggttttggttttttattacgtttgagaattattgtagtagttggtgatggtaatgttaagttaaagagttaggtgtttattttttgtaagatgattgcggtggttgtatggaggtcgggagattgattaggaaggaggttgtgattgtggtttaattaggaaaggatgagattagtttggttaacgtagtgaaatttcgtttttattaaaaatataaaaaaattagtttgatgtggcgagcgtttgtaattttagttattttggaatttgaggtaggtgaatcgtttgaattcgggaggcggaggttgtagtgagttaagatcgcgttattatatttttgtttaggcgataagagcgggattttgttttaaaaaaattttttgttgttgtttgtatggtggaaaatgttttaatatatatatatagaatagaaaaatgaatgtttatttattttggattagtaagattattttgttggaaatttatagtgtaaaattggtttttttttgttttagttgtattgttgttatatttgatttggtttaggtgaaagtatttatttttatttatttttttatgttagtgattttttaatgagtaatttatggttaattttgttttatttatattcgtgtttttttttttattttatatttgtgtatatttttgatatattattttattttgtaaatgttttagtacgttatttttaaatgataaggatttttttttaaaattaaattatagtattgttatattaaaaaaaaataatagtttttttatgttattaagtatttagttgtttatattttttttattgttttacgtttgatttttaaaaattgtttatttgaattaaaatttaaattaggtttgtattttgtaggtgatatgtttgtttgtttgtttttttttttgtgagatagggtttggttttattatttaggatggagtgtagtgggttgatttcggtttatagtaatttttattttcgaggtttaagtaattttgttttagttttttgagtggttgggattattgaggtgtgggtattattatatttgtttaatttttgtatttttgtagagatggggtttgttacgttgtttaggttggttttaatttttgggtttaagtattttattcgttttggttttttaaagtgttgggattataggtgtgagttattatatttagttatatgttttttaagtttttgtagatttatgtttattttttatttttttttttattattttttaaaattggtttatttgttttgtagagttttttagagttttgatttttgtggtaatttagtatgtttttttattttttgtatttgatataaattggtaatttaattaaatttagattttttttggtaaaattaatttgtagatggttttagtatttttattaggaggtatataggaggtatatagtggtggtttttttgtgattttaataattgatatttgttttttaatcgtggtattattgatattttgggttggaaaattttttattgtaggggttgttttgtgtattgtaggatgtttagtagtatttttggtttttatttaatggatgttagtagtatttttttttgattgtaataataaaaaaatgtgtttagatattgttatttgttttttgggggataaaattgattttgaataagaattattggtttaggtttattaatagaggagttaaagttgggtatggtggtacgcgattatagttttaattatatgggaagttgagtcgagagggttgtttgagtttaggagttcgagtttagtttgggtattatagtaagattttgttttaaaataaataaaaagttagaaaataatattattattttttttttgaatgaatttttatagaagtattaggtagaataattttataaggagaaatttttttatattaattatttgttatatagagatatattttttaggaaaggtagaataaatatttgattgttttttatttattttattagtttttaaagtaatgagttggttttttagtattttttaaagttgatcgatgaggttttttttaaagtattattatgaatttataatttaatatatatgtgatatatttaattattgttagttattttttttttttttttgagacgggttttatttttttttaggttggagtgtagtggtataaagtttattgtaattttgatttttcgggtttaagtgatttttttattttagttttttaagtaattgggattataagtacgtgttattatatttggttaatttttaatttttttgtagagatagggttttattatgttttgtttaggttggttttaaatttttggttttaagtgatttttttgttttggttttttaaagtgttgggattatagatatgagttattgtatttagtttagttattgattgattgattgattgagatggagttttgttttgttatttaggttagagtgtagtggtgtgatttcggtttattgtaaatttcgttttttaggtttaagcgatttttttgttttagttttttgagtagttgggattatagatatttgttattacgttcggttgatttttgtatttttagtagagatagagttttattatgttggttaggttggttttaaatttttgattttaggtgatttttttgttttggttttttaaagtgttgggattataggcgtgagttattgcgtttagttattatttttggtgtttgttttattgttacgggatttttggggcgttttttttttggttagaaatttttgtggttggtggtgtttttgttttagttttgtttaggttttttgggtttgtttcgtttatttagtttggtagtttgtgtttggtttacgttattagtttgggttttatgtttgttaagggtgagataggcgtggaatagttaggggtatgtgagtgagtattgggtttagttattgtgtatagttagatatttcgggtgttgtagtggggcgggtagttttaggtgttagtatggtattatttttttgtaagtttgcgg

SEQ ID NO: 309 - DNA, 6030 bp, Artificial Sequence
  chemically treated genomic DNA (Homo sapiens)
  unsure (576)
ttatttttgttttttttagaatttttgtttttttttttttttatagatttttcgttacgtagttcgtgtaggttttttttatttttgtgaagttttaaatttaattttgtgggttttattaagttgtgataaagtatgtataggggttttggtagaagataacgttaatataggtagattggagttgggtttatgttgaaaaaaatttggattattaatttaagtggtttgttattgatttttagattagagatgtttaatagaattttttttagtgatggaaatgttttatatttatagtgtttaatatagtagttgttagttatatgtagttttatagagtatttgatatgtggttagtatgattgagaaattaaattttaaatttaattttatgtatttatttatttttataagatagagttttatttagtcgtttaggttggagtgtagtggtgtaatttcggtttattgtaatttttgttttttgggtttaagtgatttttttgttttaggtttttaagtagttgggattataggggtttgttattatgtttagttaattttttgtgtttntatagagagggggtttattatgttggttaggtttagttttgaatttttgatttaggtgatttattcgttatagttttttaaagtgttggaattataagtataagttattgcgtttggttgattttatttaattttaattattttaaatttaaatggttatatatggttaaggttattattttggatggtatagttttagatattagaagttatattttttattttgttttgtttttaaattgggagaatgatatatgttagaaaaaaaatggaaataatgtgggtatttgggtggtgaggatgaggtaagaagaaaattattttttgtttttgatattaatgtttttaataaggatgaggaatttaggaggatgagtgggtttgggaaggtagataggaagtttaatattgagttgagattatgggatatataaatagagatgtttaataggtatttaaagaagagtttatagtagaatagaaaaagttagggttagaagtataaatttttgtagttatttttgtagaggtgataaagttatagaatataggttatattttttagagtgggagtgtagattttgaagaaaagagtattgagtatagaatttagaaaaatgtgtatattgaaagagtcgagttaagcgtagtagtttatattcgtaattttagtattttggagggaggtaggaggattatttgagtttaggagtttagtttgggtaatatagtaaaattttgtttttataaaaaatataaaaattagttaggtatggtggtgtatatttgtggttttggttgtttgggaggttgaagtgggagggattatttgagtttaggagattgaggttatagtgagttgtgattatattattgtatattaattttagtttgtatgaaagaataaaatttttttttttttaaaaaaaaaagagagagagagagaaagaaaaaaagtggaaagaggaagagtagtaggtaaataggaaatatgaaatatttattatgtaatgtttttaagaaattggtatttaattatgtaagtgatagtagaaagtttttgttttaggtgtagtgtttgttaggaagatttaatattttatttgaaaatgtaagtataggtataatgtaattaatttttattgttttattatatagatttgatagatagtttttatttggttaatgtttgttattattatattattatagtgttatttttgtttatagaattataaatgtgtttgttaaatgggtttaatatttgggtagattgttaataaatgttataaattttagtttaaataaattagtttataaatttaggagaatgtttagttatttttggtgttttttagataattagtagttgtaattaatgatgtttaaatggattttttatataagattaaggagaaattgtttgatataatttatataatttgtatttttattatttgagtgggaagttttattattttttttatattgtgttatatatttgtagaagaatataaaaggtagtgattatgttacgtgttaagaaagatattagagtagattgaaggggtgtagtatgagtaaagaatttgagattagagaaaaggttttggaaaggaaggtaagtatggagaaggaaatttgaaggaatagattggttgaaggttagatttgtggagtagatagtaggtaataggttaatttgttgtttagtttagtgtttgatatataataggtgtttagtatttattgaaggaaggaatgggaaaaggaaaatttattttgtaagaatagtagaattttattttggttttattttattttatttgttatttgattttagttattatatttttttgattttgggttgttgttaggtttattgttaaaatatatattaaatagtttatattttaatttgtaattgttgtttagttttggataattggagggtcgggggggtgtttttttatttagagaatacgggaatacgtcgggcgcggtggtttacgtttgtaattttagtattttgggaggtcgaggcgggcggattacgaggttaggagatcgagattatttcggttaaaacggtgaaattttgtttttattaaaaatataaaaaattagtcgggcgtagtggcgggcgtttgtagttttagttatttgggaggttgaggtaggagaatggcgtgaattcgggaggcggagtttgtagtgagtcgagatcgcgttattgtattttagtttgggcgatagagcgagatttcgttttaaaaaaaaaaaaaaaaaaagagaatacgggaatatatttgagtatttggatgtttaatttttttttgttttaagattataatagagtaggtgtgattatatttagtttttgaatattttggttttgggtgatataggtgagtatttttagttgatttgataggttaaaggtgtatatttattttttttgtaagaagcgttatttggtaagatgattaagaatggtgtaaagtaggatggggagtttaaaattgtttttaaatgtgggaatgtaaatgaatataaatatgtaagattttaatatattaaattgattagattttgtgtaatttttaagtttttttttttttttaaaatttttttgaaatttgattgtttataaaaatttattttatagaattttatgtgatttatttatttagatattatattgattttatatttagtagtgaaaatagattttattgtagaatttggaaagatagagggttatataggttgtatttttagttttgtttatattaatacgtgtttataatttagtttaatttatattttgtattgtattattgttgttatatttttgtatgtatgtaagtataatatgtgttggtaaaggaaaattttgagtaagaagaagttttttgatttatttgatttaatatgtatttgagtgtttaatagatattgttttagatattggtgatataatattgaacggagtattaaatattttatagcgttttttggagttgttgttaagatatattttttaaggggaatattttagaataggtgataattagttaacgaaggaaaagtattttagttatttaggagagttgtatttagagtgaattgaaataaattaagtttacgaaagatagagattttttgtttggtttttgtttgttgtatttattattgtatttttagggtttaaaatagtgttcggtttataataagtatttagtaaatatatgttgttgattggagtgtttgttttgaatttttgtaattaaatatatattttggtaaattatttttatattttgttagttgaaaattttattttagttgttttgtttttaatgttattttgttttttgtttttatttgtgttatatattaggatgttggaaaagtttattaatattgatagttatatggttatttgatattgaaaagaatagatttggaaaggaatttaagaggttattttttgtttagttttttgtttaggaaaattaagtaagatgattaggtatgtatatttaattagttatttaaaaaaaaattaggataatataattgagtttttttttgagaaaatggagaaaggtatttaattttagttataaagggattaatttggaaattttagaatttttgtgtgggaaagtggaaaaaaaaaaaaagtataattaagttgttttttgttgatattagaaatgggtttgttatttattttggtattgaagtatagttttttatttcggggtaggattgggatatttttttttttttataagagttggatagttattataggtttaaaaagtttcgattagttttttaagagttttttttttttttttttttttgaaattcgtggtgtttttgttttgtttttaagatgtattaagttttttgttttgtgattgttttggagttagtagatattttgatatgtataatttaaattatgtaggttttacgagtaagtttaattttattttttaagttagttaaaaggtaagtgatatttagaaaaatgttaatttgtagttattttattttttttattttaagtatttttattgtttttcggttttttggttaagattaagtgtgtattttaagtattttttaaaataaaaatatttttttaatttaataagaaaataaggttttatatagaaaagtttttttatttaagatttgtattttttaattttttttgagatgtttttgttgtaaatagtatttatatgttttttgaaagttagttaattaaatagtttttttgagtatttttttagttttattgagaagtattttaaattgagtttttttgagttcgattgtttacgtttgatatagttttaagtttttattgaatggtaataaagattgtagaatgttgttggtattgtagtgagaggtatgtttttttagattaggtaagagagattagtttgttttttattgttgggtgagtttttatagtttttattttatattttttaagtagtagtaatattaaattgataaatagttaggagtacgttgattttaagacgtttttgtttgttgtagatagaaaaattatagggttatgtatgggggttggggtggggggggaggggaagaattagtttattatttagttatttatataaattaattaaaatgtgaaaataattttggagtttagtttttttaatttaggaattaaagtagtagttgaggaaattagtaattttaaaggtattttatggttattatttgtgaaagtaatttaaaggatagtttttatttttatttttttttttagtagttaataaaataagttttgtttttaattaaatattttttttatttacgaaaatttttaaattgttaatagtaaaatatattttttaaggatttttggaaattaatttgatatttgaaaaatattttagtttttatagttgttttatttttttttttttttagtatattttttttaaaagtatttgtgttttgaaaatgttagttgtattttaatgaagtttaggtattgtttgtttataaaggggtcggtgtattttattgttttatggtttattatgaggtatagtgtgagagtgtgggtggtattatttggtgtttgttttttggggtagtgattgttattatgttagttttggattggtaaagaaaatatagtatataagatgttatatgaatttggatattgtgaagaaaattttatttttaaataatttttaatgatttcggaatatatgataatttgattgaattgattattttaattatatttttgaagtttgtattttagttataacgtatattttattagatacgttttattttttgatatataatagtatttagttattttttgaagtttaataaggaagtgaatgtttttaaattatgatgtttttaatagat

SEQ ID NO: 310 - DNA, 6030 bp, Artificial Sequence
  chemically treated genomic DNA (Homo sapiens)
  unsure (5455)
atttattaaaaatattatagtttagaaatatttatttttttattgaattttaaagaatgattaaatgttattatatattaaaaaataagacgtgtttaatagaatatacgttgtaattaaaatgtaaattttaagggtataattgaaatgattaatttaattaagttgttatatatttcggggttattaagaattgtttaggggtaagattttttttatagtatttagatttatatagtattttgtatgttatattttttttgttagtttaaggttaatataatggtagttattattttaagaggtagatattaaatggtgttatttatatttttatattgtgttttataataaattataaagtagtggaatgtatcggtttttttatgagtaaataatgtttaagttttattagaatatagttgatatttttaaagtataaatatttttaagaaaaatgtattagggaaaaaaaggaatgaaatagttataaaagttgaaatattttttaagtgttaggttgatttttaaggatttttgggaagtatattttgttgttggtaatttaaaagttttcgtaagtggaaaaaatgtttagttaagggtaaagtttattttattaattattggggaaaaaaatgaaagtaaaaattattttttgaattgtttttataagtaataattatgaagtatttttaaaattattgatttttttaattgttgttttagtttttgaattaagaaaattgagttttagaattatttttatattttaattaatttatataagtaattgagtaataaattaattttttttttttttttttattttaatttttatatataattttgtagtttttttgtttgtaataagtaaggacgttttgaaattagcgtgtttttggttatttattaatttaatattgttgttgtttaaagaatataaaataagagttgtaaaaatttatttagtagtgagaaataaattgattttttttatttggtttaaggaagtatgttttttattgtagtattaataatattttatagtttttgttattatttagtggaaatttgagattgtgttagacgtaagtaatcgagtttagaaaagtttaatttaaaatattttttagtaaaattaaaaagatgtttaagaaaattgtttagttaattggtttttaaaagatatatgaatattgtttataataaagatattttaaaagaaattgaaaagtgtaggttttagatgaaggggtttttttatgtagaattttgtttttttattaaattaaaaggatatttttattttaaaaaatgtttaaagtatatatttgattttagttaaaaggtcgagaagtaataaaaatgtttaaagtaaaaagggtgaaataattataagttaatatttttttaaatattatttgttttttaattaatttaaaaaataagattaaatttattcgtgaaatttgtataatttgaattatatatattagagtatttgttggttttaaagtagttataaagtaggagatttaatgtattttgaaagtagagtaaaagtattacgagttttagggggaaaagaggaggagaaatttttgaaaaattggtcggggttttttgaatttgtaataattgtttagtttttgtgggaggaaaaaaatgttttagttttgtttcgagataggaggttatgttttaatgttaaaatgaatgataggtttatttttgatattaataaagagtagtttagttgtgttttttttttttttttatttttttatatagaagttttaaaatttttaggttagtttttttatagttagggttaagtatttttttttatttttttaagagggaatttaattatgttgttttggtttttttttaaatgattaattaaatatatatatttaattattttatttagtttttttaggtaggaagttgaataaaagatgattttttaggtttttttttaaatttattttttttaatattagataattatatgattgttaatattaataagtttttttagtattttgatgtatggtataagtagaaataaaaagtaaggtaatattaaaaataaagtaattgagataaaatttttaattagtaagatgtaaagataatttattaaggtatgtgtttgattatagaaatttaaaataaatattttaattaataatatatatttgttgaatatttattatgagtcgagtattattttgggttttggagatatagtagtgaatgtaatagataaaagttaaataaaaaatttttgtttttcgtgagtttagtttattttagtttattttaagtataatttttttagatgattaaggtatttttttttcgttgattagttattatttattttgaaatattttttttggaaagtatgttttgataatagttttaggagacgttgtaaagtatttggtgtttcgtttagtgttgtattattagtgtttaaaatagtgtttgttagatatttaaatatatattgaattaaatagattagagagtttttttttatttaaaatttttttttgttaatatatattatatttatatgtatatagagatatgataataataatataatatagggtgtaaattaaattgggttgtaaatacgtgttagtataaataaaattgaaaatataatttatatggttttttatttttttagattttataataaaatttgtttttattattggatgtgaggttagtataatatttgagtaaataaattatataaaattttataaagtaagtttttgtggatagttagattttagaggagttttgaaagaaaaaagaaatttggaaattatatagaatttgattagtttggtatattaaaattttatatgtttatatttatttatatttttatatttggaaataattttaaattttttattttgttttgtattatttttgattattttattagatgacgttttttatagagaaaataagtgtatatttttaatttgttagattagttagaagtgtttatttgtgttatttaaggttagaatatttaggggttagatatggttatatttattttgttatagttttaaaataaaaggaaattaaatatttaagtatttaagtatattttcgtgttttttttttttttttttttttttgagacggagtttcgttttgtcgtttaggttggagtgtagtggcgcgatttcggtttattgtaagtttcgtttttcgggtttacgttatttttttgttttagttttttaagtagttgggattataggcgttcgttattacgttcggttaattttttgtatttttagtagagatagggttttatcgttttagtcgggatggtttcgattttttgatttcgtgattcgttcgtttcggttttttaaagtgttgggattataggcgtgagttatcgcgttcggcgtattttcgtgttttttaaataggagagtattttttcggttttttaattgtttagagttagataataattataagttaaaatataaattatttagtgtatgttttaataataaatttaatagtaatttaaggttagaaagatgtgataattgaggttaagtgataaataaaataaggtggggttaaagtaggattttattgtttttgtagaatgaatttttttttttttatttttttttttaataaatattgagtatttattatgtattaggtattgagttgggtaataaattgatttgttatttattgtttattttatagatttgatttttagttaatttatttttttaagtttttttttttatgtttgtttttttttttagagttttttttttggttttaaattttttatttatattatatttttttaatttgttttgatgttttttttggtacgtagtataattattattttttatgtttttttgtaagtgtatgatatagtgtggggaaagtaataagattttttatttagatgataaaaatgtagattatataggttgtgttaaataatttttttttaattttatgtagaaaatttatttaaatattattaattataattattgattatttggaaaatattaaaggtagttggatatttttttaggtttataaattgatttatttggattggagtttgtgatatttattggtaatttgtttaaatattaagtttatttaatagatatatttatgattttataggtagaaataatattataatagtgtaatgatggtaggtattggttaaataaaaattatttattagatttatataatgaagtagtagaaattagttatattgtatttgtatttatatttttaagtaaaatattgaatttttttgataagtattatatttaaagtaaaaattttttgttattatttgtatggttaggtgttaattttttaaaaatattgtatagtaaatattttatattttttgtttgtttgttgttttttttttttttatttttttttttttttttttttttttttttttttttaagagagagagggttttgtttttttatgtaggttggagttgatgtgtagtggtgtgattatagtttattgtagttttaattttttgggtttaggtgattttttttattttagttttttaagtagttaggattataggtgtgtattattatgtttggttaatttttgtattttttatagagatagggttttgttatgttgtttaggttgaatttttaggtttaagtgatttttttgtttttttttaaagtgttgggattacgagtgtgagttattacgtttagttcgatttttttaatatgtatatttttttgagttttgtgtttaatgtttttttttttaagatttatatttttattttagaggatgtgatttatattttatagttttattatttttataaagatgattatagaaatttatatttttagttttggttttttttgttttgttgtaaatttttttttagatgtttattggatatttttgtttatatattttataattttaatttagtattgaattttttgtttatttttttaaatttatttatttttttaggttttttatttttgttaaaggtattaatattaagaatagaaagtgattttttttttgttttatttttattatttaaatgtttatattgtttttattttttttttaatatatattatttttttagtttaaaaataaaataaaatgagaaatataatttttgatgtttagagttatattatttaaaatggtagttttagttatatgtggttatttaaatttaaggtgattaaaattaaataaaattagttaggcgtagtggtttatgtttgtaattttagtattttgagaggttgtggcgggtggattatttgagttaggagtttaagattgggtttggttaatatggtaaattttttttttatanaaatataaaaaattagttgggtatggtggtaggtttttgtaattttagttatttgggagtttgaggtaggagaattatttgaatttaggaggtagaggttgtagtgagtcgagattatattattgtattttagtttgggcgattgagtgagattttgttttataaaaatagataaatatataaaattaaatttaaaatttgattttttagttatgttagttatatgttaagtgttttatggagttgtatgtggttaatagttattgtattgaatattgtagatatagaatatttttattattgaagaaagttttattaaatatttttgatttagaaattaatggtaaattatttaaattagtaatttaaattttttttaatatagatttagttttaatttatttgtgttaacgttattttttattaaaatttttatgtatgttttattataatttagtggggtttatagaattaagtttaaggttttataaagataagggaggtttatacgagttacgtggcgagggatttataggagggaaagaaagtaaagattttagagaggatagaaatag

SEQ ID NO: 311 - DNA, 7312 bp, Artificial Sequence
  chemically treated genomic DNA (Homo sapiens)
attatggggattataatttaaggtgagatttgggtggggatagagttaagttatatttaaattatatatacgtttaagatgatagttttttatgtttgattttgtaatgatataagttaagggaaaggtatagaaggatttatatttttatttaggcgtttgtatatattttgtttgtaattttagtgggtttttagagattaatttataattattttttttaataaaaaaaaaaattttgagtgtttcgtatagaatagatattagattaaaaagatgattataggttgggtgtggtgatttatgtttgtaatttaagtattttggggaggttaagataggagaattgtttgagttttgggagtttaagattagtttggttaatatagtgagatttaagttttataaatagtaaaaaaaaaaaaaagaaaaaaaaatttagttaaggttgggtttagtggtttatgtttgtaattttagtattttgggaggttaaggcgagtggattatttgaggttatgagtttaagattaatttgattaatatggtgaaattttgtttttattaaaaatataaaaattagttaggtgtggtggtaggtgtttgtaattttagttattcggaggttgaggtaggagaattatttgaatttaggaggcggagggtgtagtgagttgagattgtgttattgtattttagtttgggtaatagagtgagattttattttaaaaaaaaaaaaaattagttaagtgtggtagtatatatttgtagttttaattatttagaaggttgaggtgggaggattatttgagtagaggaggttaagggtttagtgaattgtgattattttattgtattttagtttgggtgatagtgtaagattttggtttaaaaatatagatgattatatatgattattattttaggagtttagatttggatggagtatgggtaggatttagtatcgtaaaaaatgttttttgtaaaatgattaatttatttttagtatgaaggtgtggataatgtacgttgagagtaaagaagaattattaatttatttcggtgttatgaaggaagtttttaataaagtgatagtggtataaagtttttgaaagttaagaaggtaaagggggtttttagggatgtaaatgtatatttttttgttttgtttttgtttttgagacggagtttcgttttgttgtttaggttggagtgtagtcgtacgatttcggtttattgtaagtttcgtttttcgggtttatattatttttttgttttagtttttcgagtagttgggattttaggtgttcgttattgtgttcggttaatttttttggtattttttagtagaaacggggttttatcgtggttttaattttttgatttcgtgatttattcgtttcggttttttaaagtgttgggattataggcgtgagttatcgcgtttggttgtaaatgtatattttttgtatatggcgttttttagtattttaaagaaaaatttttatttcgggtcgggtacggtggtttatgtttgtaattttattattttgggaggtcgaggtaggtagattataaggttaagagattgaaattattttggttaatatagtgtaatttcgtttgtattaaaaatataaaaattagttgggcgtggtggtttacgtttgtagttttagttatttaggaagttgaggtaggagaattgattgaatttgggaggtggaggttttagtgagttaagattatattattgtattttagtttggtgaaagagcgagatttcgttagaaaaaaaaaagaaaagaaaagaaaaagaaaatttttattttaaattatgatttataatttttttagtagtttagtttttttcgttttattttttagttttatttttttttattttttttgatattttttgtatttttagttatattgtattttatggggttaggttttttttgttgtaagattgttttagttgttttttttatttaggtgtatttgttcgggatttttttatttttttatgaggtttttagtttaaatatttttttggagtaagttttttttatattttatattaaattagttgtttagttataattttattattttgttataatttggtgtattgtaagtgaatttatttattttaatggtgtttttgtgtgtgtgtgcgtgtgtgtgtgtgtgtgtattcgacgtgtatttatttttgttttttttggtttgttttgtttattgttattgtttttggaatagtgtttagaatatatagtagatgtttaataaatagttgtcgaatggagtggataaacgaataaaggtatgtgtaatatagtgttttttgaatgaggatgtggttcggagatatgaaaatgtattatatgtttgaggaatagtaagcggtttgttgtggttgtgggtaagggtaagtttgggtggaagacgaggtggggagggttgggagagttttatagttggaggttgattggatagtttagaattgaatggttttttatattttggtaataggagttatggattatttttaaggagagaatgttatgattggattatgatttttaaaaagttattttagttatagtatggagtttgggtaatggaaaataagttggagtgtgggtggaggttgggtggggggattgtagattgtttaattagagtaagatttgatgatagattgatttagtgtaatatttggagggtagaaatggaaagtgagaatagagatatttttgaggtaaaattgttgggttttggggaataattagatttagggttttgagagagaaggtgaaggttggaaggagataaggtacgtattcgggaaggagtagaattagtaattttagttttggatatgttgtttgaggagttcggtaaatatgtttttttgaatttttaggaattgtgttattattatattgttttttttattttttttttttttttttttttgttttgaattatttttataagttaagatcgttttttgttttttagttcgttggggagttaggttagtaggttttatatttttgaggaagggatagggttttggtttggagggtttagtagaagttattttaggggagggttcgataggaaggaaggtaggtttgtcggaggggtatataggagttttttttttcgttatagtgtttagggttaattgttttagtttttaggttgggttaataggatgggatagtttaggcggaaggaaatttgtggggagggatatttcgtagatagaagtagggatatggggtggggagaggtaggaagagttgtcgggttgttgagttggcgtttttttagtagatttaggaggggcggtgataggaggttattttttttttattttcgtagttttgggtttttttggttttggttaatagtattattattattattattgttgttgttcgttagtttgggttttagatatattagaaaaaaattatcggaagatacgtatagtattggtagtttttaaaagaattaattttttttttgtgtttattttgtgattattgggatagaaatgttatttgtattattagttttttatttagttatagagacgtgagtgttcgaaggagagatagtgatttttgttttaaatttagtttgtttaaatcggataagattttcgatttgttttaagtttcgttattattgtttttttttttaataatagttgttgtgattacgtataaacggttaaacgggggtaaattcgtgttaaagtagggttatgggtttttttgattagaaggtttagttttagtttttaggcgtagtatacgggcggtttttttttagaaatttagtttgttttttattagttggagtgggtgggtggggcggtagtggtgttagttttagggaacggtcggtaaatttatttttaggcgtgttttagcgggagtttggagattttaggagagttttttttataagcggtttttaggtaggacgtttttagaggttttggtttaggggtgggggtgaggtggggtttatttttgaaatagttataatttaaattttagttatatcgagtttaaattcgatttcgtagtcgagtgtcggcgttagagaaggataaaaattcgggtttacggttttttattacgtttttggttcggttttttgggtttttaggagtttttacgttattttttgggttgtttaggaggaaggatgggcggggcgggtaggcgttgcgggcgttgtagatggggagggcgagttcgcggtacggcgtgagcgggggagaggcgcgcgagtaggtgtcggtttcgtgatagggttttttatttcgcgttttagtgtttttcgaggtttagtgaggtaaaatttagtaaatgttttagaaatgtagtttagtcggttatcgggttttgtttttttattagacgcgtaagaggatggcgtttttaatgtaaattttttggtttcggttttttggttggtagtcgtcgcgtttttcgtttgtttggcgtttcgtttatttcgtggcgggttgagacgaggttcggcgcggaggggacggggcggagcgggtatttttttttattttttacgtggggttggtttttcgtagtgtttgggcgcgttgtagtcgtcgcgttttttcggtcgcggtatcgtttttttaggtaggggcgggggacgaggggtaaggagtgggcgaggggtgggcgaggggcggggggcgttatttaattaggtggtttttggagtttttcggggtagggtagagggaatacgttgtcggggattgtgtatacgttttattgatattagttttacgttgtcgggtagtcgtcgattacgcgtggtttcgcgagtttattggtcggcgttttatatatttttgtcgttgattggtcggttttaggtttcgtttttattttcgttcgcggcgcggggtaggttgagcggttatttgaatggggagggggtagacggcgttgagcgcggcggcggcgggagcggcgtcgagtgttttcgtgcgttcgtttgtggttaagtagttagtagtttagtagttagttagtttgtcgtcggcggttaagtagttaattatgtttaatttcggtgtttttttttagtagattgcggtaagttatttggggatgtttttgtgttttttcgtttggttttgtttggggggttaaagggggcgcgaatttcgagtttcggatattagttatgtttgagaattggggttgtagcggagtcgtggggaaggaaagggttttttgtttgtagattatgggtattagtgagggcgtgtgtgttggggagggggtcgaattagggggttgggatttttagatagggataggggttttgttttagatgtattgaggggaagggataatttcgtatggagattcgagagggttggtgaggaggaggatgacgagcgggggaggagtggggagggggtcgttgttttgtagcgaggttggggtatagtgtggaacgagagtcgcgggagggataagggggttatttttatttggtatcgaggagagatgttcggtttggtttaggaacgcgagttaggggaggaaggggttgttcgtaagtattcgggaggcggggtgtttataggagaggcgagtgggttatttattttgggggtttgaatttacgtttggaagacgggggttgtttagtagatagttcggggttgggggaaggggcgtttgtcgtcggagcggggggatgatacgagggttcgtcgatagttttgggggacgagttgtttttttagacgtttggagggggatttttattttaggggtaggtggtcgttttttgacgattttttggaagaggcggggagtcgtttttggggtaggagggtgggaagcgggatttagtagcgggggcgggaaggtgggcggggggagttgggtcgcgagacgcggtgggtcgcgcgtttggagttcgggtttgtgggggttgtacgtttgggaatttatggagacgcgcggcgggaggggttttggagttgttcggaagttacggggagggggcgtcgcgtttatagggagagacggggtggtttgaggttttttgtcgattttaaagaattttacgtaaagatgttttttggtatttttatataatttttattttgacgcgagcgagtttggataaattttttttaatggaaaataggagaaatggtgagtagtattatttttttttagcgtagtttaaagaattttattataaaatattaggtagttttataaataagtgtaaaatttgtgttgttattttgttattaagtagttttttaaggaattaaaatagattttattttgattatgttgattttttaaagtcggtttttgtaaattttaagtagaatattaaattttttgattatttagtttttagtaatattgtattagttatgttgtagttatgtatggtaaattattgtgttaaatagatttagtaaaagggagtataaatatgaagaggttgaaagttaattaaaataaatattagaatttttttttatgtatattatttgatttttttttattataattaagtgattaaattttagattttaaataatgtaattttaatttgaaagatattttgaggattttttattttttgatttttattttaaagtgtaaagtgattttttaaaggttagatttataataataggttagagttttattatattttgtttttattagaaggttttggttattttttttttttattagtaatttgtattttaaaagattttatattatatttgtaatatttaagaagataaattttttgtcgtatttttagtttttttgttcgattttagttgtaggtagttattttggaaagtttatataaaatattttttttttttttagttaaatatttttttttttggattataaatgtattgataattttcgttttagtttttttaatggtagtaggtgtgttttttttttatgaacggatatcgttttattagtgttaaagtttaaatgttaatagaaaaaatgaggaagattttattgttattattgtgaggtttgggttatttatttaataagtgtagttgaatttttttagtattatagtaagtgtgagaggaaaattatttttgattttaatttggaaagttgtgtgagttgtaaaaaaaaaaaaaaaaaaaatttgtttatttttttgtgtgttatttggatgataaaaaatatgtttataagttttttttttttgtttttatagg

SEQ ID NO: 312 - DNA, 7312 bp, Artificial Sequence
  chemically treated genomic DNA (Homo sapiens)
tttataaaaataaaagaggaaagtttataagtatattttttgttatttaaatgatatatagaaaaatgagtaaattttttttttttttttttttataatttatataattttttaaattaaaattagaaataattttttttttatatttattatgatattaaggaagtttagttatatttgttaggtaggtaatttaaattttatagtagtggtaataaaattttttttattttttttgttaatatttagattttaatattgataaagcgatattcgtttatgggagagaggtatatttattattattaaggggattaagacgaaaattattaatgtatttgtgatttaaaaggagaagtatttggttaagaagaaaaggagtattttatatagattttttagagtagttatttgtaattggagtcgggtaaaaaaattaagagtgcggtaaaaaatttatttttttaaatattataggtatggtatgaggttttttgaggtataaattgttgatagaaaaaaaaaatagttaaaattttttaataaagataaaatgtagtagagttttggtttgttgttatgggtttgatttttggaaagttattttgtattttgggataaaaattaaaagataagggatttttagggtattttttaagttaaaattgtattatttaagatttaaaatttgattatttgattatggtaaagaaaaattaagtgatatatatagaaaaaaattttaatgtttattttaattaatttttaatttttttatatttgtgtttttttttattgaatttatttgatataatggtttgttatatataattataatatagttaatgtaatattattaaaaattggataattaaaaaatttaatattttatttggaatttgtaaaaatcgattttaaaaagttagtataattaaagtagaatttattttaattttttaaagaattgtttgatgataaaataatagtataggttttgtatttatttgtagaattatttaatgttttatagtaaagttttttgaattacgttaaaaaaaaatggtattatttattattttttttattttttattaaaagaaatttgtttagattcgttcgcgttaaagtagagattgtgtaaaaatattaaaaaatatttttacgtggggttttttagagtcgataggggattttagattatttcgtttttttttgtagacgcggcgtttttttttcgtggttttcgggtagttttagggtttttttcgtcgcgcgtttttatgggtttttagacgtgtagtttttataggttcgggttttagacgcgcggtttatcgcgtttcgcggtttagtttttttcgtttattttttcgttttcgttgttgggtttcgttttttatttttttgttttagaggcggtttttcgttttttttaaggagtcgttagaaggcggttatttgtttttggggtaagagtttttttttagacgtttgggggagtaattcgttttttagggttgtcggcgggttttcgtgttattttttcgtttcgacgataggcgtttttttttttagtttcgagttatttgttgagtagttttcgttttttaagcgtgggtttagatttttaggatgggtagtttattcgttttttttgtggatatttcgtttttcgagtgtttgcgagtagttttttttttttttggttcgcgtttttgagttagatcgggtattttttttcggtattaggtgagggtagtttttttgtttttttcgcgattttcgttttatattgtattttaatttcgttgtagggtaacggttttttttttatttttttttcgttcgttatttttttttttattagttttttcgggtttttatgcggagttgttttttttttttagtatatttagagtaagatttttgtttttgtttgaagattttagttttttggttcgattttttttttaatatatacgtttttattaatgtttatagtttgtaggtaggaagttttttttttttttacgatttcgttgtagttttaatttttaggtatggttgatgttcggggttcggggttcgcgttttttttggttttttagataagattaggcgaggaagtataggggtatttttaaatgatttatcgtagtttgttggagagaggtatcgaagttgagtatggttggttgtttggtcgtcggcggtaagttgattggttgttaggttgttggttgtttggttatagacgggcgtacggagatattcgacgtcgttttcgtcgtcgtcgcgtttagcgtcgtttgttttttttttatttaggtagtcgtttagtttgtttcgcgtcgcgggcgggggtgggggcggagtttgaggtcggttaattaacggtaaaggtgtgtgaggcgtcggttaatgggttcgcggggttacgcgtgatcggcgattgttcggtagcgtgaagttggtgttagtggagcgtgtatataattttcggtagcgtgttttttttgttttgtttcggggaattttagaggttatttgattgagtgacgtttttcgtttttcgtttatttttcgtttattttttgtttttcgtttttcgtttttgtttagagaggcggtgtcgcggtcggggaggcgcggcgattgtagcgcgtttaggtattgcggagggttagttttacgtggggggtggggagggatgttcgtttcgtttcgtttttttcgcgtcgggtttcgttttagttcgttacggagtgggcgggacgttaggtaggcgggggacgcggcggttgttagttaaggggtcggagttaagagatttgtattggaagcgttatttttttgcgcgtttgatgaggaagtagaattcggtgatcgattgagttgtatttttgaagtatttgttgggttttgttttattaagtttcggggagtattggggcgcgggatgggggattttgttacggagtcgatatttgttcgcgcgtttttttttcgtttacgtcgtgtcgcgggttcgttttttttatttgtagcgttcgtagcgtttgttcgtttcgtttatttttttttttgggtaatttagaggatggcgtgaggatttttggaagtttagaggatcggattaggggcgtggtggggagtcgtagattcgagtttttatttttttttggcgtcgatattcggttgcggaatcgagtttgagttcggtgtagttgaagtttaaattgtagttgttttaaaggtagattttattttatttttatttttggattaagatttttggaagcgttttgtttggaagtcgtttgtggggagggtttttttagggtttttaggttttcgttggagtacgtttggaggtgggtttgtcggtcgttttttgaaattggtattattatcgttttatttatttattttagttggtgggaggtaggttgggtttttgaaaggaagtcgttcgtgtgttgcgtttgggggttggggttaggttttttgattaggaaagtttatggttttgttttggtacggatttgttttcgtttggtcgtttgtgcgtgattatagtagttgttgttggagaggaaggtagtgataacggggtttaaagtaaatcggagattttattcgatttggataggttgaatttaaggtaaaaattattgtttttttttcgagtatttacgtttttgtaattgaatgaaaggttggtaatgtaaatagtatttttattttagtaattatagaatgaatataggaagggaattaatttttttagaaattgttaatgttatgcgtatttttcgatggtttttttttaatgtatttaaggtttaggttagcgaataatagtaataataatgatagtaatattgttggttaggattagagaggtttagggttgcggggatgaggagggaatggttttttgttatcgttttttttgagtttgttggagaggcgttagtttagtagttcggtagttttttttgtttttttttattttatgtttttgtttttgtttgcggggtgtttttttttataggttttttttcgtttgggttgttttattttgttgatttagtttgagggttggagtagttggttttggatattgtggcgggagaggaagtttttgtatgttttttcggtaggtttatttttttttttgtcgggtttttttttggggtggtttttgttagattttttaggttagaattttgttttttttttaggaatgtggggtttgttggtttggttttttagcgggttaagaagtagggagcggttttgatttgtgagagtgatttaaaataggaaagaaaagagaaaaggggtaggaggaatagtgtggtggtggtataatttttagagatttagagaaatatgtttgtcgggttttttagataatatatttaaaattagaattgttgattttattttttttcggatgcgtgttttgtttttttttagtttttatttttttttttaaagttttggatttgattgttttttaggatttagtagttttgttttagaaatgtttttgtttttattttttatttttattttttaaatgttgtattagattaatttgttattaagttttgttttgattaaataatttgtaatttttttatttaatttttatttatattttagtttattttttattgtttaagttttatattgtgattggaatggttttttaaaagttatgatttaattataatattttttttttaaaaatgatttatggtttttgttgttaggatatgaaaggttatttagttttgagttatttagttagtttttaattataggatttttttaattttttttatttcgttttttatttagatttatttttgtttatagttatagtaaatcgtttgttgttttttaaatatatggtgtatttttatgttttcgagttatatttttatttaggaaatattatgttgtatatgtttttgttcgtttatttattttattcgataattatttgttgagtatttattatgtgttttaggtattgttttagggatagtagtagtgaataagataggttaggggaggtaaagataagtatacgtcgaatatatatatatatatatacgtatatatatataaaagtattattaaggtaggtaagtttatttatagtgtattaaattgtaatagggtggtaagattgtgattgggtaattggtttggtatgagatataggagaagtttgttttaaggagatgtttaagttgaaaattttatgagaggataggaggatttcgggtaagtgtatttaagtagagggagtagttaaggtagttttatagtaggaaggatttggttttatgggatgtaatgtggttggaggtgtagagggtgttagggagagtgggaggggatgaggttggaaagtaaagcgggaggagttagattattgaggaagttataggttatggtttgaaatggggatttttttttttttttttttttttttttttttttgacggagtttcgtttttttattaggttggagtgtagtggtgtgattttggtttattgaaatttttattttttaggtttaattaatttttttgttttagttttttgagtagttgggattataggcgtgagttattacgtttagttaatttttgtatttttagtatagacggggttatattatgttggttaggatggttttagttttttgattttgtgatttgtttgtttcggttttttaaagtgatgggattataggtatgagttatcgtgttcggttcgaaatggggatttttttttaaagtgttaggggacgttatgtataagaaatgtatatttgtagttaggcgcggtggtttacgtttgtaattttagtattttgggaggtcgaggcgggtggattacgaggttaggagattgaaattacggtgaaatttcgtttttattaaaaaatattaaaaaaattagtcgggtatagtggcgggtatttggagttttagttattcgggaggttgaggtaggagaatggtgtgaattcgggaggcggagtttgtagtgagtcgagatcgtgcgattgtattttagtttgggtaatagagcgagatttcgttttaaaaataaaaataaaataaaaaaatatatatttgtatttttgaaggttttttttgtttttttggtttttaagggttttgtattattgttattttgttgaaggttttttttataatatcgggatgaattgatggtttttttttgtttttagcgtatattgtttatatttttatgttgggagtggattagttattttgtaaggaatattttttacgatattgagttttgtttatgttttatttagatttgaatttttgagatggtgattatgtataattatttatatttttgagttaaggttttgtattgttatttaggttggagtgtagtggggtgattatagtttattgaatttttagttttttttgtttaaatgatttttttattttagttttttgagtagttgagattataggtgtgtgttgttatatttggttgattttttttttttttgagatggagttttattttgttgtttaggttggagtgtagtggtataattttagtttattgtatttttcgttttttgggtttaagtgatttttttgttttagttttcgagtagttgggattataggtatttgttattatatttagttaatttttgtatttttagtagagatagggttttattatgttggttaggttggttttgaatttatgattttaagtgatttattcgttttggttttttaaagtgttgggattataggtataagttattgaatttagttttggttgaattttttttttttttttttttttttattatttgtagagtttaggttttattatgttgattaggttggttttgaatttttagggtttaagtaatttttttgttttggtttttttaaagtgtttagattataggtatgagttattatatttagtttataattatttttttgatttagtatttgttttatacgaagtatttaagatttttttttttattggagaaagtaattgtagattggtttttgaagatttattggagttatagataggatatgtgtaaacgtttaggtggaagtgtgggtttttttatgttttttttttagtttgtgttattgtagggttagatatggaaaattgttattttgggcgtgtatatggtttggatgtggtttggttttgtttttatttaaattttattttgaattgtaatttttataat

SEQ ID NO: 313 - DNA, 6283 bp, Artificial Sequence
  chemically treated genomic DNA (Homo sapiens)
ttttttttattaatttattgttaatatagtagttagtatatttttgtttgtttttgagacggaggtttattttgttatttaggttggagtgtagtggggtgattttggtttattttaatttttgttttttcggttttagtgatttttttgttttagtttttcgagtagttgagattataggtatacgttattatgtttggttaattttttttgtatttttagtagagatggggttttattatgttggttaggttgttggaatttttgattttaaatgatttgtttgttttggttttttaaagtgttgggattatagggtgagttatcgggtttggtttagtatatttttaaaatgtaagttagattatatattttatttaaaattttttttatttttatttatttattttagtttagttacgttagtttttttgtttttttttgatgtttttttatatatttttgttataaggttattgtattggattttttttgttttaaatattttttttttaggtatttttatagttaatttttttattttatttaaatttttgattagatgttattttaataaagtttagaattttatttattacgtaatttttttttgtaatttttttttcgttttatatttttttatttggtttttatttttttcgttttattgtacgtattattttttagaatattaaaatttattgtgtttgttttttttgtttttttattttaataatgtgtattttacgagggtagggatttttgttttttttttattagtattttttaagagtttggaatagtgtttggtatatgataggtattatatagattatttgttgaataaatgaggtaatatttaattttttatatttttttgtattaattgtgttattttttgtttttatgtttttatttaggtggtttttagatttaattttagattgttttaggaagagtttttttttgatatttttttttggttagacgtttcgtttttgtgttttatttttattttattatatattttaattatttgtttatgtgtttgttttataattaaattgaagaattttatgagttagggatttttgttttggttcgtttttgttgttttagtttttagtttagagtttggattatattaagtatttaaatggtttgttgagagaattaatatattaaaaattaattatttttataggattatttttatatggttttttttttagtgtttaagatttttttttttttagtgtttaagattttagattttttggttatttttgttttgagtatttatttttaattaaaagttattttttttttttttaattttagagtggtttttaaattttttatgtattttaatttatatgatatgaaagttattttttataattatagatttttggtgtgagaaggattttatatgtattttgtttaatttatttattttaagtttgagttttttttataatatttttattaagtgtttatatatgtttggtatttttgtttgggaatgtattgtttttttaagtggttatttagttttgggagtttttttaatataagatttttttttatattaattggaaatgttttttttgtaattttgaattatttttattttgttttttttatgttaattttttaaaatttaaaatgatttattttttttttttttgtaaggtttttttgtgaatttttttaatgatgagtttttagaatagatttttttaattaggatagtttttatttttttaattagttaggttatttttttttaaatgattaattttttttaaatttgtttagaagtgattgtagtgttttcggtaggaagtttgttttcggaaacgagtagttttttttttgttttggttttgggttgtattagttttgaatttagttatattaaacgtttgttttacggaagtttatataatatttatcgaaatttttgaggttttttttttttttttttaaattttgtgggtttttgagaggtataattgtagttgtttcgtttggtaatttgggtattcggtttgtgggtttaaatgtagattatttgggtagatttgatttttaatttaaaaaaagggtttttttttgtttttgtttttaaagaggtaggatttttttgtcgtttaggtttgtgtgtagtggtgcgattaacgtttattgtagtttcgaatttttgggattaagcgattttttcgtttcggttttttaaagtgttgggattataggtgtgcgttacggcgtttcgttttttttggtttttatgaatgagtgtgtttttaaatttttttaaggggaggatagtgtcgtattttttttttttttttttaaggaggttatgttttgttttttaattttgattaaagcgaggttgaaaagtaaataggcgtttagttttgtattttatatttatatttttcgttttttagtagttttattagtttttcgtttttcgcggttcggttttattagtcgtagtatttttacgtggttttttatattgaagtagaaggggcgatgttttattttcggttgtacgttatttatcgcgtttgtagatttagtagtagtatttttttttaattttttttagttggttgtttgagtaggttttgcgaagcgatagtaatcgttatcgcggcggagtatcgtttttttttatttttcgtttagttcggtttttcgtttttttgcgcgtatgcgtacggcgtcgcgttcgttttcgcgtatgcgttttaacgggatttcgcggtcgttcgttttggtttgtgttgttttttagttatcgcgtagtatattagcggatttagagttgggtatatattagcggatttagaggtgggtacgtaggttagcgttttgttagttcgtcgtgttttggtttggcgttaatgacggtagtattttagtttttttgaggagtttttttgtcgggaaatttttttagggttgggagtagaggagagggagggggttgtagaaatggcggttttattttttaataatttgggtattgtgaatattatttttttaaaggggattttttttggttatttcgtttagagtagttattataatttttgagcgtttattgttagttgatatatattagaaaaatataaattttataaaagtagggattggtttgtttttttttttgtagggtttaggttttggtatatagttggtgtagaaagtgtgtagttttaggttttatttaagtttttagggtattatattcgggatttgttttgtatatttttatttttgttttttattggtattagttttttcgtggaatagtttgagtttttttagatatttaatgtttttttttaagtgttgttatgaagttagatttttatcgttttggggtatttttttttagggatgggaagtatatgtcgttttttttatgtgatttatattttattttggataatttggttattatcgtagtttatttagatttgtttggattttgtttattttagttttagtttattttatttttttaaatttgatcgatagttatttttaatagttttattataaattatttataaaaatggttttaattttgaagtttatttacggagagtatatttgttaggtgtgtggtagatatataggaagtataagatgaggtagtagatttagaggtaaatgatttttttttttttgtttagtggtgattgttagtattacgttttttcgggagaggtgagaaatttttttacgtaagtattggaatttttatagttaagagtggtaatagtttcggttattggatttgggtttgttgaattttaatattttgtgattttatatttgggttgaatttttgttgagtatgatggaatttatatgttttttttttagtttttatttgtttgtatagttggaatatttggttgttttttttggagggatttagtacgtttagagtttagacgttggaattgttaaagtttagaggaaagagttttagttgtaaagtaagagaaatgggttggaattttagttttattttttaatgaatgtttttgattttttttttttttttttttttgagacgtagttttattttatcgtttaggttggattgtagtggttacgattttagtttattgtaattttcgttttttagatttaagcgattttcgtgtttgagttttttgagtagttgggattataggcgtgcgttattacgttcggttaatttttgtatttttagtagagatagtttttggttatgttggttaggttggttttgaatttatgattttaagtgatttatttttttcggttttcgaaagtgttgggattataggttcgagttatcgcgtttagtcgtttttgattattaaaaaaaaattttttttttggcggggggaacgaagtgtttttttgttgtttaggttggagtgtagtgtagtgatttcggtttattgtaatttttgttttttaggtttaagcgatttttttgttttagttttttgagtagttgggaatacgggtgttttttattatatttagttaatttttgtatttttagtagcgatggggtttcgttatgttggttaaggttggtttcgaatttttggttttaggtgatttgttttttttggttttttaaagtgttgggattataggcgtgagttatcgtgtttggttaaaaaatttatgttttaaaaagattagttaagtgtagtagtgagaaggggggaaagagtagagtaaggagttatatttgttgtttttgattattttgaataagttatttaattttttgaggataagttcggagaatgggagagatagttatttatttgtagggttgttgggaggaataagtgatattatgagtgtgtgttaggtgtttgattatagaaggtgtttaattaatttgtaattattaattaattttttagtcgttggtattatttgttatttatttttcgagtgttgttaagttatgggtgcgttttgttagcgttttagtagtggtaaggtttttggttgttagcggcgaattttttttttcgagtatttttttttttgttgagatgaaatgcgatcgggtttttttaagggttaggcgtcgggatttaggcggcgtttaacggttggattagtagtcgttcgcgtcgattcgtataagaaggaatttcgggtttttggattcgttcgttcggttatgttgttgtggtcgttgcggggttgggtcgttcgggcgttgcgttgttttgggtcgggaagtcgcgggagttcggttttaggtttcgggtcgcggagggtgtagcgtcgggtttggtttttcggtaacgcgcgttttggtttcgttttttaggagtttttatgcgtttatttattttcggtttttcggttttcggaattcgttcgagttcgaagcgtttttttcgaggcgcgggatttttttttcggttgcggttgggacgggggcggttatcggtcgttattcgggcgcgagatcgtagcgagcgttgggggcgttcggttttggttttgggatggagagagggtttttaaagagtaggacggatacgttttgaatatttcggtttaaattcggtttttcgatttattttttgtttcgattttttcgattttgggggcgatggggattgggagttgttttaagtcgattttgtttatattttggtgttagcgtgggggaggggggttacgttttcggcgtttttttgttttttttgggagtggggatttatatagaaacgggttattgttatattcgggttttggtgttcgttatatggttgttgagagacgttttagaattatttgtgggacggatgggtagcgatgttcgttttgggtttagaggaatatttgggttttaggtttaaaattacgttcgtcgtttattttttttcgtgtatcgcgagtggaggttgttttgtttttttatttgtttaatatttagtttgtgaagatttaaataaataacgtggaaaatgtaaagtataatgtattaagtgaaagaattcgagtatattgggggtttacgaagttgtagttgtagtttagggtggtatatcggcgagacggtggtgcgcgtttttaatttcggagggcgtttaaaatggaaaatgtttttaggttagggagtgagtataaatattagtgtttttgtggttatgtagtaaattagggtagaggagagttatttaaaagtgagtttaaaaattgatttttttttttttgtaga

SEQ ID NO: 314 - DNA, 6283 bp, Artificial Sequence
  chemically treated genomic DNA (Homo sapiens)
tttataaaagaaaggaaattagtttttaaatttatttttaaataatttttttttgttttaatttgttatatgattataaaaatattaatgtttatgtttattttttggtttaaaaatattttttattttgggcgtttttcgagattggaggcgcgtattatcgtttcgtcgatgtgttattttgggttgtagttgtagtttcgtggatttttagtgtgttcgagtttttttatttagtatattatattttgtattttttacgttatttatttagatttttatagattggatgttaagtaagtggaaaggtagaatagtttttattcgcggtgtacggggaagagtgggcggcggacgtggttttgggtttgggatttaggtgtttttttaggtttagggcgggtatcgttgtttattcgttttataggtggttttgaggcgttttttaatagttatatggcggatattagaattcgggtgtaatagtgattcgtttttgtgtgggtttttatttttagggagggtaggagagcgtcgggggcgtaattttttttttttacgttggtattagagtgtgagtagaatcggtttaaggtagtttttagtttttatcgtttttaaggtcgaaagaatcgggataggaaatgggtcgggggatcgagtttgggtcggaatgtttagagcgtgttcgttttgttttttaaaggttttttttttattttagaattaaagtcgagcgtttttagcgttcgttgcggtttcgcgttcgggtaacggtcgatggtcgttttcgttttagtcgtagtcggggaggaaatttcgcgtttcggaagaggcgtttcgggttcgggcgggtttcggaagtcgaggggtcgggagtaggtgggcgtataggggtttttgggaggcgggattaagacgcgcgttatcgggaggttaggttcggcgttgtatttttcgcggttcggggtttgaggtcgggttttcgcgatttttcggtttaaagtagcgtagcgttcgggcggtttagtttcgtagcggttatagtagtatagtcgggcgagcggatttagaggttcggggtttttttttgtgcgagtcggcgcggacgattgttagtttagtcgttgggcgtcgtttggatttcggcgtttggtttttaaagagattcggtcgtattttattttagtaagaggagaaatattcgaagggagaggttcgtcgttggtagttagaagttttattattgttaggacgttggtagaacgtatttataatttggtaatattcggaggatggatggtaaataatattagcgattgaagggttaattaatgattgtagattaattgaatattttttgtaattagatatttggtatatatttatgatgttatttattttttttaataattttgtaaatagataattgttttttttatttttcgagtttgtttttagagaattaggtaatttgtttaaaatggttagaagtaatagatataattttttgttttatttttttttttttttttattattgtatttgattagtttttttaaaatataaattttttggttaggtacggtggtttacgtttgtaattttagtattttgggaggttaaggaaggtagattatttgaggttagaagttcgagattagttttggttaatatggcgaaattttatcgttattaaaaatgtaaaaattagttgggtgtggtggggggtattcgtatttttagttatttaggaggttgaggtaggaaaatcgtttgaatttgggaggtagagattgtagtgagtcgagattattgtattgtattttagtttgagtaatagagggatatttcgtttttttcgttaaaaaaaaaatttttttttaatgattagaagcggttgggcgcggtggttcgggtttgtaattttagtattttcggaggtcgaggaaggtagattatttgaggttatgagtttaagattagtttgattaatatggttaaaaattgtttttattaaaaatataaaaattagtcgggcgtggtagcgtacgtttgtaattttagttatttaggaggtttaggtacgagaatcgtttgagtttgggaggcggaggttgtagtgagttgagatcgtggttattgtaatttagtttgggcgatagagtgagattacgttttaaaaaaaaaaaaaaaaaaaaaattagaagtatttattaaggggtgaagttagaattttagtttattttttttgttttgtagttggagtttttttttttgaattttgatagttttagcgtttagattttaaacgtattagatttttttagaggaggtaattaaatattttaattatatagataagtaggggttagggaggaagtatgtaaattttattatatttagtaaaaatttagtttagatgtggagttatagagtattagaatttaataggtttaagtttagtaatcggagttgttgttatttttgattgtgaaggttttagtgtttgcgtggaggggttttttatttttttcgggagggcgtgatgttggtagttattattaggtagggagaaggaagttatttgtttttagatttgttgttttattttgtgttttttgtatatttgttatatatttagtaagtgtgtttttcgtaaataaattttaggattaaggttatttttgtgagtgatttgtgatgaagttgttggaggtaattgtcgattagatttaaaagaatgaaatggattgaagttgagatgggtaggatttaaatagatttgaatgaattacggtgatggttaaattatttaagatagaatgtaaattatataaaaggagcgatatatattttttatttttaaaaaggaatgttttaagacggtggagatttggttttatggtagtatttgagaaaaaatattaagtatttgaagggatttaggttgttttacggaagaattagtattagtgggaggtaaaagtaaaaatatgtagaataagtttcgagtgtgatgttttgggggtttggataggatttgaggttgtatattttttgtattaattatgtgttagaatttgggttttgtagggagagaagtagattagtttttgtttttgtggaatttgtatttttttgatatatattagttagtaataaacgtttagaagttatggtggttgttttagacgggatgattaaaggagattttttttaaggaggtgatatttataatgtttaagttgttgggagatggggtcgttatttttatagtttttttttttttttttgtttttaattttgggaggatttttcgataggaagattttttaggagagttggagtgttgtcgttattaacgttaggttagaatacggcgggttaatagggcgttggtttgcgtgtttatttttaggttcgttaatatgtgtttagttttaggttcgttaatgtgttacgcgataattgaaagatagtataagttagagcggacggtcgcgggatttcgttggggcgtatgcgcgagagcgaacgcggcgtcgtgcgtatgcgcgtaagagagcgggaagtcgagttgggcgagaagtaggggagggcggtgtttcgtcgcggtggcggttgttatcgtttcgtagaatttatttaggtagttagttgagaagagttgagggaaagtgttgttgttgggtttgtagacgcgatggataacgtgtagtcgaaaataaaatatcgttttttttgttttagtgtgaaaggttacgtgaagatgttgcggttggtgaggtcgggtcgcggagggcgggaggttgatgaagttgttggggggcgggagatgtgggtgtgaagtgtaaagttgaacgtttgtttgttttttaatttcgttttgattaagattgaaaggtaaggtatggtttttttggggaagaaggagagagatacggtattgttttttttttaggagggtttagggatatatttatttatgaaaattagagagggcggggcgtcgtggcgtatatttgtggttttagtattttgggaggtcgggacgggaggatcgtttgattttaggagttcgaggttgtagtgaacgttgatcgtattattgtatataagtttaggcgatagagaggttttgtttttttaaaaataaaaataaaaaaaaattttttttttaaattaaaaattagatttatttaaatggtttatatttggatttataaatcgggtatttaggttattaggcgagataattgtagttatattttttagaagtttataagatttgaaagaaaaaaaaaaaagttttaggggtttcggtgaatgttgtgtggattttcgtgagatagacgtttgatgtgattgagtttaaggttgatatagtttagaattaggataaggagagaattgttcgttttcgggagtagattttttatcgggagtattgtagttatttttgaataggtttggaggaagttgattatttggagagaagtgatttagttagttagagaagtggaaattattttagttgaaggaatttattttagaaatttattattggaggaatttatagagaaattttatagggaaggaaaaaataaattattttaagttttaaagagttgatatgggagaggtaaaatggagatagtttaaagttataaggaaaatatttttaattaatgtgaggaggaattttatattgggagagtttttaaaattaaatggttatttgggaaggtagtatatttttagataaaagtattaggtatatgtgagtatttggtgaggatgttataaaggagatttaaatttaaggtgagtgggttgaataaagtgtatataagattttttttatattaaaagtttgtgattgtgagaagtagtttttatattatgtaagttgagatatataagaggtttagaaattattttggagttgagggaaggagaaataatttttgattgggagtaaatatttagggtaaaagtgattagaaggtttgggattttgaatattgaaaaaggaaagattttgaatattgaagggggaattatgtgagaatggttttgtgagaatggttagtttttgatatattaatttttttaataaattatttgaatatttaatatggtttaaattttgggttaggagttggaatagtaaagacgaattaggataaaaatttttgatttatggagttttttagtttaattatgagatagatatatgagtagatagttaagatatgtgataagatggagatagaatatagaagcgaggcgtttaattaaggagaggtgttagaaaaaagttttttttagagtaatttagggttggatttaagagttatttgagtaaaggtatggaggtaaaaaatagtataattgatgtagagaaatataagaagttgagtgttattttatttatttaataaataatttgtgtaatgtttgttatgtgttaggtattattttaggtttttgaaaaatattagtgaaaaaaaaataaagatttttgttttcgtggagtatatattattgggatgggagggtaggggaagtaaatataataaattttagtattttagaaggtggtacgtgtagtggaacgagaaaagtaaaagttaggtaagggagtgtaaggcggggaaggagttgtagagaaaagttgcgtaatgaatagaattttaggttttgttgagatgatatttgattaaagatttgagtgaaatgagggagttagttatgagaatatttggaagaagagtgtttgaagtagagaaaatttagtgtagtggttttatggtaggaatgtgtgggaaggtattaagaaagagtaaggaaattagcgtaattggattggggtgagtgagtgaagatgaggaaggttttaagtaaagtatatgatttaatttatattttaaaagtatattaggttaggttcggtggtttattttgtaattttagtattttaggaggttaaggtaggtagattatttgaagttaggagttttagtagtttgattaatatggtgaaattttatttttattaaaaatataaaaaaaattagttaggtatggtggcgtatgtttgtaattttagttattcgggaggttgaggtaggagaattattggaatcggagagatagaggttgaggtaagttaaaattattttattgtattttagtttgggtgataaagtgagttttcgttttaaaaataaataaaaatatattagttgttatgttaatagtagattggtagggaagg

SEQ ID NO: 315 - DNA, 8770 bp, Artificial Sequence
  chemically treated genomic DNA (Homo sapiens)
ttagtttagaggaattataaaattttaagaagttttcgaattaaatatgaatggtgatagtgaagaagaaagagaaatgttattatattaataaatataggttaagtgagtaaaggaagaaacgtgtgtatattttttataataaggttgttttttttttaattttgttattaaatttatagtgtgttttataaatatggatttttagaattatagaaatattatagttttttttttagtttgttaaagtgtttggaatttttattattaagttttaggaagttttgtaagaatattttattaagaaatataatatagtaatatattataatttgtttgaaaaatgagtatgatttattttattagttagtttcgggaaataggtttttgaaagaatggaagttttttaaattttttttttatggagatggttggtagttaaaggagtaggattatagagattttaaattagattgaagggattgagggataaatgagaaaggggaatgttaaggtaaatttttataatggtttgtattattttaagtaataggaattaatttattttagaaatatcgggtttattgttaaaattaatattgtttttagttcgtttttaataatatttattttggggttttttaatattttatttggttattaatagtagtttttatagaaatataaatgaaattaagaattgaatatttatatttatgatgtaaaataaaattatttttttaagtgttttagttaagtgttgataggaaataaaatagaatttatagggatagtggattttttgataagtttgagatgttagtatcgtacgtttttaggtaaagtgtaatagaaggaattgtatttgttattatattaattgttttttttttagtggagggtttttgattttggtattatgatttattgggttattaaggattttagttgtttttttattatggtgggttttgggtttttttatttagtttagataatatatgtaaaggatttgaggtttttagataagaagtaatatttagtagaatttggtatttataggatgatgaaatttatgatattattattttagtttttacggttataatttatagaaagtttttttttatttttagaattagtttttgtagtggttttgaatgtgtaaacgttattttttagtaatgtttgaggtagaatttgaaaatttgaaatatgatttaaagttattttataataattaagttgttatagttatttaaggttgttttttaatatgttttttatgaatttgtttttttaatagagtatagtgtagggaaaaggggagggggtaattgtataaaagatataaaaggtttagttttagtttggtttatgattgttatgttttggaattttgtatagttttagaaagagagtgttattgattattaaaaatatataatttttttttttttatttttttaatttttagaaatatgggttttattatgttgtttaggatagatttaaattttcggatttaaaggattttttttttttagtttttcgagtagttgggattgtagacgtatgttaattaataattaataattaggggttaggcgcggtggtttacgtttgtaattttagtattttgggaggttaaggcgggtggattacgaggttaggagaatcgagattattttggttaatacggcgaaatttcgtttttattaaaaatataaaaaattagtcgggcgtagtggcgggcgtttgtagttttagttattcgggaggttgaggtaggagaatggcgtgaattcgggaggcggagtttgtagtgagtcgagatcgcgttattgtattttagtttgggtgatagagtaagacgacgttttaaaaaaaaaaaaaaaaaaaaaagaattaataattaattaattgttgttgatttttgattaagaaaggtttatgaaatatgtttgagtttagtagggtttttttttatttgttatacgtggtgtttttttttattaggttttttttgttttttttatttgggtaagtatattttttttattgtatggtatagggatataggttgtaagtatagttttacgggaatcgtttaattttaagaggttatgtgtgtttattttatatagtttatgatttataaattttagtattggtgttaaaatggtacgtaatttaggaattttttaaaaatattttatataattagaattttttttttatttaataaggagatatatttttttttttaagtgtttattaaatgttaataaatatttttttttttaaagagttttgtttattttgataaggtttatagtttaaattaaattttttttaaggttttttagtattttatatttttttggttttaatttatttaataaatttttttaaattgtatttttttttttttttataagaaggtattttatttatattttttttttttttttttttttttttttttgatttattaagaaaattgttattggttttgtttatgtgttatataatagaaggggaaaaggtaagggtatagtttaatatagcgttgatttagaaggtggaaaggatagtaaagatcgtttggtggtgggagtggtaatttataagtttagtagtagaattatggaaagtggagttcgaatataatttagggttatagattatttttgtatttgattgttattattttgttataaattttggtaggtaagatgataaagtagttatattaggatagttggtagtggtaggtatgaacgtggttttttaggtttgttatttttttttattgtatttttagtttatgatattagatagtaagatatgagttagataggggtagtggaagttgtaggaggattgaagttatggagttagagatgagaggaaataggttaattttgtttataaaggagtattagtaggagagtggtgtgaggattaatattttatgtagggttttttagatatatgatttttttttgttagtttaattgaaatttaggaggttttttgaaggtgaaattaagatttttttatttttgaagtcgtattttgtttaaggttcgtgtttggttgttttgagaggttgggagataggatattaaaagagtatttgttttataggattttttttgagaggaatggtttagtaagattggttattatgggttttggagtaatataggtttaatgttattggcgattttgttttttttggttgtggaaattgggtaaatgttttaagttttttaatttttatataaaaagtatatataagtatatagtaagtatttgataaatgttattttagattttgttatttttgttagttttggattttagtaaggtttatttataatggatagttgattatttattgtttgaatgttgatagtatatttgtgaataagaagagaggataaataataagaggtttggaattggaagaaattttagttatcggttttaaaagacgaggattagtttttagagaggttattagtgatattttgttttaaatttttttttgttaaaaaagtgttattttttatttagtttttatttttatttttgtaagtttttattggcgagaggaggatatttttttaattaaaaatttgtgatatatggtttgataagtatttttaaatgtaattaaggggattatagtatagaatatttttattcggttttagtttagttaatttagtaaatgatttaaagggtttcgtgtttagagggtagtaagatagtaaaaacgttttaagatttttttttgtatagtatttgtatttttattgtttagggggttgtatttatttttatatgatttattttttttgtgtaacgtatgggggtagggagggaagcgttagtattattagttattagtattttggggtgaattgattattaggataattaaaaatatatttaataaagttttggagatatatggtaagtatcgtgatggattagaagcgatttttaagttgaaatgttgttttgaatgtaatgttagttggatgtttggtgagtagaaatagataaggggaaatggagtaagcgcggtataggggtgagtgttgttttgatttttaagtttatttaagattggggttacggggtcgggtgttttttgggatttacgttttatgtagtttggggtttagagttggtaggaataatggagatggggattaaaggttgttatcgttgttttttttcgaaatgttcgttcgggttttgtttggggttttcgtttacgcgtttattacgtgtatagtttaaattttttagagtcggttcgaggtttgcgggttcgggcgttagggtggtttttagggtttttttttttttttattttttttttttttttttatagttgatgattttttgtagaaaaataattgcgaaaaagaatttattttatttttagtttttattatcgcgatttttatatggatgtgacgtgattttagttttcgaaatgtttaggtgatttacgcggggatatttcggggcggggcgagggagttttttcgggcgtttgtagggatcgggcggggcggggtagcggggcggggtagggaaagggggcggggcggggttcgtaggttcggtcgggcggaggtcgcgcgcgtttttcgttttttgcgttttttggcggtcggttggacgtatttcgtagttcgatttagagagagttacgtgattttggaaagtttcgtggaaattttcgggtttataattcgtatataattgaaacggggtaaagtagattgcgtagtttgtagttttcgtggcgggttaagcgagtttggagttcgcgggggcggagcggtgagagcggtcgttaagagagattatatttttagtcgattttgttagcgagcgagttcgattttaggcgtttatggagcgtcgttttcgttcggtttttgtttcgattttcgtttgcggcgcgtttttgttttgattaggatttgggattttgcgaaaggatcgcggggttcggagaggtaatcgtcgcgtttttcggagaggtaattcgtcgcgtttttcggagaggtaatcgtcgcgttttttcgtgtcgtttgtatcgggtttatcgtagttaagggatgcgggtgtatgttgggtagcgatttttcgggttggtattatatatatggcgttggttttgtagcgattatggaatgggagtatgatggacgaatatgtatgggaatatgaagtgatgggagatgaggttattgatgtagaggatggagatgatagttatggagatatttagttagttgttttttttagataatgtacggaatttaagttgtagttgattggtgaagaggcgtttttcgggtttttcgatcgggtggtcgttggcgttttgtttttttcgtgttttttttggagttaagcgttgtatgtttatggttacgtagattttgtagaagcgttgcggtttttttttaaattgtgtaggattagttcgacggggcgtagggtatcgtagtggtcgttagttcggcggaggtggggggttttagttttagagatagttttttagacgtttacgggtttttgtagggggttggggttttggcgcggggtttagtttttttagtagtagtagtgtaagagaagtatgtatgtagacgtgggtcgttggtttttgttttagtttttattttacggttagattgtttttgttagttggagtcgttttatattttgttatttggttttttagaaaagtagtggtattaagtaaggaaggagtttaattttttttgagttcgttttgtttttcggttttttcgttttagatttttttgttttggaaagttagtttgggttagtgtttttatggtagttttttggtagaattattggttattaaagggatttttggatcgtaattttaatgtattagattattgagtagttaatgaatgttttatttttattgtttaaggtgttgttttgattttttttttaattttttgtattatttttgattttttggagaggtatatttttaaatttggatgaggtatttgttgataaataatttattaatttttataatgtagataaaaatgtttgtttagagtggaaaaataaaataagggggagaagagtttgagtaacggagaagttttgtggaattttagtgataaaagttgagaaattatttttaaataagatagtgaggtaataaatgttaaaaaaaaaaaaagttaagggtaatagtgtattgtttgttatttataatgtatttgaaatatttgttttttaattttaagcgtagagtggtttaagatttggaaatttgggtagtgggttttgatttttaaggaggtagttttataggttgtgtaaggttaattttattaatgagattatattggcgtattcgatattgatatttgtatgttttgtttatggtttatagtttttattattttagatttttggtgaaaaatttttagatttagaagagaaaaataagagttaggtaagtaaaaagagataatattttatttgtttaaaatttttttattgtttatttttttttatttgattgtggtaggtattgtagttataggtttggtgttgtgggattgtaaggggtaggtattgaaagatttggtttttaggtaaaattttgtttttgaatggttgtgggatttgagtagtatttgtaattttattgttttagttgtagattaaggtggtagtgtaattttagggaagggaataaggttatttttgatttttagttttattattaagtatggtgattggtttttagtaggtggttaggtagtgtttgttgggtggatgggtggatggatggatagatggatggatggatggatggatggatggatggatggatggacggacggacggacggatagatgatattgtgaaagagatttttgttgtgttataaaggaaaggtatatgtgttatttttattttgttatgattttgtttaattttatttgtagaggacgtttgatattaaaagagagtattatttgatttagagaatgatttttattatgttttttttagtaattagattaagaattttaatttaaaattattattagaaaatttttgaggagaaattatgggttatttagtttaattttttttttttgagtgggttataagaattattttaatattttattaatggtgttgagagtttagatttatatagaagtagttattttaaaatttaggttttttttttttttttttttataggtttaatatttttattaattggaaagttgttttggtaaataagatgttgtaggaatggaattaataattattgtgaaattttttagggaatgtttttgtgttttgaaaatttttttatttttttggaaattaggaagtgtggttagatattttattaagggttagtaaattatagttggttttttatagtgttttatattggagagattttatattatgttaatttgtattattttgcgttgttggtatgggttgtagatgttggtttttgttatttttttttttttatttgttagagtggttttttggtggaaatttttttttttgtttatttttagatttttattttttttattagttgattatgtttaaagattttagggtgaaaagttaggtagatttgtttttgtgttggtatttggagggtgatgataaaattttattggtagttgagttaaaatgattgagttttaatatttgtttttagaagtatagaatttattgttttattattattttgcggttttttattttttgttttcgtagagatttaggttttatcgtgttgtttaggttagttttaaatttttgagtttaagtgatttttttttttcgattttttaaagtgttaggattaaaggtatgagttattatgtttagtttattgttagtttgttttttattttgatatgaagttcggtgcggaggttttgaaggaatgttgattgtttttaaaattgtaaagtattttgttggaaatggatttttttattgattagaaaatattcggttttaattttttataaatattagaataaattttatgattaaatattttataaatatttttttttggggttaaagaggaaatattaattagtagtttaagtgatagtataaaattgtaagattttttataaagtattttattgtttttttagtatagggagggagtgataatttaagagtttgtttaagagtaggagtgtttggtggtggtttgaggggaggagttatagatttgttagggttattttgagtttttaattggtatttagtattttttaaatttagtgttgtttagggtggttttagaatgaaacgggagtttaagttggttttgaggagtagtatttgttgttgatagatagggttggttttttgataaatattattgaaaatacgggttattttttttttttttagtatttattttttgtttttttttttttgtttaggttaattttttaaagtgatgtaatttaaaatagtttagtgtgagttaatttttggggttagttagtatttcgggagtagaggtgttaagattttttgtttatagattagggtaatgataagattaaatattggggttttttgtaggtagttatagaggagtcgtattaaagttaggttaatagaatggttttttttttttttttttttttttagg

SEQ ID NO: 316 - DNA, 8770 bp, Artificial Sequence
  chemically treated genomic DNA (Homo sapiens)
tttgaaaaggaaaggaaaaaaaaaaagttattttattagtttgattttaatacgatttttttatagttgtttgtaggaaattttagtgtttgattttgttattattttgatttgtaggtaaaagattttagtatttttattttcgggatattagttggttttagagattaatttatattggattgttttaagttatattattttaaaagattagtttaaataagagaaggaaggtagagagtgggtattgaggaggaggggaataattcgtgtttttagtaatgtttgttagggagttaattttgtttgttagtaataggtattgttttttaaaattaatttaagttttcgttttattttgaggttattttgaatagtattggatttggggagtattggatgttagttaagggtttaaagtagttttgataagtttgtagtttttttttttagattattattaagtatttttgtttttgggtaaatttttgagttattattttttttttatgttggaaggatagtaaaatattttatgaaaaattttgtaattttatgttgttatttaggttgttggttggtgttttttttttagttttaaagagaagtatttataaagtgtttaattatgaagtttattttgatgtttataaagagttaaaatcgaatgttttttaattaataaaaaagtttatttttagtaagatgttttgtaattttaagagtagttagtatttttttagaattttcgtatcggattttatattagaataagaaatagattaataataggttaggtatggtggtttatgtttttaattttggtattttgggaggtcgagggaggaggattatttaagtttaggagtttgagattagtttgggtaatacggtgagatttaggtttttacgaaaataaaaaatgaaaaatcgtaaaataataatagaataataaattttatatttttaagaatagatattggagtttaattattttaatttaattgttaatgaaattttattattattttttaggtattaatatagaggtaagtttgtttggttttttattttgaaatttttaagtataattaattagtagaaggaatgaaaatttagaagtagataaggaaagaagtttttattaggaggttattttggtaaatgaaggaggaaaggtggtaaagattagtatttataatttatgttaatagcgtaggatgatgtaaattaatatgatgtaggatttttttagtgtggaatattgtaaaaagttagttgtgatttattagtttttagtagggtgtttggttatattttttaatttttaagaagatgaagaagtttttagagtataaagatattttttaggaaattttatagtgattgttaattttatttttgtaatattttatttgttagggtaattttttagttaataaaaatgttaaatttatggaagagggaggagaagaaatttagattttagggtagttatttttgtgtgggtttagatttttaatattattgataaggtgttgagataatttttgtggtttatttaaaggagagaggttggattagatgatttatggtttttttttaggagttttttggtgatagttttagattgggatttttaatttgattgttgggaaaggtatagtgggagttattttttggattagatggtgtttttttttgatgttagacgttttttataggtggaattgggtaaaattatagtaggataaaaataatatatatattttttttttgtggtatagtaaaagttttttttataatattatttattcgttcgttcgttcgtttatttatttatttatttatttatttatttatttatttatttatttatttatttatttatttatttaataagtattatttgattatttattgaaggttaattattatgtttgatgatgggattaaaagttaaagatgattttatttttttttttgaaattatattattattttagtttgtagttaaggtaatggagttataggtattgtttagattttatagttatttaggggtaaagttttgtttaggagttaggttttttaatatttgttttttgtaattttataatattaaatttgtggttatagtgtttgttataattagatggaaagagatgggtagtaggaagattttaaataaatgaggtgttatttttttttgtttgtttgatttttattttttttttttgaatttaaagattttttattaaagatttaaaatagtgagagttgtaaattataggtaagatatgtaaatgttaatatcggatacgttagtgtgattttattggtagggttagttttgtatagtttgtaaaattgtttttttagaaattaaaatttattgtttagatttttaggttttggattattttacgtttaagattaaagaataaatgttttagatatattataagtggtaaataatgtattattatttttaattttttttttttttaatatttgttattttattgttttatttaaaggtagttttttaatttttgttattaggattttatagaattttttcgttatttaaattttttttttttttgttttatttttttattttgggtagatatttttgtttgtattgtggaaattgatgaattatttattaataaatattttatttaaatttggggatgtgtttttttaaaaaattaaaaatagtataaagaattgaaaaaaaaattaaagtagtattttaaataatgagaatgaagtatttattggttgtttaataatttggtatattaaggttgcggtttagaagtttttttaataattaatggttttgttaaaaggttattataagaatattgatttagattggttttttaaggtaagaagatttgaggcgaggagatcgaaaaataaagcgggtttaaaaagagttaagttttttttttatttaatgttattgtttttttgagaggttaggtggtaggatgtgggacgattttagttgataaagatagtttaatcgtggggtaggggttggagtaggggttagcgatttacgtttatatgtatattttttttatattgttgttattggaaaagttgaatttcgcgttaggattttagttttttgtaaggattcgtgagcgtttgggaagttgtttttgggattgaagttttttattttcgtcgggttggcggttattgcggtattttacgtttcgtcgggttggttttgtataatttgggaaaaagtcgtagcgtttttgtaaggtttacgtggttatgagtatgtaacgtttggttttaaaaaagatacgaaaggagtaaagcgttaacgattattcgatcggagggttcgaggggcgtttttttattagttagttgtagtttaagtttcgtgtattatttgaaaggaatagttggttggatgtttttatggttgttatttttattttttgtattagtgattttattttttattattttatatttttatatatattcgtttattatatttttattttatgatcgttgtaaaattaacgttatgtatatagtgttagttcggggggtcgttgtttaatatgtattcgtattttttgattgcggtgagttcgatgtagacggtacggggaggcgcggcggttattttttcgggaggcgcggcgggttattttttcgggaggcgcggcggttattttttcgggtttcgcgattttttcgtaaagttttaagttttggttaaggtaggagcgcgtcgtaggcgggggtcggggtagggatcgggcggaggcgacgttttatggacgtttggggtcgggttcgttcgttggtagggtcggttgggggtgtgattttttttggcggtcgtttttatcgtttcgttttcgcgggttttaagttcgtttggttcgttacgaagattgtagattgcgtagtttgttttgtttcgttttagttgtatgcgggttgtaggttcggggatttttacgggattttttaaagttacgtgattttttttgggtcgggttgcgaagtgcgtttagtcggtcgttagagggcgtagggggcgaggggcgcgcgcggttttcgttcgatcgggtttgcgggtttcgtttcgttttttttttttgtttcgtttcgttgtttcgtttcgttcggtttttgtaggcgttcggagaaattttttcgtttcgtttcggggtgttttcgcgtgagttatttgggtatttcggaagttggggttacgttatatttatgtggaaatcgcggtgatgggaattggaaatgaaataggttttttttcgtagttgtttttttgtagaaaattattaattgtggagaagaagaagggaaataagaaagaaagaaaattttaaaaattattttggcgttcgggttcgtaggtttcgggtcggttttgaaaagtttgggttgtgtacgtgatgagcgcgtaggcgggagttttagataggattcgggcgggtatttcgagaaaaagtagcggtgatagtttttggtttttatttttattgtttttgttagttttggattttaggttgtatgagacgtaggttttaggggatattcgatttcgtggttttagttttaggtaaatttaggaattagaataatatttatttttatgtcgcgtttgttttatttttttttgtttatttttgtttattaagtatttagttgatattgtatttaaagtagtattttagtttagaaatcgtttttagtttattacggtgtttgttatgtgtttttaaggttttattaggtgtgtttttagttgttttgataattagtttattttagggtgttgatggttgataatattggcgtttttttttttatttttatgcgttgtatagggagggtgagttatgtggagatggatgtagttttttgggtagtgggggtgtaggtgttgtgtagggaggagttttagggcgtttttattgttttattgttttttaagtacgggattttttggattatttattagattggttaaattagaatcggatggaaatattttgtattatggtttttttaattatatttaagaatatttgttaggttatatattataggtttttaattagaaaagtatttttttttcgttagtaaggatttgtagagatgggggtgggggttggatggagggtggtatttttttggtaaaaagaagtttggagtagagtgttattagtggtttttttgaagattggttttcgttttttaaaatcgatggttggaattttttttagttttaaattttttgttatttgttttttttttttgtttataaatgtgttattaatatttaaataatggatagttagttatttattgtaaatggattttgttggagtttagggttagtagaaatgatagggtttaaaatgatatttattaagtatttgttatatgtttatatatgttttttatatgaaggttaagaagtttgaggtatttgtttagtttttataattaaaaggggtagagtcgttagtggtattaagtttgtgttattttaaagtttataatgattagttttattagattattttttttaggaaagattttgtgagataggtatttttttggtgttttgttttttagttttttaaaatagttaaatacggattttagatagaatgcggttttagaggtagaagggttttggttttatttttaggaaattttttgggttttagttgagttggtagaagaagattatgtatttgaaagattttgtatggaatgttaatttttatattatttttttgttggtgtttttttgtaaatagagttggtttgtttttttttatttttggttttatgattttaatttttttgtagtttttattgtttttatttggtttatgttttgttgtttggtgttatgaattgggagtgtagtaaagaggagtgataagtttgaggggttacgtttatatttgttattgttaattgttttgatgtaattgttttgttattttgtttgttaggatttgtgataaggtaatagtagttagatgtaggagtggtttatagttttggattatgttcgaattttattttttatgattttattgttgggtttgtgaattgttatttttattattaggcggtttttattgttttttttattttttaaattagcgttgtgttgggttgtatttttgttttttttttttttattatgtaatatatggataagattaatgataatttttttggtgaattagaaggaaagaaaagaagagaaggagagagtatagatggaatgtttttttatgaaaaaaaggagaaatataatttggggagatttgttgaataagttgaaattaaagagatatagaatgttgaaaagttttgaaggagatttaatttgagttataggttttgttaagatggatagaattttttaaagaagagaatatttattaatatttagtagatatttaggagaaaaaatatgtttttttattagatgaaaaaggaattttgattatgtgaaatatttttggagagtttttaagttacgtgttattttgatattaatgttggggtttatgggttatgaattatgtaaaatgagtatatatgattttttggaattaaacggttttcgtgagattgtgtttgtagtttgtatttttgtattatgtagtaaaaaagatgtgtttgtttagatggggggagtaggaagaatttgatgaaagagagtattacgtgtgataagtgagaggagattttgttgagtttaaatatattttatgagttttttttaattaagaattagtaatagttgattggttgttgatttttttttttttttttttttttttgagacgtcgttttgttttgttatttaggttggagtgtagtggcgcgatttcggtttattgtaagtttcgtttttcgggtttacgttatttttttgttttagtttttcgagtagttgggattataggcgttcgttattacgttcggttaattttttgtatttttagtagagacggggtttcgtcgtgttagttaggatggtttcgatttttttgatttcgtgatttattcgttttggttttttaaagtgttgggattataggcgtgagttatcgcgtttggtttttggttgttgattgttaattagtatgcgtttgtagttttagttattcgggaggttgagagggaagggttttttgagttcgggagtttgagtttattttgggtaatatagtaagatttatgtttttaaaaattaaaaaaataaaaaagaagaaattatgtatttttaataattagtgatattttttttttgagattgtatagaattttagggtatggtagttatgggttaaattaaaattggattttttgtgttttttgtataattgttttttttttttttttttgtattgtgttttattggaaaggtagatttatagaaaatatattgggaagtagttttaggtaattatggtagtttagttattgtagggtagttttgaattatgttttagatttttaaattttgttttaaatattattaaagggtaacgtttgtatatttaaggttattataagggttagttttgagaataaagagaagttttttgtggattataatcgtgagaattgggataatgatgttataaattttattattttatgaatgttaaattttattgaatgttgttttttatttagggattttagattttttatatgtgttatttggattgaatggagaaatttaagatttattatggtggagggataattgaagtttttagtgatttagtgagttatagtattaggattaaagattttttattgggaaggaggtagttggtgtaatgataagtatagttttttttgttgtattttgtttgaaagcgtgcgatgttgatattttaaatttgttagaaaatttattatttttgtgaattttgttttattttttgttaatatttggttgaaatatttgggaaagtaattttattttatattataaatataaatatttaatttttaattttatttatgtttttgtgaaggttgttattaatgattaaataggatgttagaaagttttagaatgggtgttattaggaacgagttagaagtagtgttggttttagtagtaagttcggtgtttttgagataaattagtttttgttatttggaatagtgtaagttattgtgaaaatttgttttgatattttttttttttatttgttttttaatttttttagtttagtttggggtttttataattttgtttttttggttgttagttatttttataaaaaaagaatttgaaaggtttttatttttttagagatttgtttttcgggattggttggtaagataaattatgtttattttttaaatagattgtgatgtgttattgtgttatattttttgataaaatgtttttatagaattttttagagtttaatggtggaaattttaagtattttagtaggttggagaaagagttgtggtatttttatgattttgagagtttatgtttgtaagatatattatggatttaataataagattgggaggggaataattttattgtaggaaatgtatatacgtttttttttttatttatttagtttatgtttattgatgtgatgatattttttttttttttttattgttattatttatgtttgattcgaaggttttttggagttttatgatttttttgagttga

SEQ ID NO: 317 - DNA, 7057 bp, Artificial Sequence
  chemically treated genomic DNA (Homo sapiens)
ttgaagagcggtagcggaaatagttgggaaaagtggttttttttttttttttttttttttttagtggattatttgttagtagtagtatttggttttggtttttagtttaaagttatttagagagggttttaggaagggtgttgagatttttataatagataggaggataaaattaaaaggaaaattaatattagttaagagtgaaattttttataaggttttatttttagagaaaagttttttttattttattagttgtgggggtttttggtttttttgtttttttatttatataatttaaagggaagtttgattgttgatattttttatttatttaaatagaatttatagttagtttttttatttcggagagaggtttgtggggaaaatagatagattaatataattgtagaggaaatttatgttatttatttataataattaatacgggtttttatttataaataaataaatggttaagtatttgagaaaaattagtaatataatgaaaaggattaaaataaataaatggaattgatttagaggaaagagggagaattaagggaattgaagaaaatgtaaatatattttgatatgtattgttagaaaagttagttaagcgttatttttttaggttagaatattttataatttttttttttatttttttaaaataatatttagtaatttggtaaatatttattaattttttataatgtgttaggaattaaaatttttgggtttttttgtttgtttgtttgttttaattattttttttttttaatagttaatggtagaaaaattagataagtttattatgatatgatgtggtaaatgttatgatagattaagtatagaagaggtagggtatagtggtttacgtttgtgtaattttagtattttgggaggttaaggtatgtggattatttgaggttaggagtttaagattagtttggttaatttggtgaaatttcgtttttattaaatttataaatattagttaggtagagtggtgtacgtttgtaattttagttatttaagaggttgaggttggagaattatttgaattcgggaggtggaggttgtagtgagttaagattatgatattgtattttagtttgggtgataaagttagatttttttttaataataataataataaaaagattaagtatagaagagagtattttgttagttggaatagaatattttatttaaatattaatagatagtcgggcgttgtggtttatatttgtaattttagtattttgggatatcgaggttggtagattatgaggttaggagtttgagattagtttagttaatatggtgaaatttcgtttttattaaaaaaattttgtaaaaattatttaggcgcggttgcgtaagtttgtagttttagttatttgggaggttgaggtaggagaatcgtttgaatttgggagatggaggttttagtgagttgagatcgtgttattgtattttagtttgggcgatagagtgagattttgttttaaataaataaataaataaataaaaaatattaatagataagataggagagaattagttttggtatataaataatatgaataagtatagtatattttaggaaataaaattagtttaaaatgtttgagatttaatgagtcgtagacgatgaggagagaaatgtgggtaggggttaatttatttgttatgttaagaatcgagatttttttttttagtttagagttttttaggtatatttagggaaaagaatttttaggaggttttttatataataaataaaatattgttatatttaatttttttatatgtattggaaatgattttttaagtagaaattatgattgtgttttgggttattaatataaaattataattataggtatatttatattaaaaataaattgttgaagtatgatttattgttttttttattttttttttgatatttgttataaattaattattagttagtagaaaagtagtagtagaaaagggtgattaatatttaagaaaattttgtgtaaaaataattgaaaaatgagattttaatttattaatttaattttttttgtaaatttagaaaaagatggttaatatttgattttggttatagatatttgtatgtatttttatatatgtatatattttttggaaattaagtttgataattatttttggacgtgttaggtagttgaagatattaaaacggagttaattttttgttagggagagataggtatgagaggttttgagataaagaatttttgatgtagaattagaaattaaaaaaatagtttaaatgaggaagttggaaaggtagttaattgtggtattatggtagaggattaggtagaaggatgagagaaagagaaggttttaataattgaggtataagtagggtattttggagttagttgttgttagtgtgaaagatggatggggtgggatagaaagagaaatagggagataagttaggatggtataatttagtaatttataaaggagaggatatatgggtttggaataggatgatggtaggggttatggagagaagtggtggtaattaaggtttttggaggaagaagttattgggattggggtaatttggggtaagagagagtgaaaaattatgaatggattttagatttttgatttgggtaattaagtgggtggtgggattatttatagagatacggagaattttaagggagaataggtttggattggaattagagtggtgagataaattaattttagagtatattaaatgtaagatggttttgggatatttaagtagagatttttagaggtagttgtgtttataattttgaagtttaggattttagttatagatttgagatttattataatgaaggtgagattgaaatttatgaaagtttatgaaatttatgaattatttaatgaaattatggagaataagaagagaggggaggagaggagaagggagaaggaaaggaaatagagagaaggaatattaaagttttaagggatataaagaggaaagaagataatatgaagaaggattttgagaggtagaagtttttaagaatagggtgatatagaatttaagtggggagagtatttaggaagatgataataggataataggttaatagagtaatagagaggtcgttaaaaataaattttaagaagtatttagttaaaattattattgagttaataatggtgggattaattttaggggaatattgtgggtagaagttagattgtaggaggttggggattaagaagttgaggtaaggaggttggataataattgtttttttaagttggttacgtgaataaatttgtgatttttagttttttttttttcgggttttggttgagttgattgtagggtttttgtagttttggtatttttaagttgtataaaattgatagtgtagaagtttttgagtttattttggtttttatgataatttttttttagtggaattaaggttatttgtttaagaattaaagtttttgatttgattgattaaagtttattacgtgtatcgaagttatttatttggtagatgtagtgaaaagttatatagatttgggtttaggataggatgttggggcgtgggaggggaagaaagtaggtgttaattatatagatagtatgtttattagagtagtttttacgttttttatttgttttttaaaataattttataggaattattaaagtaattttattatggtttttagattaggtttggatgtgaggtagggatttttatagttgtttttagtttgaaggaaatttgataagatgatgtaaaagttttttagaaatgtgtaattttatatattttagtgatttaatttattgttaaaatttaaggtgtttttaatattgttattgtttatttggtttttattaatatgtaaggagttggtaattatttgttaaatttatgttttaggttaaataaattttaaaaaatttaggatgagaattgtttattgtttaacgtgttttaaattttttttatgtatatttttattagatttttatagtaatttataggataagtaagataggtgtaagtgttttttttgggtatgaggaaattgaggtttaaagagatgaagtgatttgtttaaggtttatagtaatttattggtagagtaaagattagaatttagattttttaattgtagtttattttttttattttgaattgttatattagtattaataattatttaatggattggaatagtgtatataggtagtttagttacgttaagttacgatttttattttaattttaattttagagttttggtttgattttttttaagattttatttatttttgtttttgtaaaatttattttttttgtattatttttttagttaaattttatttaataattattagtatgttttttttgttttatgttatgtagatttgatttgaaaatttgttaggtttttattgagtttagtgattaaagaagtaaagttttgagaagtaattagttgatgggatattagttataaaattaatttaaatttttgttgatatgtgtttttttttttatatattaggttttcgtttcgtattagtaagattgaaattgaaataagtttattgttggtggatgaatttgttattttttttgaaattggtgaatttaaaaagttagatagtgataggaaaatattgttattgtttgttaagaagtttatgatattttaaggtaagaatgaatatatggaagaagaaatttgttttttttttatttataaaaaggaaagtttggaagtgaatgatatgggtataattaaaaaaaaaaaaaaaaataaaaaatttttacgtaacgtttttgttgggagagaagattacgaagtatattttttaggaagtgtgggttgtaacgattgtgcgtttttaattaattttgagtaaggtggttattttgatagtttttttatgttgtttttgttattttttttgttagaagatattattttaattttaatatagtatgatcgaaatatataattaaattttttttcgatttgcggttattggattgtttattagtatgaaaatttttatgtatttatttattgttttttttattatttagatgattgggttagtattttttgttgtgtatttttatagaaggttggataaggtaagatgaattataagtttttattaattaaatttggggtttttattaatttataggttggttttatttaaatgatggatgatggtagaaattaaatagaagaatggttttgtggtataatgtttgttgtttagttaatgaagttttatatttttgtttttggttaggattttgggatttggagttagattgtttgggtttaaattttggttttgtttatattatttttgttattttggggtaagtgttttagtttttatatttgagaaatggggatggtattggtgtttattttatagattaagtgagtttagttttgtaaaaagtttaggagggggtttgatatatagtaagtattatgtacgtattagttataattatttgttaaagttttgttttaaaagtaagttatttttttatggagatagttttttttttttaaatttttagttaggtaagaagagcgttaatttgatttaaaattttataatgttttagattaatatagatatggataagttttagaatttgtagttttttagtaaaagtagtattttttgtgtaattttttataagtattgattgtagttgtaggatgtttagtttttttttgagatgttttatatttttaaatggttagatttgtaggaataaaagagtagagtaatttagtaggttgttttgtatttttaggaaaagaaaattattaggatttattttgtttttatgtatttttttatttttattgaggagtataattggttggtgttgataaaatattaattatagatgtaaaggagaaagttgattagttttttggttgtttttaaaattttggatgtaggaattgtggttagaaagtatttggatgattgtattttattagggatatttgagtgtttttttttaggatttggatttagaattaatgttatgagatttttttaataggataaggtgaggtagtgagggttgaagttatttattgggttatttaaatattaggttttattgttgataaaagagggggtttttggtttggttggttatttgtgtttggtttgatgtgttttgttaattaaatgtatggatataggtttagtttttaaaggggtaatagtgattttagtggattgatatttatcgtattatttatatgtgtttttaattatagtagaagttgttagttaattgaattttgttttgaatttaaaaaatttatttttaaagtaagaaaatggtataaaattagttgataatgtaagtgaattttgtatatttaattattttaagatattggaaaataaaatattttgttattttgaggataaaagatgatttttttaaaaatgtaaatgttttttataaatattaaagttaaaagggagagagatgtaattagaattcgttaattgatatattgtaaattaatttttttttataaagtattgtattataaatattaaaatgaagtgggtaaattagttttgtagaaaattattttttaggttgatgtttataatgattaattattattgaagtaatgagaaatgtgataattatagaatattgttgttatagtatgttgaaaaaatatgtattttgtagtgaatatttagtagaatagttttgatttttatttggagtttttgataatatgatattttaattgttgttttttatagatttttaaattgtaaatataaaatagtaattagttaatataataatttattattttttatttatgtttgaaagttttttttttgttgatgtcgtggaaatgaatgtagaggtagatattattagttgtatttttttttcgaatgatatttattatatttttgttattttaaaataga

SEQ ID NO: 318 - DNA, 7057 bp, Artificial Sequence
  chemically treated genomic DNA (Homo sapiens)
tttattttggaataataaggatatgataaatgttattcggaaggagaatatagttaatgatatttgtttttatatttatttttacggtattaataagaggaggatttttaggtataaatggagaataataagttattatattggttgattgttattttgtatttgtagtttaaaaatttataaaagatagtaattaagatgttatgttattagaaattttaggtagaaattagagttattttattaaatgtttattataaaatgtatatttttttaatatattatagtagtaatattttgtaattgttatattttttattgttttagtaatgattggttattataaatattagtttagaaaatagttttttgtagagttaatttgtttattttattttagtgtttgtgatgtagtgttttataaaaagaagttaatttgtaatgtgttagttaacgagttttaattatattttttttttttttaattttagtatttgtagaaaatatttgtatttttaaagaaattattttttatttttaaagtaataagatattttattttttaatgttttagaataattaaatgtatagaatttatttgtattattaattaattttatattatttttttgttttaagagtagattttttagatttaaaataagatttagttagttggtagtttttgttgtaattaagagtatatgtaaatagtacggtaaatattagtttattgaggttattattgtttttttagaagttaggtttatgtttatatatttgattgatagagtatattaggttaaatataaataattaattagattagaagtttttttttttgttagtagtgaaatttaatatttggataatttagtggatgattttagtttttattattttattttattttgttagaaaaattttatgatattaattttaggtttagattttaagagaggatatttaagtatttttgataaagtgtaattatttagatgttttttagttatagtttttgtatttagaattttaggaatagttagaaaattaattaatttttttttttatatttatgattggtattttgttaatattagttaattatattttttagtggaagtgaaaaaatatatgaaaataaaataagttttgatggttttttttttttaagaatgtaaaatagtttattaagttattttgtttttttgtttttgtaagtttaattatttaaaaatgtaaaatattttagagggagattgagtattttgtaattataattagtgtttgtgaagaattatatagaaaatgttatttttattaaaagattgtaaattttgggatttatttatgtttatgttaatttgaagtattatgaaattttagattaaattgacgttttttttgtttagttggaaatttaaaagaaaaaagttgtttttataaaaaaatagtttatttttaaagtagaattttagtaaataattatagttagtgcgtatatagtgtttattatgtattagatttttttttaagttttttataaggttaaatttatttaatttatgaaatggatattaatattatttttattttttagatgtggaaattgaggtatttgttttaggataatagagatggtatgggtagagttaagatttgaatttaggtagtttgattttagattttaagattttaattagagataagaatatgagattttattgattaggtaataaatattatgttataagattatttttttatttggtttttattattatttattatttgggtagaattaatttatgaattagtaaggattttaaatttagttaataaaggtttgtggtttattttattttgtttaattttttatgaagatatatagtaaaaagtgttgatttaattatttgggtgataagaaaaatagtaagtaaatatataaaaatttttatgttgatgggtagtttagtggtcgtagatcggggagaagtttggttgtatgtttcgattatgttgtgttaaagttgaaatggtattttttggtagagaaggtggtagaggtagtatgagaagattgttaaagtggttattttatttaggattagttaagagcgtataatcgttgtagtttatattttttggaaaatgtgtttcgtagtttttttttttagtaaaaacgttacgtaaaggttttttgtttttttttttttttttaattatatttatattatttatttttaggtttttttttttgtaagtaaagaagaaataagtttttttttttatatatttatttttgttttgaaatgttatagattttttaatagataatggtagtatttttttattattgtttaattttttgggtttattagttttaaggaaagtgataaatttatttattagtaatagatttattttaattttaattttattaatacgaagcgggaatttggtatatggagaaagaaatatatgttaataaaagtttggattgattttatgattggtgttttattaattaattgttttttagaattttatttttttaattattaaatttaatgaaagtttggtaggtttttaggttaagtttatatggtataaagtaaaaaaagtatgttgatggttattaaataaaatttagttggaaagataatgtaagaaaaataaattttgtaaaggtaaagataagtagggttttgagggaaattaggttaagattttggaattgaagttaaagtaaaaatcgtgatttgacgtagttaagttgtttgtgtatattgttttaatttattagataattgttgatgttgatgtaatagtttagaatagggaaaataggttgtagttaagagatttgaattttagtttttgttttattaataaattgttatgagttttgggtaaattattttatttttttagattttagtttttttatatttaaaggaggtatttgtatttgttttgtttattttgtaggttgttgtgaagatttaataaagatgtgtatggaagaaatttgaaatacgttaagtaataaataatttttattttgaattttttggaatttatttagtttaagatatgagtttaataaataattgttaattttttatatgttggtaaaaattaaatgaataataataatattaaaaatattttaagttttgataatgaattgaattattgaagtgtgtaggattatatatttttgaagggtttttgtattattttattagattttttttaaattaaaagtagttgtggaaatttttattttatatttaaatttggtttagaaattatgataaaattgttttgatgatttttataaaattgttttgagagataaataggaaacgtaaaaattgttttgataggtatgttatttatatagttagtatttgtttttttttttttttacgttttagtattttgttttgggtttagatttatgtagttttttattatatttgttaagtaggtggtttcgatgtacgtgatgaattttgattagttaagttagaggttttggtttttagataagtaattttagttttattgaaggaaaattattatgagagttaaaatgggtttaaggatttttgtattgttagttttatataatttgagagtgttagagttgtaggggttttgtaattagtttagttaagattcgagggaggggaggttgaaggttatagatttgtttacgtgattaatttgaaaaaatagttgttgtttaatttttttgttttaattttttgatttttagttttttatagtttgatttttgtttataatatttttttgaaattgattttattattattagtttaataatagttttggttgaatattttttagagtttatttttagcgatttttttattattttgttgatttattattttgttgttatttttttgaatgttttttttatttgaattttatattattttatttttaagggtttttgttttttagaatttttttttatgttatttttttttttttttgtattttttaaaattttggtattttttttttttattttttttttttttttttttttttttttttttttttttttttgttttttatggttttattgggtgatttatgggttttatgaatttttatgggttttaattttatttttattgtgataaattttaaatttataattgaagttttgaattttagagttgtaagtatagttatttttgaaaatttttatttggatattttaaagttattttatatttggtatgttttaaaattaatttattttattattttaattttaatttagatttgtttttttttaagatttttcgtatttttgtgaatggttttattatttatttaattgtttaagttagagatttgggatttatttatgattttttatttttttttgttttagattgttttaattttagtggtttttttttttaaaaattttggttgttattatttttttttatggtttttgttattattttattttaggtttatatatttttttttttgtagattattgaattgtattattttaatttatttttttgtttttttttttgttttattttatttattttttatattgatagtaattgattttagaatgttttgtttgtattttaattgttgaagtttttttttttttttatttttttgtttggttttttattataatgttataattggttatttttttagtttttttatttgggttgtttttttgatttttgattttgtattagaagttttttgttttagaattttttatgtttgtttttttttaatagggagttggtttcgttttaatatttttagttgtttaatacgtttaaaaatgattattaaatttagtttttaagaaatgtatatatgtataggagtgtatgtaagtgtttatagttaaaattaaatattgattatttttttttaagtttatagaaagaattaagttaatggattgaagttttattttttagttatttttatatagaatttttttaaatattggttatttttttttattattatttttttgttagttagtgattgatttgtagtaaatattaagggaaaaataagaaaaataatggattatattttaatagtttgtttttgatgtgaatatgtttgtggttgtgattttatattgataatttagaatatagttataatttttgtttggaaaattatttttagtatatatgaaagagttaaatataatagtattttgtttgttgtatgaagggttttttaagggtttttttttttgaatatatttgaaaagttttagattagaggaaagggtttcgatttttaatatggtagatgagttgatttttgtttatatttttttttttatcgtttacgatttattaggttttaaatattttaagttagttttattttttgaaatgtgttgtgtttatttatgttatttgtgtgttaaggttaatttttttttgttttatttattaatgttttttgtttgtttgtttgtttgtttgagataaagttttattttgtcgtttagattggagtgtaatggtacgattttagtttattgaaatttttattttttaggtttaaacgatttttttgttttagttttttaagtagttgggattataggtttgcgtaatcgcgtttggataatttttataaaatttttttagtagagacggggttttattatattggttaggttggttttaaatttttgattttatgatttgttagtttcggtgttttaaagtgttgggattatagatgtgaattatagcgttcggttatttattaatgtttaagtgaaatattttgttttagttgataaggtgtttttttttgtatttaatttttttgttgttgttgttgttgagaaggagtttggttttgttatttaggttggagtgtagtgttataattttggtttattataatttttatttttcgggtttaagtgattttttagttttagttttttgagtagttgggattataggcgtgtattattttgtttggttaatatttgtaaatttagtagagacggggttttattaagttggttaggttggttttgaatttttgattttaggtgatttatatgttttggttttttaaagtgttgggattatataggcgtgagttattgtgttttattttttttgtgtttaatttattatagtatttgttatattatattataatggatttgtttgatttttttattattagttattagaggaaaaagataattaaaataaataaataaataaaaaaatttagaaattttggtttttgatatattgtaaggagttagtaaatgtttgttaaattattaaatattattttaaagagatagaaggggaagttgtaaaatattttaatttgggagaatagcgtttggttagtttttttagtaatatatgttagaatatatttatattttttttaatttttttaatttttttttttttttttgggttagttttatttgtttattttggttttttttattatgttgttagttttttttaaatgtttggttatttatttatttatgaatgaaaattcgtgttggttattatgggtagatggtatgagttttttttgtaattgtgttgatttatttgttttttttataaattttttttcggaatgggagggttgattgtgggttttgtttaagtgggtaggaaatgttaatagttaggtttttttttaggttatgtgggtggagaggtaggaagattagggatttttataattgatgaagtaaggagggtttttttttgggggtggagttttgtagaaggttttatttttgattaatattggttttttttttggttttgtttttttatttgttgtggaggttttagtattttttttagagttttttttaggtaattttagattgagggttaaggttaaatgttgttgttaataaatggtttattgggggaaaggagagagagggagagggttattttttttagttgttttcgttgtcgttttttaa

SEQ ID NO: 319 - DNA, 6102 bp, Artificial Sequence
  chemically treated genomic DNA (Homo sapiens)
atgaaagtgtagatggtaacgtggtgatggatttattttatgtatttaaattaagttgagaggaagttggaaattattaggtgtggttattgaggtgaatatttagttttaatcggatgtttgttggattttagttaattgtgtttttgattgtaaggggaaaaaaatgaaagagtaagtagaaaaaatagattgttttttagaggtgtaaatttatggtgtgttttattttaggtatgttttggatgattagtatataagtttttttggtgttaagttttttgtgaagtggtgtttatttgaagtgtttaattatagtcgttttagtagtaaattagatgtttggttatttggtaagatttatgtttttttatgttcgttcgttttgaggagaaagtggatatatttatttggtaatttttatttttttttaggtgttttaatgtgggaagtatttacggaaggtagaatgttttttgaaaaatatattaattatgaagtggtaattatggttattcgaggttatcgattttattagtcgaagttggcgtttaattatgtgtatgaggtgatgttgagatgttggtaggaggtatagattttttgtgtgttttttttttgaattttttagggattgggtttggtagatggataatatgtagtttttatagtttagtgaggtggtgtatttttatagtgattttaagttttaggtaggaagttaatttttttaatttaagttttgaataacgggaagaagaatgtaaagatgtggaaaatgttaataattatttcgatatatttaggttgtttttttatttttaagtgggattttttttatggttgtttgagatagggatttggggaataagtttggataagtagttttttttttattggtttatttgtagagttgaagtattatttttttattagagttggtttttttttttaaattttaatttttcgaggtttttgaaagtattgaaatgttattttttaaaagagattagatattaaatgatttttgaaagatagtaatattagtttatatgtattatgtattaggtattatatttagtgttttggatttagtttttaaaataatattttgaggtggagatattttgattgtagttattttgtagatgagaagattaagggttatgaggttgttgtttgtttggggttatttagttatagaatagtataggtttgtttgattttaaagtttagagttttaattatttgttgtattgttttttaagagtattgattgggatgggtagagatattttgggtaggaagtggtgttaaagggagagagaatagtttgagtaaaggtaaggaggtggttataaatatagtgtgtataatagtggagatagtggttttatttaatagatagtttatgtgagggattttgtggggaataagattgggtaataagagggtcgggaagtggtagattatagaggtttttataaatttgtaggatttgattttataggtagtaaaaagatttattagggttttgaagagagatatgaaagtagtgttttagaaacgttagtttagtagtagtatatgtagggtaaattagggtagagataagatttttttggagatgtttgtatgttttagttttaaagtagtgaagtttttttgtaatatgttgtgtttaggagttggagtagtgagaggttttttggaatggattttggaatttatagtttttttttgatttttaattgtagaaattagagggaaggttttttttcgaagatttgttgcgtataatagatgaattagttgaatgtgaagaaatttttggaagataagtgatgtgtgattagtggtttttagatttttaagtataaggaaggatgggtattttgtggtttttaatttattgagtatttggatatgtagattattttatttatatagtggaaatatataaataatttgtttttagattagtttttgtttagatttgtttttagatagaattttttagagtgtggaaatgttgttttagaaatggtgattaaaattatttatttttatttattttttaggtatttgagtgatagttgtttattaggtattgtgtgtagttttagggtttggttatttaggggtgtatatatgggattatgttagttgatgttagttgaaggttagggtatttgggaaggggaagggtattagagttatgattaagtaatttttttttttttttttgatttttatagaaatttgggtttgagatattgtttataattgggttttagatatattaggaatttattttggataaataaatatttattttttgttttgaaaatattttagtttttaagattgtttttagtattatatgaataatatttgtatgttgtatatattgtaaatatatataatatataaagttatatatttatgagaaatacgaattgttttttaattgaaatttttaattttgtagtataggagtttatttttttaggattagagattgtgttttatagttgttaatttatttttttttgaatattaaatatgtttgaagagaagaaagtttagatttttttatgagtaacgttttttttttatttaggtaaatgtgtttggggatgtttgtttagtttaattatatgtatttggtttatgtaattttgtttatggtggtcgtagttaattagaattagatggaaaattaaatcgggtaatttatttttaagttttaagaatattttttgggatatagatattataattggaagtgttgagttttggggtagaaggattaggtgattttcgtaataaagtttgtttttattttatataggattcggaagtagtttgagttgtggcggaggatttaggaagttacggagagaagtagttagtatggtgtttcgtgtttttcggacgttttttaggaggtttggttggatttgggtttttggatggtgggattgttgtatagttttttaggagattttgttgttaagattgtgtgtgtggattttttatttttagaagttttattaagatattaacggaattagggtttttttttttgttttgtgagcgttaaggaaaagaaattatttcggttacgtgagcgttagcgaaaagaaattgtattagttatttagagatcgtttattgtttaatacgttatttttgttgttggtggggtaattagtcgaggaagatatagcgttttttttttaggagttgcgttttttttgtaggttacgatggtttgttttggagtattgggtgaatatataggttggttgttttgggtagcgtttttattttgattttggagaattattttattttattttggttagtttagagtttgtgtattaggtagtttatttattgaaggttgtgtttattttttttttgtgttttttataatggaagaaagtaaattgtttatttcgagttttattataatttgttatatttttttttgtttatttgtttaattgtatttttattataaaaataggtataattttttttttatattttagggtatatgtgtaggatgtgtagttttgttatataggtgaacgtgtgttatggtggtttgttgtatttattaaaaatttattatttaggtatgtattagttattttttttgatattagtttgatatatatattttttgatattagtttggtatgtattagttattttttttgatgttttttttttatttgttttttttaataggttttagtatgtgttgtttttttttttgtgtttatgtgttttatggtttagtttttatttataagtgagaatatgtggtgtttggttttttgtttttgtattattttgttaaggataacggtttttagttttatttatgtttttgtaaaggatatgattttattttgtatagttgtataatattttacggtgtatatgtattatattttttttatttagtttattattgatgggtattttggttgttaattatgtataatttttaattgatttgtagtttattgaaggagtcggttttggtatattttattttattattattgttagtttttttttttttttttttgattttttttttttttattttatatttttttttttattttgaggagttacgggaagtattaggtggtatgaaagagagtgaggagaagatagagtttttgttttaatggttagtgtatgttttttatgggaaaataagatagatagtatttggtaatatttgttaatattttttttaaaaatttttaaatattttttattaagatttagaaaaaaagttttatacgaaagtatagtaaaggtaaaaggtgaagtaaaaataatagttattatttagaatgttaaggagattttaatttaaattaggaaattggaagggcgattagaatatgttgtgtttttattaaagttgttttgttaattagttgatatatggttatgttttttagtgggatgaagtgaaatttttaagtgtgttttgtattgttggtgtttttatattttttagttattttttaattatattttagggttattattagattgattttttttaaataaagtgtttgttgagtgggaggatggaatattttaaatttaatattttagagtttagaatttaattgtttttgttatttacggtgtggttttgggtaagttttttattttgtttgtgtttttattttttttttagtttagagagggtagtttgatttgataattttaaaggtgttttttattaaaattttgtgattttttgaaaatgatgtttgcgagttatttatatttttggggatgagagattaatagtagatatttttagagattgggatggagattattgagtttttttatatatgttattggttgttatttatatttttttgaggtttttagaataggaaaataggtggggttaattttgttcgtgagaaatattttgagcgaattatgattttagttgaaagatgtgtttttgtgagtagagtatcgtagaagaattgaagattgttgtgtgtttttcgtagaaggggttattatgattttttttttttgtgagtaagatgggttttgttatttatttttggggtttgttttggggtttgttatttttgaatagtagaggaagttttttttttttaaggtatagagtttggggatattaaaagataatttttttagatgttgtgatagagttttgttttttatttaaagaattatagtgatgatgtaattttaataaaggtttagtattgagaatataaatgaaagaaaaatagaaagagtgtttagaaatttgtatatgtgtgtgtagaaatgtaattagtatgaagtatttgtttttagaatgagattgtaatgagttttgggttgaaggttaggagattaagttttagttttggatttgttttagtagtggtggattatagtgggtaattttatatatatataaatatatatatatatatatatatataaataaatatttatatttaaggtaaaaggaagagaagttaaaatataattgtgtttatattttgaaattatttgttttattaagtaaatatatagatttaatttttatttttataggggtatttatttataattttatgtagattttcgttatcgaggattttttttaagtaattgaaatttaggtaaaattgatttttatttgtagttagagtttgagtaaaggttaaaataagagttaaagttacgagtttttatttggttaaaagtgtgaatatggttaagtgtgaatattggtttaaatgttttttttttttatatataatattatatatgaagatgttattttaatatttttatagaatataagattattattaaaaataagtgtttgttttaggagaatagagaaagattttttagatattgttatttgtgaagatttttggtttgaaagagttgtgggggatgtttataaatttaaagaaattagaataaaaaaaaaaataagtagaatagttttttaaataagaaggtagtcgttatattaaaattgtaatgtgtttgtttttttataaa

SEQ ID NO: 320 - DNA, 6102 bp, Artificial Sequence
  chemically treated genomic DNA (Homo sapiens)
tttataaagaaataaatatattgtaattttgatatgacggttgtttttttatttagaagattattttgtttgtttttttttttattttaatttttttggatttataagtattttttatagtttttttaaattaaggatttttatagataatagtgtttagggaatttttttttgtttttttaaaataagtatttatttttaatgatggttttatattttataaaaatattaaaataatatttttatatgtagtattatatatgagggaaagagatatttgagttagtgtttatatttgattatgtttatatttttaattaggtagagattcgtgattttgatttttattttggtttttatttaggttttgattgtagataagaattagttttgtttaaattttaattgtttgggaaaggttttcgataacggaagtttatatagaattgtgaataaatatttttgtgaaaataaaggttaagtttatatgtttatttgataaagtagataattttagagtataaatatagttgtgttttgattttttttttttttgttttaaatatagatatttatttgtgtgtgtgtgtatgtgtgtgtatttatatatatataaagttgtttattgtgatttattattgttggagtaaatttagaattagaatttggttttttggtttttagtttagagtttattatagttttattttaaaaataagtattttatattgattgtatttttatatatatatatgtagatttttggatattttttttgttttttttttatttatgtttttaatgttgaatttttattagaattatattattattgtggttttttaaataagaaataaaattttgttataatatttgaggaaattattttttaatgtttttaagttttatgttttggaaaaaaaaaattttttttgttgtttaagaataataggttttagaataagttttaaaaataaatgataaagtttattttatttataggaggaaaggattatggtagttttttttgcggggagtatataatagtttttagtttttttgcggtgttttatttataaaaatatattttttaattgaaattatagttcgtttaagatgttttttacgggtagagttaattttatttatttttttgttttgaaaattttagaagagtataaatgataattaatggtatatataagaaagtttagtaatttttattttaatttttgagggtatttgttattagttttttatttttaaaggtgtgggtgattcgtaaatattatttttaagaaattataaaattttggtaaaaggtatttttaaaattattaaattaaattgttttttttggattgggaaggaaatgaaggtatagatagaataagggatttgtttaaggttatatcgtgagtggtagaaataattagattttaggttttggaatattgagtttagaatgttttatttttttatttagtagatattttatttgggggaagttaatttagtaataattttaaaatgtgattgggggatgattgagaaatataaaaatattaataatataaaatatatttgggagttttattttattttattggaaagtataattatgtgttaattaattaatagagtaattttaatgaagatatagtatattttaatcgtttttttaattttttggtttagattaaggtttttttagtattttgggtgatgattgttatttttattttattttttgtttttgttatgttttcgtataaaattttttttttaagttttagtgaaaaatatttaaagatttttgaaggaaatgttgataaatgttgttaggtgttatttattttgtttttttataaaaagtatatattgattattaggatagggattttattttttttttatttttttttatattatttagtatttttcgtagttttttaaggtgaaaagggaagtatgggatgggaggagggaaggttaggaaggaaggagaaaaggttgatagtgatagtaaggtagagtgtgttaggatcgatttttttaatgagttataagttagttaaaagttgtgtatggttagtaattaaaatgtttattaatgataggttggataaagaaaatgtggtatatatatatcgtggaatattatgtagttatatagaatgaaattatgttttttgtagggatatggatggaattggaagtcgttatttttagtaaagtaatgtaggaatagaaaattaaatattatatgtttttatttataagtgggaattgaattatgaaatatatggatatagggaggggaataatatatattggggtttgttggggagggtagatgaggggagagtattaggaaaaatagttaatgtatgttaggttaatattaggaaatatatatattaggttaatattaggaaaaatagttaatgtatatttaggtgatgagtttttgataggtgtagtaaattattatggtatacgtttatttatgtaataaaattgtatattttgtatatgtattttggaatgtaaaaaaaaagttgtgtttgtttttgtgatgggggtatagttaaataggtagataagaaggaatgtggtagattgtgataaggttcgggataagtagtttatttttttttattatgaggggtataggaaaagaataaatatagtttttagtggatggattgtttggtgtatagattttagattgattaggatgaaatgaaatggttttttagggttagagtgaaggcgttgtttagagtagttagtttgtgtgtttatttaatgttttagagtagattatcgtggtttgtagaggagacgtaatttttgaagggaaggcgttgtgtttttttcggttagttattttattaatagtaagaataacgtgttgggtaataaacggtttttggatgattgatatagttttttttcgttggcgtttacgtgatcgagatagttttttttttttggcgtttataaggtaaaaaggaaggttttaatttcgttgatgttttagtagagtttttaagggtgagaaatttatatatatagttttgatagtagggttttttgagaggttgtataataattttattatttaggaatttaagtttaattaggttttttgaaaaacgttcgggaggtacggaatattatgttggttgttttttttcgtagttttttggatttttcgttatagtttaggttgttttcgggttttatgtgaggtgggggtaaattttgttgcgaaggttatttgatttttttgttttagagtttagtatttttaattatagtgtttgtgttttagggaatatttttaaggtttagaagtagattattcggtttaattttttatttgattttgattagttgcggttattatgggtaggattatataggttaaatgtatgtggttaagttggataggtatttttagatatatttatttgagtgaggagggggcgttatttatagaagaatttagatttttttttttttaggtatatttgatgtttagggggaaatgaattaatagttataaggtatagtttttagttttaagaaggtgaatttttatattataggattaaaagttttaattaaaagataattcgtgttttttataaatatataattttatatattatatatatttataatatatatagtatataaatattgtttatgtaatattaagagtagttttgaaaattgagatgtttttaaaataaaagataggtatttatttatttaagatgggtttttgatgtatttagaatttaattgtagataatgttttaggtttagatttttgtagaagttaaagggaaaaagaagggttgtttggttatgattttaatattttttttttttttaaatattttggtttttaattggtattagttaatatggttttatgtgtgtatttttgaatggttaaattttggggttatatatagtgtttggtaaataattgttatttaagtgtttgaggaatgaatagaaatgagtgattttaattattatttttaaggtaatatttttatattttgggagattttgtttagaagtaagtttagatagaggttggtttagaagtaaattatttatgtgtttttattgtataagtaaaatgatttatatgtttaagtgtttaataaattaaaagttataaaatgtttatttttttttgtgtttgggaatttgggagttattggttatatattatttattttttaaaagtttttttatatttaattagtttatttattgtgcgtagtagattttcgaaagaaggttttttttttggtttttataattaaaagttaaagagaagttgtgggttttagaatttattttaaaaaattttttattgttttaatttttaaatatagtatattatagagagattttattgttttgggattaggatatataggtatttttaaaggggttttgtttttattttaatttattttgtatgtattgttgttaggttaacgtttttaagatattgtttttatgtttttttttaagattttgatagatttttttattgtttgtgaaattaagttttgtaaatttgtaggagtttttataatttgttatttttcgatttttttgttatttaattttgttttttataaaattttttatatgggttgtttgttaaatagggttattgtttttattgttgtgtatattgtgtttataattatttttttatttttgtttaagttgttttttttttttttagtattattttttgtttagaatgtttttgtttattttaattaatgtttttgggaggtagtatagtaagtggttgagattttgggttttggaattagataggtttatattgttttgtagttaagtgattttaggtaagtagtaattttatgatttttaatttttttatttatagagtggttatagttaaagtatttttattttaaagtgttgttttgagaattaaatttaaaatattaagtatagtgtttggtatataatatatgtgagttaatgttattgttttttagaagttatttggtatttaattttttttaggaggtaatattttaatatttttaaagatttcggaaagttgaggtttagagaaagaaattaattttggtaaaaaaataatattttaattttataagtgaattaatgaaaaaagagttatttatttaggtttattttttaagtttttattttaggtaattatggaaggagttttatttggaagtgaggaagtagtttgaatgtatcgaggtagttattagtattttttatatttttatattttttttttcgttatttagaatttgagttgagagggttggttttttatttagagtttgaaattattataaagatgtattattttattaggttataaagattgtatgttatttatttattaagtttaatttttaagagatttaaaaagaaagtatataaaaaatttatattttttgttaatattttagtattattttatatatatagttggacgttaatttcggttggtagagtcggtggtttcgagtaattatggttattattttataattggtgtattttttaaaaggtattttgtttttcgtgaatattttttatattaaaatatttggaaaaggataaggattattaaatggatgtatttattttttttttagggcggacggatatgaggaaatatggattttattaaatgattagatatttgatttgttgttgaagcggttgtaattaaatattttaggtggatattattttataggaaatttagtattagaagaatttgtgtattgattatttagaatatatttagagtaagatatattatgggtttatatttttgaagaataatttgttttttttatttgtttttttatttttttttttttgtaattaaaaatatagttgattgaagtttaataagtattcggttgaagttaaatgtttattttagtggttatatttggtgatttttaatttttttttagtttaatttaagtgtatgagatggatttattattacgttattatttgtatttttat

SEQ ID NO: 321 - DNA, 5722 bp, Artificial Sequence
  chemically treated genomic DNA (Homo sapiens)
tatgttgtttaggttggtttgggatttttgggtttaagcgatttttttgtttttgttttttaaagtgttgggattataggtgttagttatcgtattagtttattgttagaattgatatcgttattgggagtatgattagtattgttattattaatcgttttatgtggtatttttttttagtttttttgggagcggggaatatcgggttttaggtttattcggtttattgtgttttagtatttaattacggagtattgttttaatggttgttgaaaaatttggtattttttaggtcgggtacggtgttttatattagtattatttagtattttgggaggtcgaggtgggtggattatttgaggtcggtagtttaagattagtttgattaatatggagaaattttatttttattaaaaatataaaaaagtagtcgggcgtggtggcgtatgtttgtaattttagttatttgggaggttgaggtaggagaatcgttttaatttaggaggtagaggttgtggtgagtcgagattgtgttattgtattttagtttgggtaataagagcgaaatttttttttttaataaaagaaaaaaggaaaaagaaaaatttggtatttttggtttttaggtattgtattttaagcggcgatagagaggaagtttatagttagttttttcgtagtaggtaggataatagttagggatttttggtttttaggttatttatttttttttagttgtggttttttaagttatttattgggttggatgtataattttaggtattgagggtttagtagataattagacggatttttttttggtgcggttttagaatcgtagataggtaatagaatttgtgtttaaagaaattttttaggggttgggtacggtggtttatgtttgtaattttagtagtttgggaggttaaggttagaggtttatttgagtttagtagtttgagtttagtagtttgagattagtttgggtaatatagtgaaaatttatttttaaaaaaattatatatatataaaagttagttagtcggttaggcgaggtggtttatatcggtatttttagtattttgggaggttaaggcgggaggattacgaggttaggagattaaggttattttggtttatatggtgaaatttcgtttttattaaaaaatattaaaaaattagtcgggtgtggtggtatgcgtttgtaattttagtagtttgggaggttaaggcgggaggattatttgagtttagtagtttgagattagtttgggtaatatggtgaaaatttatttttttttttttttttttttttgagatagagttttattttgtcgtttaggttagagtgtagtggcgcgattttagtttattgtaaatttcgttttttaggtttaagtgatttatttgttttagttttttaagtagttgggattataggtatttattaatatattcggttaatttttgtatttttagtagagacggggttggtggaagtttatttttataaaaaatatatatatataaaagttagttaggcggttgggcgcggtggtttatttttgtaattttagtattttgggaggtcgaggcgtgaggattatgaggttaggagattgaggttattttggttaatatggtgaaattttatttttattaaaaaatataaaaaaattagttgggtgtggtggtatacgtttgtaattttagtttttttggaggttgaggtagaagaatcgttagaatttgggaggtagggattatagtgagtcgagatcgtgttattgtattttagtttagtaatagagtaagatttcgttttaaaaaaaaaaaagttatttaggtatcgtgatgtatatttgtagttttagttatttaggaggttgaggtggaagattgtgaatggtgaatttgggaagttgagattgtagtgaattgagattatagtattgtattttagtttgggtaatagagcgagatttttgttttaaaaaaaaaaaaaaaaaaaaaaaaaagaaagaaagaaagaagagaaatttagttgggcgcggtggtttatatttgtaattttagtattttgggaggttaaggcgggtggattatttgaggttaggagttcgagattagtatggttaatttggttaaattttgtttttattaaaaatataaaaattagttaggcgtggtggtgtacgtttgtaattttagttatcggggatgttgacgtaggagaattgtttgaatttgagaggtagaggttgtagtgagttaagattgcgttattgtattttagtttgggtaatagagtaagattttgtttttttaaaaaaaaaaaaaaagaaagaaattttttatgaaatgttaggttgtaataaggattttgaagaaaatatagtagagtttaggaggttaagttgtttaggttggagtgtagtggtgtgattacggtttattgtagttttaattttttgggtttaagtaatttttttattttagttttcggagtagttgggattaattaatttttttttttttcgagatggagttttattttgtagtttaagttggagtgtagtggtgggattttagtttattgtaatttttattttttgggtttaagcgatttttatattttagttttagattaattttttttattttgggtagagatggggttttgttatattgtttaggttggttttgaattgggtttagatagtattttttttttagttttttgaagtgttaggtttatagggatgagttattgtatttagttaggataagtttttattagtattttattttattttattttattttatttttgagatagagttttattttggcgtttaggttggagtgtagtggcgtaatttcggtttattgtaagtttcgttttttcggtttacgttatttttttgttttaggttgttattacgtttagttaattgtttgtatttttagtagagacggggttttatcgttttagttaggatggtttcgattttttgattttatgattcgtttatttcggttttttaaagtgttgggattataggcgtgagttattgtgttcggtttttattagtattttttttttttttttttttttttttttttttttgagatagagtttagtttttgttgtttaggttgaagggtaatggtgtgatttcggtttattgtaatttttgttttttaagtttaagcgatttttttgttttagttttttgaatagttgggattataggtgtttattattatgtttagttaatttttgtatttttagtagagatagggttttattatgttggttagtttggttttgaatttttgattttaggtgattcgttcgtttttattttttaaagtgttgggattataggtgtgaaagagattattttcgattttttttagtatttttatattgaatgtttatagttgttttgtgaggaggttttttatttatattttttgatttagagagaagtagttatatgttttttggttatggtagttaagattaattttatggagttgggtgttttagtttatatttgtaattttagtattttggaaagttaaggtaggatgattgtttgaggttagaagtttaagattagtttgggtaatatagttagattttatttttataaaaatttaaaaattagttataaaatttaaaaattaataataaaagggtcgggtgcggtggtttacgtttgtaattttagcgttttgggagggtggattacgaggttaggagttcgagattagtttggttaagatggtgaaattttatttttattaaaaatataaaaattagtcgggcgtggtggcgggcgtttgttgttttagttatttaggaggttgaggtaggagaatcgtttgaattcgggagtttgaggttgtagtgagtcgagatcgtagtattgtattttagtttgggcgataagagcgaaattttattttaaaaaaaaaaaaaaaaaaaagtggaagatgaggaagttgattagatattaaggatgagcggatgatttaataggtttttttgttaagatttggttgggtaggtgaaagataaagtcgaggagtggttatggtgtggtatagaagaagggttagaggacggtttttgttatttttttatgtttgagtttttttttttgtgaaatggggataataagagtcgttatatagggaattgttgttaggattaaatgagataatgtatgtgaaacgttttggttgtaggttttttagtaaatgggtacgatttgcggagtggggatttgaatttacgtttggcgggatgtttaagttgttattttgatcgttagggagttttagaggatagggttgtaggtgattaggaagaggattggggtaggtgggcgaggaatgttttttaggagtgaaggagggggaattttagttagtaggatggagtcggttaggtagaaacgagggaaaggagataggatcggatggaacggggaagttaaagggtagggcgtcggagggttgaatggtggtcggtgtagttttgaatatcgaggtgaggatatgtagttgtgttttagggttaggatcgtatacgtttgatttaattttatagtacggaggggaattttaggattcggtcgcgttgtttatatatttcgttttttttttcgtttttcgtaagtttttttttcgttttcgtttatcgagtgttagttaatagtagaagcgatagcgtatttgggtgtcgatttagttaatcgcggttgagtgacgaatgagttttaggattaatgagagtgtcgttattatggtaaaaaaaaaaaaatttaatggtgacgagtagggagaatagagtagttgttaatgggcgtgtgcgttttaggcggttaatgggaggaggcgtttcggcgggggataagtagtagttattcgcgggagcggggaggggttcgggttcgagtttgtgttttttcggaagggtgagtttggacgcgggcgcggaaggagcgcggtcggaggtttttaggaagaagtcgcggggattggttgcgtttgataggttgtatttggatgggagtatttggtgtttcgggattgtttcgatgttcggtgggtgtatattttagttttcgtcgttgtcggtcgggtttagaggttttggggggaggatatgggggcgtgtagtttttttagttgtaaattttatttcgattttgtttttaaagttgggtttgggtttagtggggacgagaaaggaggaaggaggaagtaggtttcgcgaaagttttattttcgggattttatttataatatgaataggtattaatggtaaaggttaattaagcgtttattgtatattaggtattttttttgttttttcgcgttaaatttttttagtagttttttgaggtagatattgttatatgtttattttttagatgaggaaattagtaatatgggtggaagtgatagtttttttatttttatattggcgtttttaggaggtttaggttttggattggggggatggagttggatataaatttttttaggttttggggagttaatagggattgaggttatttatgggggtaaatgtgggagaggagaattgtggtttgaaagaggttattattacgatgaaattaataataattatgttatttttgttttggttatatttgttttttttgtgtgtgtttgaattagg

SEQ ID NO: 322 - DNA, 5722 bp, Artificial Sequence
  chemically treated genomic DNA (Homo sapiens)
tttgatttaggtatatataaaaagaataaatatgattaaaataagaataatataattgttattagttttatcgtggtgatggttttttttaggttataattttttttttttatatttatttttatgagtgattttagtttttgttgattttttaaagtttaggagagtttatgtttagttttatttttttaatttagggtttgagttttttgagggcgttagtatggaagtggaggggttgttatttttatttatgttgttggtttttttatttggaaaatgggtatgtaatagtgtttattttaaaaggttgttgggaggatttaacgcgaggaggtagagaaagtgtttggtatatagtaagcgtttaattagtttttgttattaatatttatttatgttatagatgagatttcggggatggggttttcgcggagtttattttttttttttttttttttcgtttttattggatttagatttagttttgaagatagggtcggagtgaagtttgtaattgggaaggttgtacgtttttatgttttttttttaaaatttttaaattcggtcggtaacggcgggaattgggatgtgtatttatcgggtatcggagtagtttcgaggtattaggtgtttttatttaagtgtagtttgttaagcgtagttagttttcgcggtttttttttgaggattttcggtcgcgtttttttcgcgttcgcgtttagatttattttttcgggggaatataagttcgaattcggattttttttcgttttcgcgggtagttattgtttgtttttcgtcgagacgtttttttttattggtcgtttgaaacgtatacgtttattggtagttgttttgttttttttgttcgttattattggatttttttttttttgttatggtggcggtatttttattggttttggggtttattcgttatttagtcgcgattggttgagtcggtatttagatgcgttgtcgtttttgttattggttggtattcggtggacggagacgggggaggggtttgcgagaggcgggagggagagcgaagtgtgtgggtaacgcggtcggattttggagttttttttcgtgttgtggaattgggttaggcgtgtacggttttgattttaggatatagttgtatgtttttatttcggtgtttaaagttgtatcggttattatttaatttttcgacgttttgttttttggttttttcgttttattcggttttgttttttttttttcgtttttatttggtcgattttattttgttgattagaatttttttttttttatttttgggaggtatttttcgtttatttgttttagttttttttttgattatttgtagttttgttttttgaagttttttagcggttagggtagtagtttggatatttcgttagacgtgaatttaaatttttatttcgtaagtcgtgtttatttgttgagaagtttatagttagagcgttttatatatattattttatttgattttagtagtaattttttgtatggcggtttttattatttttattttatagaggaagaaatttaggtatgaagaggtaataaagatcgttttttgattttttttttgtgttatattataattatttttcgattttgttttttatttgtttagttaagttttagtaaagaagtttattaagttattcgtttatttttgatgtttgattaatttttttattttttatttttttttttttttttttttaagatggagtttcgtttttgtcgtttaggttggagtgtaatgttgcgatttcggtttattgtaattttagattttcggatttaagcgatttttttgttttagttttttgggtagttgggataataggcgttcgttattacgttcggttaatttttgtatttttagtagagatgggattttattattttggttaggttggtttcgaatttttgatttcgtgatttatttttttaaagcgttgggattataggcgtgagttatcgtattcggtttttttgttgttaatttttaaattttgtggttaatttttaaatttttgtagagatggggtttggttatgttgtttaggttggttttgaatttttggttttaagtaattattttgttttggttttttaaagtgttgggattatagatgtgagttaagatatttagttttatggagttggttttaattgttatggttaagggatatgtggttgtttttttttgagttagaaaatatgggtaaaaagtttttttatagggtagttgtggatatttagtatgaaaatgttgaaagagatcgggaatggttttttttatatttgtaattttagtattttgggaggtggaggcgggcggattatttgaggttaggagtttaagattagattggttaatatggtgaaattttgtttttattaaaaatgtaaaaattagttgggtatggtggtgggtatttgtaattttagttatttaggaggttgaggtaggagaatcgtttgaatttgggaggtagaagttgtagtgagtcgagattatattattgttttttagtttgggtaataagagttaaattttgttttaaaaaaaaaaaaagaaaaagaaaaagaaagaaaatgttgatagaggtcgggtatagtggtttacgtttgtaattttagtattttgggaggtcgaggtgggcggattatgaggttaggaaatcgagattattttggttaaggcggtgaaatttcgtttttattaaaaatataaataattagttgggcgtagtggtagtttgaggtaggagaatggcgtgaatcggggaggcggagtttgtagtgagtcgagattgcgttattgtattttagtttgggcgttagagtgagattttgttttaaaaataaaataaaataaaataaaataaaatgttgatagagatttgttttggttggatgtagtggtttatttttataaatttagtattttagggagttaaagaaggagtattgtttgggtttagtttaagattaatttgggtaatatagtaagattttatttttatttaaaataaaaaaaattagtttaaggttgaagtatgagaatcgtttgagtttaggaggtggaggttgtagtgggttgagattttattattgtattttagtttgggttatagagtgagattttatttcggggggaaaaaaaattagttagttttagttatttcgaaggttgaggtgggaggattgtttgagtttaggaggttgaggttatagtgagtcgtgattatattattgtattttagtttgggtaatttgattttttgggttttgttgtattttttttagagtttttattgtaatttgatattttatgggaagtttttttttttttttttttttttaaagagatagagttttgttttgttgtttaggttggagtgtagtggcgtaattttggtttattgtaatttttgttttttaggtttaagtaatttttttgcgttagtattttcggtagttgggattataggcgtgtattattacgtttggttaatttttgtatttttaatagagatagggtttggttaggttggttatattggtttcgagtttttgattttaggtgatttattcgttttggttttttaaagtgttgggattatagatgtgagttatcgcgtttagttgggtttttttttttttttttttttttttttttttttttttttttttttttgagataagaatttcgttttgttgtttaggttggagtgtagtgttgtgattttaatttattgtagttttaattttttagatttattatttataattttttattttagttttttgagtagttgggattatagatgtgtattacgatgtttgggtaatttttttttttttgaggcggagttttgttttgttgttaggttgaagtgtagtggtacgatttcggtttattgtaatttttgttttttaggttttagcgatttttttgttttagtttttagagaagttgggattataggcgtgtgttattatatttagttaatttttttgtattttttagtagagatggggttttattatgttggttaggatggttttaattttttgattttatgatttttacgtttcggttttttaaagtgttgggattatagaagtgagttatcgcgtttagtcgtttggttaatttttgtgtgtgtgtattttttatagaaatgggtttttattaatttcgtttttattaaaaatataaaaattagtcgggtgtgttggtgggtgtttataattttagttatttgggaagttgaggtaggtgaattatttgaatttgggaggcggagtttgtagtgagttgagatcgcgttattgtattttagtttgggcgatagagtgagattttattttaaaaaaaaaaaaaggaaaagaaatgggtttttattatgttgtttaggttggttttaaattattgggtttaagtggttttttcgttttgattttttaaattgttgggattataggcgtatgttattatattcggttaattttttagtattttttagtagggacgaggttttattatgtgggttaggatggttttgattttttgatttcgtgattttttcgttttggttttttaaagtgttgggaatatcggtgtgagttatttcgtttggtcggttggttaatttttgtgtgtgtgtaatttttttagaaatgggtttttattatgttgtttaggttggttttaaattattgggtttaaattgttgggtttaagtggatttttggttttgattttttaaattgttgggattataggtatgagttatcgtgtttagtttttgggaagtttttttgagtataagttttattgtttgtttgcggttttaggatcgtattagaaagaggttcgtttggttgtttgttaagtttttagtgtttgagattgtgtatttagtttagtaggtggtttaagaagttatagttggaggggaatgaatggtttgggagttaggaatttttggttgttgttttgtttgttgcgggagggttggttgtgagttttttttttgtcgtcgtttagagtatagtatttagaagttaagagtgttagattttttttttttttttttttttttattgagagagggagtttcgtttttgttgtttaggttggagtgtaatggtataatttcggtttattataatttttgttttttgggttaaagcgatttttttgttttagttttttaagtagttgggattataggtatgcgttattacgttcggttatttttttgtatttttagtagagatggggtttttttatgttggttaggttggttttgaattgtcgattttaggtgatttatttatttcggttttttaaagtgttgggtaatattggtgtgagatatcgtgttcggtttagagagtgttagattttttaatagttattggggtaatgtttcgtgattagatgttagaatatagtgggtcgagtgggtttgggattcggtatttttcgtttttaaaggaattagaaggaaatgttatatgaggcgattaataataataatgttagttatatttttagtaacgatattaattttaataatgagttggtgcggtggttggtatttgtaattttagtattttgagagatagaggtaggaggatcgtttgaatttaggagttttagattagtttgggtaatata

SEQ ID NO: 323 - DNA, 7131 bp, Artificial Sequence
  chemically treated genomic DNA (Homo sapiens)
gaattaattaagaatttggtatttttttaagtttgataagaaatatttaaagtttattttttttgaagtttgttatttggaggttttattagtaaattaatatttttggtttttataattttttattttaatttagatatttttttttgttgattttaggtttttagataaatttagaaaatttttgaatttatttatgatttggaattttttttttttattttttttttaagttgtcgggtttttttagattgaattaatgtatattttataagtatcgattgacgttttttgtttttttaaaatatacgaaattaaattgtagtttaattattttgggtatatgtttttaggattttttgaggttgtatttcgggtatgtttttaattttggtaaaagaaatttttaaattgattgagatttattttagatattttttggtttatatgatatattgatatgatattttaaattatttttaatattttaattttttatttatatagataatgaagaattatgttatttggatgattaagtttatattttgtaatgattttatatgtaaagaatgtagaggatatagatatttggtttgattgtttatttaatgggtttggaattttatttatttgaattttattatttttaaaattattaattttaaaatttttatgttaggaattgtttagttgtttagagattgtaagtttatgagtgtaaatggttttttgatttttatagaataaaaatattagtttttttttggtaggtaaaatacgtttattgatatgatttttttattttattttaaataataaaaattggttttttttgaatgttttgtttatgtattatttttaatattttaattgatttgaaatgattttggttttgtaaagtatgtttattaaatggttgggtttttttttttttttttaattagtgtaagtattttatagtatttagttttttgaaaagtagaacgtatgttatatttataagttggtatatagttaagaaagtttttttgtgtgcgtgtatttgtggtgaattatttatagtttgtaagatttattaaaatagttttgtttgaaaatttagttttttttatattttttttttgatgatttatattttattgtttttatgtttagattttttttttttttttgttttttattatgtttatttagaagatgtttttttattagttttaaaatttgtatttttatattttgttagtttttattttgaaatatatatatagtaatatgttttgaattataaaattttgtattaaattttaatatttaaaaaaaatatatatttttaatataggtttatttgtttttgttgttatttttatttagtataaatttattaatatttaaaaattattggtatttatgaaatttgaaattttattttattgttaggaagattttggttgtaagaaatataaaaattaatgttaagtggtttaaattataagaatatttaatattttatggatgaatatgaaaatatggtggttttaggattagttgaattagtagtttaataatggttttaaagatttaggatttttttattttttttttttgttatttttttaaatcgattttattaaggcgtaatttatatataatttaattttaagtgtataattagaggaattttgataaatgtataataatgtatttattattatagtaaagaaatttaatatttgtaacgttttaattttttgtagttaattttagtttttcgattttaaataaattattatattatatatatttttttgagtttttttttatatagtattgtgtttttgatatttatatagtttgttgattgtattggtgttttgtttttttttattgttgagtgatagtttattgtatagtagatatagtataatttgtttatttatttattagttgatggaaatttatttttagttttggttattatatatgaagttgttttaaagatttttttataagtttttgtgtggatataggtttagatttattttgggtaaatatgcgaatgttgggttgtatgttaattatatgtttgatattataagaatttgttaaattgttttttagagtggttgtattattaatagtaatataagagagttttaagttgttttaaatttttggtaatttattagtattttttgaaaagtaaaagttttttattttgatgaagttaaattgttaatttttttttttaggtttttagtttttaaattttttatattttataagtgtatatatttaaagattatatagagtttttgttaggttttttttaaaaagtttgagatttagattttgtatttagatttagttgtatgattagttttaagtaaatttttatatggggtgtgaattaagggttgaggtttttttttttttttttttttttgtatatatggatgtttagttgttttaatatttgttgaatattttgttatttttggggttttagattagtatttttttttatttttgtggttatacgatgattgtagttattttaattattatattagagattattttttttaagaatgtgtttagtaaatttttttttatttcgttatttagatttagtatatgtttattttgtattgtttaaattaattatgggaattggaatggggttagtatggtttatttatttattgaagaaggaaatggttgtttatattttttttaggggttggggatatagtagtgacgaaaataggtaaaaatgttgtttgattttatgaaatatataatttattgaaaaagattgttttttgttaaaataaataataaattgtataatatattgttgtatagtagtaggtattgggaaaaatatagggaaagaggttacgaaatattgtgggtgagttgaaattttagataggatgtttaggaaaggttttattgaattgatttttaaataaagatttgaaggaagtgatggagtagtttatacggatattaggttggagagtggtttaggtggtagtaaatgcgaaaagtttttgagaatagtaggttattgtggttgaagagagtaataggatattggggagtgggagtgtataataggtagattagtgttttttttaacgattggtaattttggtaaaatttcgttatgttgggggatattttggttgttaatttgtgtgggagggagtgttgaggagattagggatattgttaaatattttataatgtataggatagtttattttttaattttttttttttttttaaatttttaataaagaattatttaggttgattgttaatagtgtttaggttgagaaatgttgtttaaagttatagcgaagattggttaattgtgagtaaattggaataatattgaattgttttaagtttagtaattatttaagcgttaaggattatgtggttgtttgttgtgaatagattaaagggataagagggtataaaatatttaggagggtaatataattatttagagaaaaaatatggtttgggttagaatgtaggtaagggtgttaagtgatagatgttggatgtattttgaaggttgagttaataggatttattaatattggatatatgtttgtagggagaggaattatttataagtaatttgttgtggttgttattggagttgtttttttttaaaagggagtcggggaagtggtggaaagttaaataaatttggaaaggaggaaagagtatttaatatggatattaggattattatgtatttgttatataaatatttgtaattatgtatttgttatataaatattttaagaaaataagaaaggatattgttggattagtgaatgattaagggtataattattttatggattgtttttttaaaaatatttttttgtttgtttttagaaacgtttttttatgttattttttattttggtgatagtttgaaagatgtagggagttttaattttttattttattaaagttattaaagggttttaattttttttttagtatttgtattttaattaattattggtggttattatgtagaatgttgacgtattaataatttttgtttaagtatttgtttggtttagtttaaaatataagtttattatgagttttttttttttttttttcgagattgagttttttttttgttgtttaggttggggtgtagtggcgcgttttttgtttattgtaatttttgttttttgggtttaagcgttttttttattttagtttgtcgagtagttgggattataggcgttcgttattacgtttggttaattttttgtatttttagtagagatagggttttattatgttggttaggttggttttaaatttttgattttagatgatttattcgtttcggttttttaacgtgttgggagtataggcgtgagttatcgtatttggttattatgagtttttatgtattagaaaattgtttaataaagtttttattttattgttataattttataattaataattttataatttaataataagggttatttttattttatagataaaaaaatttgaagtttgttaattacggtgttaaattattttacgattaatggtagaaataggttttgaattaatatgtttttgagaatttaaacgcggtgagttatatataggtttttttaattggagttttcgttagtattaatagttagttgttcggcgagagttcggtaaggattagttatttggaagttcgtagtatttaggttgtggtataggagatttaatatttttatataaatgtatgtcgtgtttatttcgtattaaattggtttggcggcggtttttcgtttagacgttggcgggttagggtggaggtagtaatatagtttttattttttatgtagtcgcgtttttttttttttttgggcgttttcggggcgtggataggtcgttgaaaggaatcggttgcggtttgtgtgaggtttcgcgggtcgttgtattgcgaggtcgacgtagttggagagaagttaggtaggttttagggagggtaggttcgagtgttgggttcgttttttcgcgggattgtaggttcgggggtttcgtttcgtcgtagcggtaggtaggaggcggtgcgcgcggttcggcgacgggggattttgaggttcggttagttttttgttttggggttttgggtggcgggcggtattttcgtttgtagtgtcggagtcgcggtttcgttcggaaaagggttgtcgtcggagttagatgtcggggatttcgggtcgttttagttttcgggttttagtttcggttcgggtagagtcgttgttttcgcgtttggttttttttttttcgttgggagtgagaataaggcgtttttttttatttacgtttgttaaaagcgggttcgacgtgttagcggaaaagtgggtggagtttttttttttgtcggtgtagagagaatttgtggcgggaagttggggcgcggggttggtcgtaggttttcggcgtgttaagggcggacggattaggcggttgggtcgcgttgtttttcgttatttttcgtagggttaggggtcgcggcggggttggaggttagtttaggtatatgttaatttttgggtattagtttgttcggaaattcgtgttgaggatttattttagttttgggaaggtatttagaagtcgaagggatatttttgatagggacgggttttgagaggttgtcgttttttttggtagatgaattcgggattcgtttttaggatgtatatttcgtagagttttttttatcgttttaagttttgaggtcgttgttttgttttaaagtgtatttattttttttataattatttagaatttattttttaattagtagtttatattttggagattttaagttttaaattagtaaatttgtaataggtattagtttatataatgtattggttaagggaaatttttataaaaattttttttgttttatgatataattaatgttttaggtatagtttattatttaaatttttagtttttgtgtgtttattaggaggaaggtgaatattgttaaagatatacgtagcgattttatttgggataatattgttaagtaaaaaagtagttaagtgaaggaggaaaaattcgttaaaggaaaaatagatatttttttttatggaagttaggaagattatattaagaaaattttatatttacgtatatacgtttttaattaatttttatgttagaaatttttaatagttttaaatatttagaggattatggttatttttatatttaaattatttttaggtatgtatgttggtatatgtatttttttttaagaaatttttttttttaatttagaattttttattgagaaatttgttaatttatgtataattataattagttgattaaagttgtatggttgtgttgtggagattatgtttttgttgttggtggtatagttgtaatttttaaggtaggattgtttttattgtgataaattgagaaagagggtaagaagataaaatgttgagaatattttggtagttcgagaattgatggtttagtattttgttaagttatatattcgtgaaaatttttggtttatttaataaatgtttattgagtatttagtattacggtggtgagatgtttattgttattgtttgtgtttttttaatttaattttgtgtttttttttagtgattgaagatttttttatttttaatattttatatttttagtgatagtaatatttttatgtatatgaaatttattttttttttttattggaaattgttaatttcgtgttttttaaggtgtgttttgtattgttaatatgtgttatagaatttcgaaatgaattttggatgaaatttggttagtttgtttttgtttttttaaaatatttatattttttagattttagtattgtaatgtatgtgaatttttaatttgaatataatgtgtgggtttttttaaattgaattaattttagaattttaatttttgggaatttgggaaagttttttattgaagatattttgggaagtgtattttaagagttttgtttgtttgtttttttttttatttatttattttattttttttgttaataga

SEQ ID NO: 324 - DNA, 7131 bp, Artificial Sequence
  chemically treated genomic DNA (Homo sapiens)
tttgttggtagaaggggtgagataaatgggtaaaaagaaaaataaataaataaaatttttaaaatatattttttaaaatgtttttaatagggaatttttttaggtttttagaaattaggattttaaagttaatttagtttggaaaagtttatatattatatttaaattagaaatttatatatattataatattgagatttaagaggtatagatattttaaaaaaatagaagtaaattaattaaattttatttaaaatttatttcggggttttatagtatatattaatagtgtaggatatattttaagaaatacgaaattaataatttttaatgaagaaagaaaataaattttatgtatatggaaatattgttgttattgagaatgtaaaatgttaaaagtgagaaggtttttagttattagaaaagaatataggattggattgggaagatatagataatggtaatggatattttattatcgtgatattaggtatttagtaaatatttgttaaatgagttagggatttttacggatatgtaatttagtagaatattaggttattagttttcgggttgttaaaatatttttagtattttgtttttttatttttttttttagtttattatagtgaaaatagttttgttttagagattataattgtgttattaataataaaagtataatttttatagtatagttatgtaattttaattaattaattataattgtatataggttagtaaattttttaatgggaaattttgagttaaaagagaaaattttttaggggaaaatatatatgttagtatatatgtttgaaaataatttaaatgtgaaggtaattatgattttttaagtatttaaaattattaagagtttttgatatgaaagttaattaaaaacgtatatacgtaaatgtaaagtttttttaatataatttttttagtttttataaaagaaagtatttgttttttttttaacgggtttttttttttttatttaattgtttttttatttagtagtattgttttaggtagagtcgttgcgtgtatttttaataatatttattttttttttgataggtatataagggttgggaatttggatggtgaattatgtttagagtattgattgtattataaagtaggaaaagtttttgtggaggttttttttgattagtatattatataggttggtgtttattatagatttattgatttaaaatttaaagtttttaaagtgtaaattattgattaaggaataaattttaaataattataaaaaagataaatatattttggggtaaggtagcggttttagggtttgaggcggtaagggagattttacgaaatgtatattttgggggcgagtttcgagtttatttgttaagggaaacgatagttttttagggttcgtttttgttaggggtgttttttcggtttttgggtatttttttagggttaagatgagtttttaatacgagttttcgagtaaattggtatttaggggttaatatgtgtttgggttgatttttaatttcgtcgcggtttttgattttgcggaaggtaacgagaagtagcgcggtttagtcgtttggttcgttcgtttttagtacgtcggggatttacggttaatttcgcgttttaatttttcgttataagttttttttgtatcggtaaaaagagaaattttatttattttttcgttaatacgtcggattcgtttttggtaaacgtgagtagaaggggacgttttgtttttatttttagcggggaaaaaagaattaaacgcggaagtagcgattttgttcgggtcggagttgaggttcgggggttgggacggttcggagttttcggtatttaatttcgacggtagttttttttcgagcggggtcgcggtttcggtattgtaagcggaggtgtcgttcgttatttaagattttagagtaagagattgatcgggttttaggatttttcgtcgtcgggtcgcgcgtatcgttttttatttgtcgttgcgacgaggcggagttttcgggtttatagtttcgcggggaggcgggtttagtattcgagtttgttttttttaggatttgtttaatttttttttagttgcgtcggtttcgtagtgtagcggttcgcggagttttatataggtcgtagtcggttttttttagcggtttgtttacgtttcggagacgtttaggggaaggagagggcgcggttatatggggaatgggagttgtgttattatttttattttggttcgttagcgtttggacgaagaatcgtcgttagattagtttggtacgaaataagtacgatatgtatttgtgtaggagtgttagattttttgtattataatttgagtattacgagtttttaaatggttagtttttatcgagttttcgtcgagtaattaattattggtattagcgaagattttagttaggagggtttgtatgtaatttatcgcgtttaagtttttaaaggtatattggtttaggatttatttttgttattaatcgtaggataatttaatatcgtaattaataaattttaggtttttttgtttgtgaaatggaaataatttttgttgttagattataaggttattggttataagattatgataataaggtgaggattttattaagtagttttttaatatataaagatttatagtggttaggtgcggtggtttacgtttgtatttttagtacgttgggaggtcgaggcgggtggattatttgaggttaggagtttgagattagtttggttaatatggtgaaattttatttttattaaaaatataaaaaattagttaggcgtggtggcggacgtttgtaattttagttattcggtaggttgaggtaggagaagcgtttgaatttaggaagtagagattgtagtgagtagagagcgcgttattgtattttagtttgggtagtaagagggaaatttagtttcgaaggaaagaaaaaaaagatttatagtaagtttatattttagattaaattaaataaatgtttagataaagattattaatacgttagtattttatatagtaattattaataattggttgggatataaatattgaaaggaaaattagagttttttaatgattttgatagaataaggaattggggttttttatattttttagattgttattaaaatgaaagatggtatgagaagacgtttttaaaaataaataaaaaagtatttttaaagaaatagtttatagaataattgtgtttttagttatttattggtttaatagtgtttttttttatttttttaagatatttatataatagatgtataattatagatatttatgtaatagatgtataataattttaatatttatattgggtattttttttttttttttaaatttgtttagttttttattattttttcggtttttttttgagaagaaataattttagtagtaattatagtagattatttgtaggtggtttttttttttataggtatgtatttagtgttagtaaattttgttggtttaatttttaaaatatatttagtatttattatttagtatttttatttgtattttggtttaaattatattttttttttaggtaattgtattatttttttaaatgttttatatttttttatttttttagtttgtttatagtaagtagttatatgatttttaacgtttaaataattattgagtttaaaataatttagtgttattttaatttatttataattagttagttttcgttatgattttaaatagtattttttaatttgggtattattgatagttagtttggataattttttgttgggggtttgggagaaggaggaggattgagagataggttgttttgtgtattgtaggatatttagtagtatttttggtttttttagtatttttttttatataagttaataattaaaatattttttaatatgacgaaattttgttaaaattgttagtcgttgaaaagaatattgatttatttattatgtatttttattttttaatgttttattattttttttaattatagtggtttgttgtttttaagaatttttcgtatttattgttatttggattattttttaatttggtattcgtatagattgttttattattttttttaggtttttatttaaaagttagtttagtgagattttttttaaatattttatttgaaattttagtttatttataatatttcgtagtttttttttttgtattttttttagtatttattgttatatagtaatatattatatagtttattatttattttgataaaagataattttttttagtaaattgtatgttttatgaggttaggtaatatttttgtttgttttcgttattattgtatttttaatttttagaaaggatatgggtaattatttttttttttaatgaataaatgaattatgttggttttattttaatttttatgattggtttagatagtataaaataagtatgtgttgagtttaggtaacgaggtgaaaagaagtttgttggatatatttttggaagagatagtttttgatgtgatggttaaaatggttgtagttatcgtgtgattataaagatgggaaaaagtattaatttaaagttttaggaatggtagaatatttaataaatgttagaatagttagatatttatatatataaaaaaaagaagaaagaaagaaattttaatttttaatttatattttatgtaaaaatttatttgaaattgattatatagttaaatttaaatataagatttaaattttaaattttttagagaaaatttagtagaaattttatataatttttaaatgtgtgtatttataaagtataaaaaatttaaaagttggaaatttaaaagaagaaattgataatttaattttattaaaatgaaaaatttttgttttttaaaaaatattaataagttattaaggatttggaataatttggaatttttttatattgttgttgatggtatagttattttggaaaatagtttggtaggtttttatagtgttaaatatataattaatatataatttagtattcgtatatttatttaagataaatttaaatttgtatttatataaagatttgtaggggaatttttagagtagttttatatgtgatagttaaaattggaaataaatttttattaattggtgaatgaataagtaaattatattatatttattatataatgaattattatttagtaataaaaaggagtaaagtattaatatagttaataagttgtatgaatattaaaaatataatgttatgtaaaagaagatttaaaggagtatatataatataataatttatttgaaatcgaagagttgggattgattgtaaggagttgaaacgttgtaaatgttaaatttttttattgtggtaatagatatattattatatatttgttaaaatttttttagttatatatttaaaattgaattatatataaattacgttttaataaaatcgatttaaaagaatggtaaaagagaaagataggaagattttgagtttttgaggttattattgaattattaatttaattaattttgaagttattatatttttatatttatttatgaagtgttaagtgtttttatgatttaaattatttagtattggtttttatattttttgtagttaaaatttttttaatagtaaaataaagttttaagttttataagtgttaatgatttttaaatgttaataaatttgtattaaataaaaatggtaataggagtaggtaaatttatattgagaatatgtgttttttttaagtgttgggatttaatgtagaattttatgatttagagtatattgttgtgtgtatgttttaagatgaaaattgatagaatatagaaatataaattttggaattagtgaaagaatattttttgaatgaatatgatgagaaataagaaagaaaagagaatttagatatgaaagtagtgaagtgtgagttattagaaaaaaaatatggggaaaattaggtttttaaataaagttattttgatagattttataggttatgaatgatttattataaatatacgtatataaaaggatttttttggttgtatgttaatttgtaggtatggtatgcgttttgttttttaaagaattgggtgttataaaatgtttatattggttaaaaagaaaaagaaaaatttaattatttagtaagtatattttataaggttaagattattttaaattaattaaaatgttaaagatgatgtatagataaaatatttagaaaaagttaatttttgttatttaaagtgagataaggagattatattagtgaacgtgttttgtttgttaaagaagagttagtatttttgttttgtaaaaattaggaggttatttgtatttataaatttataatttttaaatagttaagtagtttttgatatagaaattttgaaattaataattttgaaaataatagaatttaggtaaatggaattttaagtttattagataaataattagattaagtatttatgttttttgtattttttatatataagattattataaagtataaatttaattatttaaatgatataattttttattgtttatataaatgaagaattagaatattaaaaataatttaaaatgttatattaatatgttatgtaaattaaaaagtatttgagataagttttaattaatttagaagttttttttgttaaggttaaggatatgttcgggatatagttttaggaggttttgagaatatgtgtttaggatggttgggttatagtttggtttcgtatgttttagggagatagaagacgttaatcgatatttgtaaaatgtatattggtttagtttggaaaggttcgatagtttgaaaggggggtaggaggggggagttttaggttataggtggatttaaagattttttgagtttatttaaagatttggaattagtagaaaggaatatttgggttaagataaggggttgtggagattaagggtattagtttattgatggagtttttaggtagtaggttttagagagaatagattttaaatgttttttattagatttaaaaagatgttagatttttagttaattt

SEQ ID NO: 325 - DNA, 18283 bp, Artificial Sequence
  chemically treated genomic DNA (Homo sapiens)
  unsure (13090, 13095, 13098..)
tatgtatttatattattattgattaatttaaagagagttaattttgtaaaagttgaggtttttttattgtttttttaaaaaaagtttatagatttggagggtataagtgtagtttttttatggatatattgtttagtggtgaagtttgggtttttagtgtaattattatttgaatagtatatatgatatgggatttaataggtagtattttattttttggagtttttagaatatattattttattcggtatgtttatgtgtattattgtttagtttttatttataatgagaatatagggtttttggttttttgtttttaagttattttatttaggataacgatttttagttttaattatgttgttgtaaaatatatgattttatttttttttatggttaagtagtattttatggtatatttatattatattttaaaaattttagttatttattgatggatatttaggttgattttatgattttgttattgtgaatagtgttataataaatatatggagtgtaagtgtttttttgatagaatgatttttttttttttgggtagatatttagtagtgggattgttggatttaagtatagttttatttgtagttttttgagaaatttttatattgtttttcgtagaggttgtgttaatttatatttttattaatagtgaataagtgtttttttttttttgtatttttgttaatattagttggttttttttttttttttttttttttttggtatttttttgatgattagggatgggattatttatttatatgtttgttagttatttatgtgttatttttggaaaatgtttgtttatgtttttagtttattttttaaattttttttttttaaaaatagggtttggttttgttatgtggggttggagtgtatagttgtgattttgggttattatagttttaattttttaggtttaggttatttttgggttgataaaagtttatagttgttattagtaaaggagaatttgtattttgtttttaggtaaaaaagtaagaggatatggggagttttttttttatttattgttttaggtttaaaaataatttttatgttaaaaatatattttggggtgatatatttttttttttttttttttttttatggtagaaggtaaaggagaaataggtattttttttatagggtggtaggatggagtgagtataaggagaggaaatgttagacgtttataaaattattagattttgtgagatttattattacgagaatagtatgggggaaaatgtttttatgattcgattattttcgtttgattttgtttttgatacgtagggatttatggggattataatttaagatgagatttgggtagggatatagttaaattatattatttgggatttaattttaagatattttattatatatatgtatatattttaaaatttgaaaaaattttaaatttgaaatattttaggttttaagtgttttggataaggtatatttaatttgtgttattgttgttttttagtgaattatatggttatttatttagttatagttaagtttaaaatttggtagttattttttatttttttttttttttttatgttgtatttaagtaatttgtaagttttgttgattttttttttaaattatatcgttaagtttttttatttttttttgtttttattgttattattttattttaagttaatatgattttattgttgaattattgtatagttttttgtttttaatttggtttttaatgtaatttatttttttttatgtaataatggttttttaaaaaatggaaattagtagtttggttaatatggtaaaattttatttttattaaaaatataaaaattagttaggtatggtggtgtatattttgtaattttagttatttaggaggttgaggtaggagaatcgtttgaatttgggaggtggaggttgtagtgagttaagattacgttattgtattttagtttgggagatagagtaagattttgttttaaaaaaaaaaaaaaaaatggagattagattatatggttattttgtttaaaattgtttattggatttttattgtatttggaatagaattttaaatttttaagtatttgatttggttagtttttgtttattttattttgttttatgtttattttttgattttcgtaatagtagttatattttttattttttgtatatattaggttttttttttattttagagtttttgtattgaatttgttatattgtttatttagaatgttttcgtttttttttatttttgtttagattttttttttgtttttggttttagtttgttacgtttattaaagtaatgtatttttttattttagtttattaaagagatttgtaaaaattgaaaatgttatttttatttttttaatttttttttgaaaatagttttttttttggtaaaaatatgttattaatataatgggtttattgttattttagaattaataggtatttaaattttttattaaaattttaggtttaattttaaatatagtaaatattgatagttataatataaataaaaggtttttggagattttagtaattttaatttttaattatgataaagtattagaatttattattttaattattcgtagatgtatagtttagtaggattaaatatatttataatgttgtatagttatttatttgtagaattagatttttagaattagaaaaattttaaatattttatgtaagtagaattatataatatttgttttgatgtgtttggtttattttatttagtattatatttttaaggtttatttatattgtagtatatattaatattttattttttttatggttaaataatattttattatatgtatagattattttttgtttatttatttattttttttttattttaaattatgttataagtaattgaaaatgtaattattaattattggtaatttaaatagaagatttattgattaaatagtaaattatatggtatagagtttatatatggatagaatgtggatgatgaagatttttttttatatttttttttttataattcggagaatgagatatttaatttggtatttgaaatttttagttataattgtggtaatttttagttatttaatttttttatttgttttttgatgttgaaagtattggttttataaaggataattttattgaaaatataagttttgttattttaaatagttaattatttatattaaagttattttttttttaataaggttaagttattattttattttttaattttttttaaggttgttttagttttgttattttattattttattttgttatttatattgatttagaataggggttggtatatagtaggtgtttaataaatatttattgagtgaatgagtgtttttagatatatagttaaataaatatttttttttttgttttttttgagatggagtttcgttttgtcgtttaggttggagtgtagtggcgcgattttggtttattgtaagttgtattttttgggtttatgttatttttttgttttagtttttcgagtagttgggattataggcgttcgttattatgtcgggttaattttttgtattttttgtagaggtggggttttattgtgttagttaggaggatggtttcgattttttgattttgtgatttatttatttttgttttttaaagtgttgggattataggcgtgagttatcgtttttggtttataaacgttttttaatattatttttgtagattatatattaaagttatgtattatttgtaggttttattagtttaatttttataaagtattattatttttaggtttttaaattttttttaattttgtttttgtttataattagttagggttttgtttttagaatttttaaatttagaggatttatttaaaaatttttaatatttaggttgggtatggtggtttatgtttgtaattttagtattttgggaggttgaggtaggtggattacgaggttaggagtttgagattagtttggttaatatagtgaaatttcgttttttttaaaaatataaaaaattagttgggcgtggtggcgggcgtttgtaatcgtagttatttgggaggttgaggtaggataattatttgaattcgggaggtagaggttgtagtgagtcgagatcgcgttattgttttttagtttgggcgatagagcgagatttcgttttaaaaaataaataagtaaataaaaataaataagtaaataaatttttaatatttaaaagtttttaatattatattgttatgtttttaatttttattaagttatagagttagattgttagtaaaggtagttattttttggtttttgtgtttatgaattagattatagttatttttttgattttggttttgtggttttttgaattatttaagtgatgtaaaagatgagttttgttaggcgtttttttttttttaaaagtgtatttcgtgttttattgtaaatagattttttttaaggaaatttttttttttagttttattttattatttttttataaaatagagatatattaatttttatattgttttattattaggttatttgttatatatatatatgttggtttttattttatttatattttaaaagtgtttttagagattttgaagtaattttattttgatttagttttttgcggattgttggaaatttttttttaggttattttttatttattttgggaattgtgaatgtttattattttattggttttttttggttattgagtatatgagtaaatgttatatgtatgtggtattgtttgttagagaatggaattttaagattttttttttatatagaatagtttaatttttgtgtttttgggtagaggtatggtttttgggatagttttttttttatttaatagttatggtagagattaggatattttattttgttgtttgtgcgttgaggttttagaatttgttttattcgatttaataggtatggtttagagttgatagttttagggaggtttgataattatattaattaagtgtgaatgaagattttaaaaaatttattttatttgttattgtttttgtttttatttttggttagtgaaagtttgtgtgtttttttgggggaatattttatagtaggattttaataaatattgaatggaagaatgtatggataatatgtagtattttgtaataataagatatagatggtttgatgtgaagaatttaagttatattgaaaattgttgaataatttattttatataatttttaaaagaagttattaaaatttattagttttttagagaatatatagttagataaagtagaattttggtaagataatgtttataaaatatttgaaaatgtttaaattaaaaatttgtaatattaattttttttattattatttgataaatttttaattaaattgataaaagttattgaatgattaattggtgaaaagtatttttaataaaattaaatatgaagtttaggaatttttttaattttagttttattattttgggttttaatttttttaattatgataatttattttgtataagtggttattttgttttgttttatttttgttgtagtttgtaattgtagtaatagaaaaaaaatgttttttttaaattgtgataatatatttttgttatttaggttttttatatgtgagtgaaaattagtttttttttattttattttaaatttttgatttatttttatagtagtgaataatggaagataagttaatttgatatttaagttatttaatttatagtagttattttattttgtttaaaaataaattatttttagtttatatatttgtatttgggcgtatatagtatatttgaattatttagatatgtttgttttaattaatgaggaaagtgatatagattatagttattgggtaatattgatatttatttgttttttttataggtttttgtttttttttgtttttgtttttattttttattttgtttttttttatttagtttttttattttttatgatttaaaatatgttcgtttttagttttagaaaaatgttagggtgtttttttttttgaaaaagttttttttttgtttggtgttaatgggtagaatggtgtttaagtggatattttgtgtagatagattgtgtaggaaattgattttaagttttttgagaataaaagaggagtgggaagaaagaagaaaggaaggaaataagattttttgatttaattaaaaagatcgtaaaattagagacgggaagaaggggaatggggaataagaaggattgttttttaagttgtggtttttttagtattttggttttaaaaattatttttattttatagttattattttatatattttagaaatataatattgtttggtttgtatatattttttaaatttatataaaatcgtgttgtagattttattttgttttttttttttgttagataatataatttttaggaagttgatttgtttttaagagtttttttttgggtttagagtttttttttattataaatatgtttttgcgtattgatagtttgttattttattgttattagtgtagaatttttattaatttaattttttttttttttaaagatagggttttgttttattgtttagattggagtataatggtgtgattttggtttattgtaggtttaattttttaggtttagataattttattttagttttttgggtagttgggattatagttgtgtgttattatgtttagttaatatttaattttttttttttttttttttttgagatagagttttgttttgttatttaagttggagtgtagtagtttgattttagtttattgtaatttttgtttttcgggtttaagtaatttttttgttttagtttttcgagtagttgggattataggtattcgttattatatttagttagggttttgttatgttggttagattggtttcgaatttttgattttaggtgatttatttcggttttttaaagtgttgggattatagacgttagttattatatttgatgaagttttatgatgttgtttaggttggttttgaatttttggttttaagtgattttttcgttttggttttttaaagtgttgagattataggtatgagttattgtgtttggtttgcgtttatttagtttaaatgtttatttaattttaagtttgaaattttgttagattttagagttttgttttatattttttttttttatagtattttttgtgagtaaggatgtatatatagtttatttatttagtaaattttttttgagagttttttatatgtagatattgttttggagttattgtttagtgaataaaatagataataattttggtttttataaaatttatattttagtaaggagatttagatatatgaatataataataaataagtaaattatatattatgtttggtggtaataagagttatggagataaaataaattaggaaaggagttagtgggggatgtgagagtgttattaagaatagatgtattttaaaatggaataattagagaatgatatattgagaaggtaatatttggtgaaatgttatggggaagagtgttttaggtaaaaggaaaagttagcgtaaaggttttgaggtagaagtgtgtttgttttgtttaagtaatagtattgatgttagtggttagaataaggtagaggaatagtagtaggagatgttgggtaagattaattgtgaaggattttgtagggtttttaaggattttagtttttattttaaaatggggaatttttgaagagttttgaatagaggagtagtaatttgatttatgttttgaaagatggttggtatgttgagaataaatagtagggaataagtacggaagtatggaaattaggagtttagtgaaatagtttatattagtggttttaatttttttggtattagggattagttttatggaagttaatttttttatagattgggtggggagcggtggttttatatgaaattgtgttattttagattattaggtattagattattataaggagtatttaatttagattttttgtatgagtagtttatagtaggttttagtttttgtgagaattaaatgtttttattaatttgacgggaggtggagtttaagcggtaatgttcgttggttcgttgtttatttgttgttgtgtggtttagtttttaataggttatagatttgtttgtggtttaggggttggggtttttttatttagatgatggtggttatgaagtggtattgaatgagaagtggttagattttggatatatttttgaaggtagtgttaatggaatttttgagtgaattggatgttgtttgtgagagtaagaagggagttgtgttcggaattggtgggtttttggttttattgattttaagaatgaagtcgtagattttcgcggtgagtgttatagtttttaaggtggcgtgtttggagtttgttttttttgatgtttagatgtgttcggagttttttttttttggtgagttcgtggtttcgttggtttaggagtgaagttgtagatttttgtagtgagtgttatagtttttaaggtagcgcgtttggagttgttcgtttttttcggtgggttcgtggttttgttggttttaggagtgaagttgtagatttttgcggtgagtgttatagtttataaaagtagtgtggatttaaagagtgagtagtagtaagatttattgtaaagagcgaaagaataaagtttttatagtgtggaaggggattcgagtgggttgttattgttgggtgggtggtttgtttcgcgggaaggtagttaaggtttagcgagaaattgagcgtagtatcggtgggttggtattgttgggggatttagtagattttttatagtcgttggtttaggtgttaagttttttattgttcggggttgatagggttggtcggttgtttcgagtgtgagtgcggggttcgttaagtttacgtttattcggaattttagttggttcgtaagcgcggtaggtagtttcggtttttgttggcgtttttttttttatatttttttgtaagtttgagggagtgggtttcggttttggttagtttagaaaggggtttttatagtgtagcggtgcgttgaagggttttttaagtgttattaaagtgggagtttaggtagaggaggtatcgagagcgagcgagggttgtgaggattgttagtatattgttattttttagagttatgaaggattttatggtttttggttttaatatttgaaaagatggaattgttattaattgaaatggggaatttagtgagagaaataaatttggagggaaggatggatgatagttttgtatattgagttttaatggtgttattagtgattttttatttttatattttgaagtttagtatagtgttttgtatgtggtatttatttaaattattagggatttttttttttttaataaatatttaaaataattaaataggttgggcgcggtggttcgtgtttgtaatcgtagtattttgggaggttaaggtaggtggatcgtttgagtttaggagtttgagattagtttggataatacggcgagattttgttttaataataataattaaataatatttgatagttattggaaaatttttttaaattggtagtattttggagtttgaaaagatttttgggttattttttggagttgtaattaaagtaattgagttattagtatgattaatatttaggtagggggtaggttttatagtgaggtttaatgttgtgtgtttaaaatattttagttgtttttagaaatataagaaattttaagttgtattgtagattttttgagcgtttattttgagagtttgggttgttgtagatgtagtaggcgttgatatgggaggagttggtattatttgatagtagaggggtttatggaggtattagtttaattaattattttttttaaatttgttgtggatgtaaggtattcggtttagaattggtttttagttagtggtttatagtagttttatagtgttcgtggcgttttttatgtttattgtggaaatttagtttttggttagtttttgattgtgtgagtttaggaagttgtttaatattgtattattgtttttatttttagggtgattaaattattgttttgtaaattttaaaatttaatatattgagttttataaagtaaggtataattatatgatatttgttggttttgttttgataggggttaagagttggtttttgtttattattatttttaatttggttgttgatagtattaaagttttttttattgttgagttttttttttataattttaaataaggggaattttttttgtattacgaataattaaataaattgataattattaaatagagtatttataaatattgtaatgtgttattagtgttattggtaaaaatatatatatatatttataagtgtggattatgtagtgtttagtaatgggtgttaataaatatggatattttttgtattttttttggtattttttttattttaataaaggattggtattttgtagttagtggaaattttgttagagtagataatttttgtattagaataaagataaatacgatatatgaaatcggtttgaagaatgttttttataatatggatttttgttgatttggttattttaaattggttattttggtatagaatatagttgtttttatttattataattttgtatttaaataaggaataatataattattttaattttttatgatattagaattttttttaagtttattataatgtaaaataaaattgaattaattggaattttaaatatatattttttttgagagaagggaatatgaaattttgaaattggagaattatagagttaatttataataggaatttttgtgtgtatattatgtagaagttatgaagttttttttttttttttttttgagatagggttttattttgttgttatttaggttggagtatagtcggcgattttggtttattgtaatttttattttttagatttaagtaattttcgtgttttagttttcgaagtagttgggattataggtatgtgttattatgtttggttaatttttgtatttttatttttatttttatttatttatttatttatttatttatttatttatttattttttattgattatttttgggtgtttttcgtagagggggatttggtagggttataggataatagtggagggaaggttagtagataaataagtgaataaaggtttttggtttttttaggtagaggattttgcggtttttcgtagtgtttgtgtttttgggtatttgagattagggagtggtgatgatttttaaggagtatgttgtttttaagtatttgtttaataaagtatattttgtatcgtttttaatttatttaattttgagtggatgtagtatatgttttagggagtatagggttgggggtaaggttatcgattaataggattttaaggtagaagaattttttttagtatagaataaaatgaaaagttttttatgtttatttttttttatatagatacggtaattattcgattttttaattttttttttattttttttttttttttattttataaaatcgttattgttattatggtttatttttaatgagttgttgggtatattttttagacggggtggtggtcgggtagaggggttttttattttttagtaggggtagtcgggtagaggcgttttttatttttcggacggggtggttggtcggacggggggttgattttttttattttttttttggatagggcggttggtcgggtagaggggttttttattttttagtaggggcggtcgggtagaggtgttcgttattttttggacggggcggttggtcggacggggggttgatttttttttaattttttttttggacggggcggttggtcgggtagaggggttttttattttttagtaggggcggtcgggtagaggcgtttttttatttttcggacggggcggttggttaggttgggggttgatttttttatttttttttttttcggacggggcggttggtcgggcggggggttgatttttttatttttttttcggacggggtagttggtcgggtagaggggttttttattttttagtaggggcggtcgggtagaggtattttttatttttcggatggggcggttggttaggcggggggttgatttttttatttttttttcggatggggcggttggtcgggtggggggttgatttttttatttttttttcggacgaggtggttgttaggcggagacgttttttattttttagacggggtggttgttgggcggaggggttttttattttttagacggggcggttgtcgggcggaggggttttttattttttagacggggcggttgttaggtagagggtttttttattttttagacggggcggtcgggtagagacgttttttatatttcggacggggtggtagggtagaggtgttttttatattttagataatgggcggtcgggtagagacgttttttattttttagatgtgatggcggtcgggaagaggcgttttttattttttagatgggatggcggttcgggtagagatgttttttattttttagattgggtagttaggtagaggggttttttatattttagacgatgggcggttaggcggagatgttttttattttttagacggggtggcggtcgggtagaggttgtaatttcggtattttgggaggttaaggtaggttgttgggaggtggaggttgtagtgagttaagattacgttattgtattttagtttgggtattattgagtattgagtgaacgagatttcgtttgtaatttcggtatttttggaggtcgaggttggcggattattttcggttaggagttggagattagcgcggttaatatagagaaatttcgtttttattaaaaaaatacgaaaattatttttgggtgttttttttanagggngannggtaggggtatcgggcgatagtggagggaaggttagcgggggaataagtgaataaaggtttttggtttttttaggtagaggattttgcggtttttcgtagtgtttgtgtttttgggtatttgagattagggagtggtttttatttttaaggagtatgttgtttttaagtatttgtttaataaagtatattttgtatcgtttttaatttatttaattttgagtggatgtagtatatgttttagggagtatagggttgggggtaaggttatcgattaataggattttaaggtagaagaattttttttagtatagaataaaatgaaaagttttttatgtttatttttttttatatagatacggtaattattcgattttttaattttttttttattttttttttttttttattttataaaatcgttattgttattatggtttatttttaatgagttgttgggtatattttttagacggggtggtggtcgggtagaggggttttttattttttagtaggggtagtcgggtagaggcgttttttatttttcggacggggtggttggtcggacggggggttgattttttttattttttttttggatagggcggttggtcgggtagaggggttttttattttttagtaggggcggtcgggtagaggtgttcgttattttttggacggggcggttggtcggacggggggttgatttttttttaattttttttttggacggggcggttggtcgggtagaggggttttttattttttagtaggggcggtcgggtagaggcgtttttttatttttcggacggggcggttggttaggttgggggttgatttttttatttttttttttttcggacggggcggttggtcgggcggggggttgatttttttatttttttttcggacggggtagttggtcgggtagaggggttttttattttttagtaggggcggtcgggtagaggtattttttatttttcggatggggcggttggttaggcggggggttgatttttttatttttttttcggatggggcggttggtcgggtggggggtttatttttttatttttttttcggacgaggtggttgttaggcggagacgttttttattttttagacggggtggttgttgggcggaggggttttttattttttagacggggcggttgtcgggcggaggggttttttattttttagacggggcggttgttaggtagagggtttttttattttttagacggggcggtcgggtagagacgttttttatatttcggacggggtggtagggtagaggtgttttttatattttagataatgggcggtcgggtagagacgtttttttttttttatatgagatggcggtcggaaagaggcgtttttttttttatagatgggatggcggttcggatagagatgttttttattttttagtgtgggtagttagatagaggggttttttatattttagaatatgggcggttaggcggagatgttttttattttttagacggggtggcggtcgggtagagtttgtaatttcggtattttgggaggttaaggtaggttgttgggaggtggaggttgtagtgagttaagattacgttattgtattttagtttgggtattattgagtattgagtgaacgagatttcgtttgtaatttcggtatttcgggaggtcgaggttggcggattattcgcggttaggagttggagattagcgcggttaatatagcgaaatttcgtttttattaaaaaaatacgaaaattagttaggcgtggcggtgcgcgtttgtattcgtaggtatttagtaagttgaggtaggagaattaggtagggaggttgtagtgagtcgagatggtagtagtatcgtttagttttagttcggtattagagggagatcgtggaaagagggagagggagatcgtggagagggagagggagaggttgaggttgtaatttttatttatgttggtttatgatttagttagagaagatattatagggtattatttaggtaataaaatatagagagaaaagagttattggtatttttaaataacgtttttgtgttttttattgtaagtatagaaaagtaggtgtttatagatgtagagaaagggtatttttaaggtttcggaggaaatttttgattttataaataatttgatggtggaaggtaaacgttatttcggtttttaagtaggttttacgtagtttttacgtagtttttatggtcgagtttattttttcgtttaatttttgtatttttaatagagatggggttttttattatgttgattaggttggttttaaatttttgattttaggtgatttatttgtttagttttttaaagtgttgggattataggtttgagttatcgtgtttggttgaagttaatttttaaatattgtttaatgtgattttaaaattaagatatatgttgttttttgttatttatatgtttgtgtaatttgggtatttgtttagttaatagttattaaatatatattatgtaatttttggtaggagaagaatattattttagatataaggaatatgttatgatgtttggggaataaatatacgtagaatgtattattaatatagagataaagatagagtattaatgtagtaattgtgatgtttttgagagtatagatgggaggtgtagtagtttttattatttagttttgttttatatagttttagttattggtattttattttagttagaaagtattaagatattttgagggaaaaagagagatattatatttatataaattttattataatatattgttataattgtttattgtattattgttaatttttttttgagtttaatttataaattaaattgtattatggttatgtatgtgtaggaaaaacgtagtatatagtggatttggtattattttgattgattttaagtatttattgggggttttggaatatattttttatggataagggggattattatatattggagttgagtattataagtagaaattagttagttaaaagaaaagtggggtgagaatttattttagttagtttggattgtgtgaattaaggttagaagatgggaagtagtatggtgtatattaaagtttataatttgaggtatggagtagggagaggcgaagttggagaagtaggtagagatttgattatgaaaggtttttgaatgttatgaaaaggagattttagtttgatgttaaattattgaagaagtttaagaaaagtgacgtggttaattttttttttaaatagattattttgttagttgtgtggaggatggatttgagggagataagattggaggtagtagtttaggtgagagatgttgagatgttgtagatttgaattaaggtattggtagtagagatggagaatagggaatggatttgaaaataaatggaattataaatttaagggtttttttttttatatatgataaaattatttttatattaaaaataagttggtttggttgggtgtggtggtttacgtttgtaattttagtattttgggaggttaaggcgggtagattataaggttaggagtttaagattagtttggttaatatggtgaaatttcgtttttattgaaaatataaaatttagttgggtttggtggcgtgtatttgtaattttatttattcgggaggttgaggtagtagaattgtttgaatttaggacgtgaaggttgtagtgagtagagattgtgttattgtattttagtttgggtaataaaataagattttatttcggtggtgggagaggggtgcggacggggaataagttagtcgggtgtggtggtttacgtttgtaattttagtattttgggaggttgaggcgggtggattatttgaggttaggagtttaagattaatttggttaatatggtaaaattttgtttttattaaaaatatagaaaaattagttgggtatggtggtaggcgtttgtaattttagttatttgggaggttgaggtaggagaattacgtttgaattcgggaggtagaggttttagtaagtcgagattacgttattgtattttagtttgggtaataagagcgaaattttattttaaaataataatgataataataataataattataataattataagtggaggaagagagatataaaagtgttgttatatgatatatatatttggatagtttgtttttgtagataggtattaaaaatagtttgattaagaaaattgatattggaaaaattgttttttgtataatcgatttgggttgtgagaagtaggtgatttttaagatggtatagggattatttgtgttatgtattatgaataaatttagaaattgtaaaggtttaaggaaaaaataggtcgtaaaaggtttggattattttgagtagaaatttaataaatgttcgatgatagtaatgttttttaggttttttaattaagttattgatatttataaaaaattattgtttaggaaaataaaatagagtttaaaagttatttaggtcgggtgcggttatattttttttgtttttttaaaacgaaaaaaagattattttttgttatgttggttaaaaaaagatatttttttaaaagtattttttaaataattttttttatatttaaatagagggtttggatttatatagtattatttaattttgaaaaataatttttgttgttttttttatagtttgttttttgtggagagagaaaggaataagggtagtttgagtggatttgtaagaaatttataattattttttttttaaaattataattattattataataaaatattttttatgttttataaagttagtaattatttttttttgagatttttttttttattttgagaaaattgcgttttttattagtttatgtttgattttggtgagtgtatataaattacggttaaatttttattttgtggttttttttttgattattttgttttatatttttaataagtaaattgtttttttatgtttaggagatatagtgtttatttgttaattttttataatattttatattgtatagtttttttttattttggagttagtagttgaaatattgtgtatataatgaatttaaataaatgtttcgttgttgaatttatcgtgaatttttttttttttttatgttttttaga

SEQ ID NO: 326 - DNA, 18283 bp, Artificial Sequence
  chemically treated genomic DNA (Homo sapiens)
  unsure (5185..5186, 5189, 5194)
tttgaaagatataagaagggaagggaatttacggtgagtttaatagcgaaatatttgtttgaatttattatatatatagtattttagttgttggttttagagtaggaaagaattgtatagtataaagtgttatgaagaattagtaaataggtattgtgttttttaagtatgaggaagtaatttatttgttgaaaatgtaaaataaggtagttagagaaaagattataaaatgagagtttagtcgtgatttatatgtatttattaaaattagatataaattaataggaaacgtagtttttttaaaatggaaaaaagaattttaaagagaaatggttattagttttataaaatatagaggatattttgttgtagtagtggttgtagttttaaggaagaaatgattgtaagttttttataagtttatttaaattatttttatttttttttttttttatagaaaataaattgtagaaaagataatagggattattttttagaattaggtaatattgtataaatttaggttttttatttaagtatagaaaaaattatttaaaaagtgtttttagaaaaatatttttttttggttaatatggtaaaaaataatttttttttcgttttaaaaaaataaaagaaatgtggtcgtattcggtttgaatgatttttaaattttattttgtttttttgagtagtgattttttgtaaatattaataatttaattgaagagtttagaaaatattattattatcgggtatttattgagtttttatttaaagtggtttaagttttttacgatttgttttttttttaagtttttatagtttttaaatttatttatagtatatagtataggtgatttttatattattttaaagattatttgttttttatagtttagatcgattatataaaaaatagtttttttagtattaatttttttgattagattatttttagtgtttgtttataaaggtaaattatttaaatgtgtatgttatataataatatttttatgtttttttttttttatttatgattattatgattattattattattattattattattttgagatggagtttcgtttttgttgtttaggttggagtgtaatggcgtgatttcggtttattgaaatttttgtttttcgagtttaagcgtgatttttttgttttagttttttaagtagttgggattataggcgtttgttattatatttagttaatttttttgtatttttagtagagataggattttattatgttggttaggttggttttgaatttttgattttaggtgatttattcgttttagttttttaaagtgttgggattataggcgtgagttattatattcggttgatttatttttcgttcgtattttttttttattatcgagatggagttttgttttgttgtttaggttggagtgtagtggtataatttttgtttattgtaatttttacgttttaggtttaagtaattttattgttttagtttttcgagtaggtgggattataggtgtacgttattaagtttagttaaattttgtatttttagtagagacgaagttttattatgttggttaggttggttttgaatttttgattttgtgatttgttcgttttggttttttaaagtgttgggattataaacgtgagttattatatttagttaggttaatttatttttaatataaaaatagttttattatatatgaaaggaaaaatttttgaatttgtggttttatttatttttaaatttattttttgttttttatttttattgttaatgttttagtttaaatttgtaatattttaatattttttatttggattattgtttttagttttgttttttttaaatttattttttatatagttggtaaagtgatttatttaagaaaaaaattgattacgttattttttttaagtttttttaatagtttaatattaagttaaagttttttttttatggtatttaaaggttttttatgattaggtttttatttatttttttagtttcgtttttttttattttatattttaaattgtaaattttaatatatattatgttgttttttattttttggttttggtttatatagtttagattaattggaatgggtttttattttattttttttttgattggttgatttttatttgtaatatttagttttaatatatagtagttttttttatttatgaggaatatgttttaagatttttagtggatgtttaaaattaattaggatagtattaaatttattatatattacgttttttttatatatatataattatgatataatttaatttataaattaggtttagaaagagattaataataatataatgaataattataataatatattgtaataaaatttatgtgaatgtggtattttttttttttttttaaaatattttaatattttttgattggggtggagtgttagtaattgaaattgtataaagtaaaattggataatgggggttattgtattttttatttgtatttttaaaagtattatagttgttgtattaatattttatttttatttttatattaataatatattttacgtatgtttgttttttaaatattataatatgttttttgtatttggaatggtattttttttttattaaaagttatatagtatgtgtttaataattgttagttaaataaatgtttaaattatataaatatataagtgataggaaataatatgtattttaattttaaaattatattaaatagtatttaaaaattggttttagttaggtacggtggtttaggtttgtaattttagtattttgggagattgggtaggtggattatttgaggttagaagtttgagattagtttgattaatatagtgaaaaattttatttttattaaaaatataaaaattgggcgaggagatggattcggttatggaggttgcgtggaggttgcgtggagtttgtttgggaatcgggatggcgtttgttttttattattaagttatttataaaattaaaagtttttttcgaggttttggagatgttttttttttgtatttgtgaatatttatttttttatatttatagtaggaaatataggaacgttatttagaaatgttagtggtttttttttttttgtattttattatttaaataatgttttatgatgttttttttaattaggttataaattagtataggtgaaaattgtagttttagtttttttttttttttttttacggtttttttttttttttttttacggtttttttttgatgtcgagttgaagttggacggtattgttgttatttcggtttattgtaatttttttgtttgatttttttgttttagtttgttgagtgtttgcgagtgtaggcgcgtatcgttacgtttgattggttttcgtatttttttggtggagacggggtttcgttgtgttggtcgcgttggtttttagtttttaatcgcgagtgattcgttagtttcggtttttcgaggtgtcgggattgtagacggagtttcgtttatttagtgtttaatggtgtttaggttggagtgtagtggcgtgattttggtttattataatttttattttttagtagtttgttttggttttttaaagtgtcgagattgtagattttgttcggtcgttatttcgtttgggaagtgaggagtattttcgtttggtcgtttatattttgggatgtgaggagtttttttgtttggttgtttatattggaaagtgaggagtatttttgttcgggtcgttattttatttatgaagagaggagcgttttttttcggtcgttattttatatgggaagagaggagcgtttttgttcggtcgtttattgtttgagatgtggggagtatttttgttttgttatttcgttcgggatgtgagaagcgtttttgttcggtcgtttcgtttgagaagtgaggagattttttgtttggtaatcgtttcgtttgagaagtgaggagttttttcgttcggtagtcgtttcgtttgagaagtgaggagttttttcgtttagtagttatttcgtttgggaagtgaggagcgttttcgtttggtagttatttcgttcgggagggaggtgggggggtgggttttttattcggttagtcgttttattcgggagggaggtgagggggttagtttttcgtttggttagtcgttttattcgggaggtgaggggtgtttttgttcggtcgtttttattgggaagtgaggagtttttttgttcggttagttgtttcgttcgggagggaggtgggggggttagtttttcgttcggttagtcgtttcgttcgggagggagggaggtgggggggttagtttttagtttggttagtcgtttcgttcgggaggtgagggggcgtttttgttcggtcgtttttattgggaagtgaggagtttttttgttcggttagtcgtttcgtttaggagggaggttgggggggggttagtttttcgttcggttagtcgtttcgtttaggaggtgacgggtatttttgttcggtcgtttttattgggaagtgaggagtttttttgttcggttagtcgttttgtttaggagggaggtggggggggttagtttttcgttcggttagttatttcgttcgggaggtgaggggcgtttttgttcggttgtttttattgggaagtgaggagtttttttgttcggttattatttcgtttgggaggtgtatttaatagtttattgagaatgggttatgatgataatggcggttttgtggaatagaaaggggggaaaggtggggaaaagattgagaaatcggatggttgtcgtgtttgtgtagaaagaggtagatatgggagattttttattttgttttgtattaagaaaaatttttttgttttgggattttgttgatcggtgattttatttttaattttgtgttttttgaaatatgtgttgtatttatttagggttgaatggattaagggcggtgtaagatgtgttttgttaaatagatgtttgaaggtagtatgttttttaagagtaaaaattattttttaattttaagtatttagggatataaatattgcggaaggtcgtagggttttttgtttaggaaaattagagatttttgtttatttgttttttcgttgattttttttttattatcgttcggtgtttttgttnnttnttttntgaaaaaaatatttaagaatggttttcgtatttttttggtggagacggggtttttttgtgttggtcgcgttggtttttagtttttaatcgagagtgattcgttagtttcggtttttagaggtgtcgggattgtagacggagtttcgtttatttagtgtttaatggtgtttaggttggagtgtagtggcgtgattttggtttattataatttttattttttagtagtttgttttggttttttaaagtgtcgagattgtagtttttgttcggtcgttatttcgtttgggaagtgaggagtattttcgtttggtcgtttatcgtttgggatgtgaggagtttttttgtttggttgtttagtttggaaagtgaggagtatttttgttcgggtcgttattttatttaggaagtgaggagcgttttttttcggtcgttattatatttgggaagtgaggagcgtttttgttcggtcgtttattgtttgagatgtggggagtatttttgttttgttatttcgttcgggatgtgagaagcgtttttgttcggtcgtttcgtttgagaagtgaggagattttttgtttggtaatcgtttcgtttgagaagtgaggagttttttcgttcggtagtcgtttcgtttgagaagtgaggagttttttcgtttagtagttatttcgtttgggaagtgaggagcgttttcgtttggtagttatttcgttcgggagggaggtgggggggttagttttttattcggttagtcgttttattcgggagggaggtgagggggttagtttttcgtttggttagtcgttttattcgggaggtgaggggtgtttttgttcggtcgtttttattgggaagtgaggagtttttttgttcggttagttgtttcgttcgggagggaggtgggggggttagtttttcgttcggttagtcgtttcgttcgggagggagggaggtgggggggttagtttttagtttggttagtcgtttcgttcgggaggtgagggggcgtttttgttcggtcgtttttattgggaagtgaggagtttttttgttcggttagtcgtttcgtttaggagggaggttgggggggggttagtttttcgttcggttagtcgtttcgtttaggaggtgacgggtatttttgttcggtcgtttttattgggaagtgaggagtttttttgttcggttagtcgttttgtttaggagggaggtggggggggttagtttttcgttcggttagttatttcgttcgggaggtgaggggcgtttttgttcggttgtttttattgggaagtgaggagtttttttgttcggttattatttcgtttgggaggtgtatttaatagtttattgagaatgggttatgatgataatggcggttttgtggaatagaaaggggggaaaggtggggaaaagattgagaaatcggatggttgtcgtgtttgtgtagaaagaggtagatatgggagattttttattttgttttgtattaagaaaaatttttttgttttgggattttgttgatcggtgattttatttttaattttgtgttttttgaaatatgtgttgtatttatttagggttgaatggattaagggcggtgtaagatgtgttttgttaaatagatgtttgaaggtagtatgttttttaagagttattattattttttaattttaagtatttagggatataaatattgcggaaggtcgtagggttttttgtttaggaaaattagagatttttgtttatttgtttatttgttgattttttttttattattgttttgtgattttgttaaatttttttttgcgagaaatatttaagaatgattaataaaaaataaataaataaataaataaataaataaataaataaataaaaataaaaataaaaatataaaaattagttaggtatggtggtatatgtttataattttagttatttcggaggttgaggtacgagaattgtttgagtttgggaggtggaggttgtagtgagttaagatcgtcggttgtgttttagtttgggtgataatagagtgagattttgttttaaaaaaaaaaaaaaaaaaggttttataatttttatatgatatatatatagaaatttttgttgtaggttggttttgtaattttttagttttagagttttatattttttttttttaaaaagaatatatatttaaaattttagttaatttaattttgttttatattatgataaatttaaaaaaagttttgatattatggaaagttaaagtagttatgttgttttttatttaaatgtagaattatggtgaatgggaatagttgtattttatattaagatagttaatttgggatgattaaattaataaaaatttatattgtaaaaaatattttttaaatcggttttatatatcgtatttgtttttattttaatgtaaaaattatttattttagtagaatttttattggttataaaatgttaattttttattaaaatgaaaaaaatgttaaaaaaagtatagaaaatatttatatttattagtatttattattgaatattatataatttatatttataaatatatatatatatttttgttagtgatattggtaatatattataatgtttataaatattttgtttaatgattattagtttatttaattattcgtagtataggaaaagttttttttgtttgaaattataagagaaaaatttaatagtaaaaagaattttggtattattaataattaagttagaaatagtaataagtagaagttaatttttaatttttattaggataaaattagtaaatgttatatagttatattttattttgtgaaatttagtatattaaattttaaagtttataaaatagtaatttgattattttgagggtgaggatagtgatgtagtattgagtagttttttgggtttatataattaggagttggttaagaattggatttttatagtggatataaggggcgttacgggtattgtggagttgttgtgggttattgattggaggttaattttggatcgggtgttttatatttatagtaagtttaagaaggatgattgattaaattgatgtttttatgaatttttttgttgttaggtggtgttagttttttttatgttagcgtttgttgtatttgtaatagtttaagtttttaggatggacgtttagggaatttatagtgtaatttaagattttttgtatttttgaaaatagttggggtgttttaagtatatagtattaaattttattatgaaatttgttttttgtttggatattaattatgttgataatttagttattttgattatagttttagagaatgatttagggatttttttaagttttaaaatgttgttagtttaggagagttttttagtggttgttagatattgtttaattattattattgagataaggtttcgtcgtgttgtttaggttggttttaaatttttgagtttaagcgatttatttgttttggttttttaaagtattgcgattataagtacgagttatcgcgtttagtttgtttaattattttaaatgtttattggggaaaaagaaatttttagtaatttgagtgaatattatatgtaaggtattgtgttgggttttagaatataaagatgagaaattattaataatattattgggatttaatatgtaaaattattatttatttttttttttaaatttgttttttttattgaattttttattttagttaatggtaattttatttttttaaatgttgaggttaaaaattatggaattttttatggttttgagaggtgatagtgtgttggtagtttttatagttttcgttcgttttcggtgttttttttgtttgggtttttattttggtggtatttgaggagttttttagcgtatcgttgtattgtgggagtttttttttgggttggttaaggtcggagtttatttttttaagtttgtagggaggtgtggagggagaggcgttagtaggaatcggggttgtttgtcgcgtttgcgggttagttggagtttcgggtgggcgtgggtttggcgggtttcgtatttatattcggagtagtcggttagttttgttagtttcgggtaatgagggatttagtatttgggttagcggttgtggaggatttattgggttttttagtagtgttagtttatcggtgttgcgtttaatttttcgttgggttttagttgttttttcgcggggtaggttatttatttagtagtggtaatttattcgggtttttttttatattgtggaagttttgttttttcgttttttgtaataaattttgttattgtttattttttgggtttatattgtttttatgagttgtaatatttatcgtaaagatttgtagttttatttttgaagttagtaagattacgagtttatcgggaggaacgaataattttaaacgcgttattttaagagttgtaatatttattgtaaaggtttgtagttttatttttgagttagcgagattacgaatttattagaaggaagaaatttcgaatatatttgaatattagaaggaataaattttagatacgttattttaagagttgtagtatttatcgcgagggtttgcggttttatttttgaagttagtgagattaagaatttattaatttcggatatagttttttttttgtttttataaataatatttaatttatttagaaattttattggtattgtttttaaaaatatatttagaatttaattattttttatttagtattattttatgattattattatttaggtaaggggattttaatttttgggttatagataggtttgtggtttgttaggaattgggttatatagtagtaggtgagtagcgggttagcgagtattatcgtttgagttttatttttcgttagattagtggaggtatttgatttttataggagttgaaatttattgtgaattgtttatgtaagggatttaggttgaatgttttttatgataatttaatgtttgatgatttgaggtggtatagttttatgtgaaattatcgttttttatttagtttgtgaaaaaattgatttttatgaaattggtttttggtgttaaaaaggttgggattattgatgtagattattttattagatttttgatttttatgttttcgtgtttgttttttattgtttatttttaatatattagttattttttagagtataagttagattgttatttttttgtttaagattttttaaaggttttttattttagagtaaaagttaaaatttttaaaggttttgtaaggttttttataattggttttgtttagtattttttgttgttatttttttattttattttggttattgatattaatgttattgtttgaataaagtaggtatatttttgttttaggatttttgcgttggtttttttttttgtttaaaatatttttttttatgatattttattaaatgttatttttttagtatgttattttttgattattttattttaaagtatatttatttttgataatatttttatattttttattgattttttttttgatttattttatttttatagtttttattattattaaatatagtgtataatttatttatttattattatatttatgtatttaagtttttttgttaaaatgtaagttttatgaggattaggattgttgtttgttttgtttattgaatagtgattttagaatagtgtttatatataagaggtttttaaaaaagatttgttgaatgaatgaattatgtatatatttttatttatagaggatgttatgagaggaaagaatataaaataaaattttagagtttggtaaggttttagatttaaaattagataaatatttaaattggatgaacgtaggttaggtatagtagtttatgtttataattttagtattttgagaagttaaggcgggaggattatttgaggttaggagtttaagattagtttgggtaatattatgagattttattaggtgtggtggttagcgtttgtaattttagtattttgggaggtcgaggtggattatttgaggttaggagttcgagattagtttggttaatatggtaaaattttgattgggtgtggtggcgggtgtttgtaattttaattattcgggaggttgaggtaggagaattgtttgaattcgggaggtagaggttgtagtgaattgagattagattgttgtattttaatttgggtgataaagtaagattttgttttaaaaaaaaaaaaaaaaaaaaaattaagtattggttgggtatagtggtatataattgtagttttagttatttaggaagttgaggtaggattgtttgagtttgggaggttgagtttgtagtgagttaagattatattattgtattttaatttagataatagaataaaattttgtttttaagaaaaaaaaaaattagattaataggaattttgtattgatgatagtagagtgatagattgttaatacgtaaggatatgtttataataaggggaaattttgaatttaaaagaggatttttaaagataagttaattttttgaaagttgtgttatttgataaaaggagaaaatagaatgagatttatagtacgattttatgtaaatttagaagatatatgtaggttaaataatattatatttttgaaatatgtaaagtaataattataggataaaagtaatttttgaggttaaagtattaaaagaattataatttagaaaataattttttttattttttatttttttttttttcgtttttggttttacggtttttttggttgagttaaaagattttatttttttttttttttttttttttttattttttttttgtttttaaagaatttagggttaattttttgtataatttgtttgtataggatatttatttaaatattattttatttattagtattaaataaaaggaaaatttttttaaagagaaaaatattttaatatttttttgaagttaagaacgaatatattttgaattataaagagtaagggaattaaatgagggggaataagataaggaataaaggtaaaaataaaagaaaataaaagtttgtgggaagagtaagtaaatgttagtgttatttagtagttatagtttatgttattttttttattggttaagatagatatgtttggatgatttagatgtattgtatacgtttaaatgtaagtgtgtgggttgggaatggtttatttttgaataaaatgaaatgattattataaattaggtaatttagatattaagttaatttattttttattatttattgttatagaggtagattagagatttaagatgggataagagaagattgatttttatttatatgtaaagaatttagataatagaaatatattattataatttaaaaaaggtattttttttttattgttatagttgtaggttataataaaaataaagtaaaatagaatagttatttgtataaagtaaattattatgattgaaaaagttaaaatttaaaataataaaattgaaattgagaaaatttttaagttttatgtttaattttattaaaaatattttttattagttagttatttagtaatttttattagtttaattagaaatttgttaggtagtaataggagaaattaatattataaatttttagtttaggtatttttaagtattttataaatattattttgttagaattttattttatttgattgtatattttttaagaagttaataagttttaataattttttttaaaaattatgtaaggtaaattatttaatagtttttaatatagtttaagttttttatattaagttatttatattttattattataaaatattatatattatttatatatttttttatttagtatttattgagattttattatgagatatttttttaagaaagtatataaatttttattgattaagaatgaagataaaaatagtagtagataagatgaattttttgaaatttttatttatatttgattaatgtggttattaagtttttttgaaattattaattttgaattatatttgttaagtcgggtagagtagattttgaggttttagcgtataggtagtaaagtgaagtgttttgatttttgttataattattaggtggaaggagaattgttttaaggattatatttttgtttagaagtataaaagttaaattgttttgtgtaaagaggaagttttagaattttattttttgataagtaatattatatgtatgtgatatttatttatgtatttagtggttagagggaattaataaaatggtgagtatttataatttttaaagtgggtggagagtgatttaaaggaaaatttttagtaattcgtaaaagattgagttagaatggagttattttaaaatttttgagaatatttttaaaatataagtaaaataaaaattaatatatatatgtataataaatagtttaataataaaataatgtagaagttaatatatttttattttatagggagatgatgaggtgagattagagagaaaagtttttttggagaaaatttgtttataataaaatacgaaatatatttttaaaagaaaggaaacgtttaataagatttattttttatattatttaaatagtttaagaaattataaagttaaagttaaagaaatagttgtgatttgatttatgagtatagaagttaagaaataattgtttttgttaataatttggttttatagtttaataaaggttaaaaatatggtaatatagtgttgaaaatttttgagtgttaaaagtttatttatttatttatttttatttatttatttattttttgagacggagtttcgttttgtcgtttaggttggaaggtagtggcgcgatttcggtttattgtaatttttatttttcgggtttaagtgattattttgttttagttttttaggtgattgcgattataggcgttcgttattacgtttagttaattttttgtatttttagaagagacggggttttattatgttggttaggttggttttaaatttttgatttcgtgatttatttgttttagttttttaaagtgttaggattataggtatgagttattatgtttagtttgagtgttaaaagtttttaaatgaattttttggatttaaaagttttaaagataaagttttaattagttataaataggaataaagttaaagaaaatttaaaaatttgaaaatgatagtattttatgagaattaaattagtaaaatttataaataatatatgattttaatgtatgatttataaaaataatattaaagagcgtttgtaggttaggggcggtggtttacgtttgtaattttagtattttgggaggtagaggtgggtggattataaggttaggagatcgagattatttttttggttaatatagtgaaattttatttttataaaaaatataaaaaattagttcggtatggtggcgggcgtttgtagttttagttattcgggaggttgaggtaggagaatggtatgaatttaggaggtgtagtttgtagtgagttaagatcgcgttattgtattttagtttgggcgatagagcgagattttattttaaaaaaaataaaaaaaagagtgtttgtttaattgtgtatttgagaatatttatttatttaataaatatttattaagtatttattatgtattagtttttgttttaggttaatataagtaatagggtaagataataggatgataggattgaaatagttttagagaaaattgaaaaataaaatggtaatttaattttattagagaaagaataattttaatgtaggtaattaattatttaaaataataaagtttatgtttttaataaaattattttttataaagttagtatttttaatattaagggataaataaaagagttagatgattaaaggttattataattatgattaagaattttaaatattagattgaatattttatttttcggattatagaaaaaaaggtatgggaaaggatttttattatttatattttatttatatgtagattttatattatatggtttattatttaattaataaattttttatttaaattattaataattagtagttatatttttaattatttatagtataatttggaataaagaggagataaatggataaataaaaggtggtttatatatataatgaagtattatttagttataaaaagaatgaaatgttgatatatgttataatgtagatgggttttgaaaatatgatgttaagtgaaataagttagatatattaaggtaaatattatataattttatttatatgaaatatttagaatttttttagttttggaagtttagttttgtaaatggatggttatataatattatgaatatatttaattttattaaattgtatatttacgaatagttaaaatagtaaattttgatattttgttataattaaaaattaaaattattaaggtttttaaaggttttttgtttatgttatagttattagtatttattatatttgaaattaaatttgaaattttaatgagaaatttgaatatttattaattttaaaataataataaatttattatgttaataatatatttttattaaaaagaaaattatttttaaaaaagaattaagaagataagagtagtatttttagtttttgtaaatttttttaataggttgaggtggaaaagtgtattattttaatgaacgtgataaattaaggttagaagtaaaagaagaatttaagtaaagatgaggaggagcgggggtattttgagtagataatgtagtaagtttaatgtaaaaattttgaggtaggaaaagaatttggtatgtataggaaataagaagtgtggttattgttacggaagttaaaagatgagtatgaaataaagtaaggtagataggggttggttaaattaagtgtttagggatttaggattttattttaagtgtaatggaaatttagtgaatagttttaagtaggatggttatatggtttgatttttatttttttttttttttttgagatagggttttgttttgttttttaggttggggtgtagtggcgtgattttggtttattataatttttattttttaggtttaagcgatttttttgttttagttttttgggtagttgggattataaggtgtgtattattatgtttggttaatttttgtatttttagtagagatggggttttgttatgttggttaggttgttgatttttattttttaaaagattattattatatgaaaaaaaatgaattatattgagaattaaattagaagtagaaaattatgtagtagtttagtaatgggattatgttggtttagaataggatggtggtagtggagataaagaaaagtggaagaatttaacgatatggtttgaagagggaattaatagggtttgtagattatttggatataatataagagagaaggagaaaataaagaatggttgttaggttttaggtttaattgtaattgggtagatggttatgtaatttattgagaagtagtagtagtataggttgagtatattttatttaaaatatttgagatttgaagtgttttaggtttaaaatttttttagattttagaatatgtgtatatatataatgagatattttgaggttgagttttaagtgatatggtttggttgtgtttttatttaaattttattttgaattgtaatttttataaatttttacgtgttaagggtaggattaggcggagataatcggattatggaggtatttttttttatgttgttttcgtgatggtgagttttataagatttgatgattttataagcgtttggtattttttttttttgtatttattttattttgttattttgtgaggaaggtgtttgttttttttttgttttttgttatgaggaaaaaggaaaggaaaaagatatattattttaaaatatgtttttgatataaaaattatttttgagtttaaagtaataaataggggaaaagttttttatatttttttgtttttttatttaaagataggatataaatttttttttattggtgataattatagatttttattagtttaaaaatggtttgagtttgggaggttgaggttgtagtgatttaagattatagttgtgtattttagttttatatgatagagttagattttgtttttaaaaaaaaaaaatttaaaaagtaggttaagaatatgaatagatattttttaaagatgatatataggtggttaataaatatatgaataaatggttttatttttaattattagagaaatgttaaaaaaaaaaaaaaaaaaaaaaaaaattaattgatgttggtaaggatgtagagaaaagggaatatttatttattgttggtggaaatgtaagttagtataatttttacgaaaaatagtatagaaattttttaaagaattataagtagaattatatttgaatttagtaattttattattgggtatttatttaaaggaaaagaaattattttattaaaaagatatttgtattttatatatttattgtagtattatttataatagtaaaattatggaattaatttaagtgtttattaatggatgattggagtttttaaaatgtggtatagatatattatggaatattatttagttataaagaagaataaaattatgtattttgtagtaatatggttggaattggaggtcgttattttaagtgaaatgatttaaaaatagaaagttaaaaattttatgtttttattgtaagtgggagttaaataatggtatatatggatatatcgaatggaataatatattttggagattttaaaaggtggaatattatttattgggttttatgttatgtatgttatttaggtgatggttatattggaagtttagattttattattaggtaatatatttatggaagaattgtatttgtattttttaaatttataaattttttttaaaaaagtaatagagggattttagtttttgtaagattaattttttttaggttagttaataatagtataagtatatg

SEQ ID NO: 327 - DNA, 6850 bp, Artificial Sequence
  chemically treated genomic DNA (Homo sapiens)
tggtttgttgtttggtgtgtggggagaaaaattttatattttttttttttttttttgagatggatttttatttttgtttatttaggttagagtgtaatggcgtaattttggtttattgtaattattattttttaggttgaagcgatttttttgtcgtagtttttcgagtagttaggattataggtgtttattattatgtttggttaattttttttggtatttttagtagagatgggggttttattatgttggcgaggttggtttcgaatttttgattttaggtgatttattcgtttcggttttttaaaacgttaggattataggcgtgagttattgcgtttggttaatttaatatttttggttattaaagttttacgtgttgataattgtgatggtgtgagagtagaggaaaaacgttatttgagttttttttttaaatagtatataaaagatttgttttatttaaaaaataattatatatgttttattttatggaatttattagttaagtggttatttattgatgaatatttaggttgtttgagggttttttttcgtttttattttaggtaatgttttataaagtatttttgtggtcgggcggggtggtttacgtttgtaattttagtatttcgggaggttaaggcgggtggataacgaggttaggagatcgagattattttggttaatacggtgaaatttcgtttttattaaaaatataaaaaaattagtcgggtatggtggcgggcgtttgtagttttagttattcgggagaatggcgtgaattcgggaggcggagtttgtagtgagtcgagatagtgttattgtattttagtttgggcgatagagagagattttatttttaaaaaaaaaaattttttttttttttttttttgtgttacgacgttggttaatttttatatttttagtagaagagggggtttcgttatgttgtttaggttggtttttaatttttgattttaggtgatttatttttttcgttttttaaagttttgggattatagacgtgagttatcgcgtttgttttaatattatcgttttttagaaatgaggaaattgaggtttagagaagtaattattaatttttaatagagtcggaattagattttaggtttttagatttttattttaagagattaacgcgggagcggggaaggtggtttttgggtagttaattgattgtatattttcgtttaaggcgggatttggatttagaagtgtttggagttcgcgggtgggaggattaggatgattgttgttttcggagttcgattttaatttttatcgggtataggagttttttagtagcgcgaggggtcgtttagtttggatttggaacgtttgtagtacgatcgtcgcgcgttttttttcggaattagtttttatcgttatagttttttttttcggtcgttttcggtttagtttaggttggggcggggtttcggaagtaattgttttcgttttagttagggttgtcgtttgttaggttaagtttttaaacggtaaaattaatcgcgttgaagagattgtgtttttttttttttatttcgtattttagacgttttagagaaattattttttagattttcgcggttttttttgcgttcgtagcgttcggtagttggggattcgggtttagttatatcgatcgtaacgttcgcgcgttattttgtgtttatttttttagtttttagggataattcggaaattatattttttagcgtgtcgagcgtttttgcgtaggcgtaaagagtttttttcgttgttatgggaatttcgttttttttagagttttggtcgtttgatttagttaagcgcgaaggtgttgtttttttttgaggtgcgttggggttgggattcggtttgtagaaggtttaggggatggcgtcgggggattgaggagaggagattaagtcggttttgttttcgggattagcgtttttaaattttttggggcgtttcggcgcgtatacgtttttgaggtttcggcgttttgaggaaaggggttggcgtggcgattcgggttttcgaggtcgagatttggttgtggttcgcgaagtttcgtttgttcgcgttagcgttttgttatttcgagtcgagggtttgcgcgcggtcgataggtttttttttttttttttttttttttttgtttttttttatttttttttgtggattaaaatgttttggtttattttttaggtgagatgtaggtttttgattttggggttttttttacgttttagttttttagtgtatagtttgtgttttgagggtcgtttagggtttaggttttttgtttgtaggtgttaagggtagggatcgtgttttttttaatttaagagatttttatgaagtttttgttgtgtgtgaaatattataattttcgtttatcgttttttgtgtttttgggagttttatatgtcgggaaatatgtttttgacggtggttggtggatatgagttggcgtgtggttcgaaggggcgggtgtgttggtgtggacgcggggtttattttcggagtttttgttagtttttagagggtatttttatttttcggtggggggtatgggtttttttttttttatttaggtagggtttgttttaaagtagttataggatgcgaatttagggttatttaggtttatttttgtttttagtgttttgttttttgttggagataattttggaagaggtcgcggttttttttagtttttgagggtggggagtaggttagggggtcgcggttttggaatcgtgtttatggtagttttgttgtgttcgtgttatttcgttcggttttttttgaggaaggttggaattaagtgagattaggggtcgaggttcgggagtttattgtagttttttttggaaggatagtgtttagtggaagcggataagagttttttttcgaggtcgaggttagaggttaggtagggtttataggttaggttcgtattgtttggagttgtttttcgtagacggtttttttggttgaagttgttatttttttagattttcgggtttaaagtttggaagtttttacggggttggttttataatttttttttcggttttcgatagtttgagtttttttttatttatttttttttttttttttttgtttaagtgttgtttttgtttgggtttttttcgcgtggcgtattttagtggagtcgggttatttatcgttttggattaagttttttgagttttgtttttttgtttattttttggttgtgaagttttttggtttgtaagggttttgtttttcgttttattatggtttttgtgtgtttttttttttgttttattggttttttgtttatttttggatatattgttttttgtttgtttttacgtttatcgatttttttggtttcgttagttgtcgagattttatttgtattttaggaatttagtggagttttattttttttatataggttttttagatttagaggtttttttttttttttaaggtttttgtatacgttgtttggtattataggtttagaattatgttttgggtagggttgtttggagtagggggtggttttggtatgaggtatatagtgttttaggggtagatgtgtagcgggttttcgtgattatagtttgggtggttagttcgattagttttgggttgggtttttaggggtaggtagggtcggggtgtagaaaggtaggggttatggtaagtatagagaatttggatttgcggatttaaatttttattagttgtagttattttacgggaggtttgttggtggttttatagatttgtagggttatgtgagcgtgatatgggtttaggtgtgttgtttttttaggtttttagttttgtaatgtttttagtatggtagttatacgttattttaggagtttagattagtgaggattagatgtaggttttagttggttgttgggatagatcggtagggttgggtttgaggtgggttaggagagggtaggaggggatagtaaggtggtatttgaggtcgggagtgtagtttggtgtggcgtttttagatagtatttagtgtggggtgagataaatagggtgggggatgtcgggttgggttttgagggttataatggttaggtttttttttatggttatattaagtaatttagggtaggggttatattttatatttaagtattagggatatacgaattaaggtatggtttttttttataatttaaaaaattgagatgtaatttatataaaatttattattttattatataatgtagtgttttttagtatattgatcgtgttgtgtaatttttattttaaaaagaaatttcgtttttatcgtagttatttttttttttttttttagttttcggtagttacggatttgcgttttgtgttcgtggatttgtttatatgagtggaattttataatatgtggtaattttttgtgattggtttcgtttagttttatgtttttaaggtttatttacgttgtggtttttgttggtgttttgtttttttttatagtcgagttatgtgttgttgcgtggagatgttatatgtgtgtttttttattcgtttataaattaggtttggtttttgtgatttggttaagtttttaaagttagtcggtggtattattgggacgagattttataggcggtgggtttttgagtagggggttatttgtcggttattttggtttttgaggatatagtttggcgggggcggtgtaggtaaaggtttttttgaagttttttggtttgatttgtggttgggataagtgagtaggtttgacgggttggttttttttttggagggagtggcgatattattatagtgtttttagttcgcgtttttgggtttgtagtttttacgggttttgggggtttttgtttattgcgtttttttgatttatagtattcgtagtgttatgtagaagtatttggaggatcggggcgaggtgatttttgagaagatttttttttagaagttgggtgagtatggtagtggttttgttagttatcggatttaattttttgtttttattttagttagtttagttgtgttttttattttttagagatttggttttttatttatttagggtggagtagttagcgagattttagggtttgttttaagtcgttgcgattttgcgtgtttttttgtttttggttgtcggtttagggagtttcgtggtgggggtgggggtttagagttttttagggtcgttagggaagttttttttttggggtttttgtttttgagagttgtagtttttttttggcgcggtcgtagttgttttgggtcgttggtagaattgataggaagaggcggggttttttttgtggcgtttgtcgagttgtggttggtttcgttttattttatgggttttttttgtaagtaatttgtttggtgttggttttttattttttttttagttggtgtttgatgtttgttgttagaagttttatgtgatttattttgcggatttggttcggagggtaggtttggggtaggtttcgggaagtaggttttagttttatatggttttgatttggttttttcgagaataggagtttagttttggatagggggtattttggtttgatgggattaggtattgggggttagtttgggggagtcggtgtgttaagaagtataaagtttgggttttaggtttgtgttttttgtttttgggtaagttgttttatttttttgagtttgatggtgtttttatttgggagatgggatttatgagttcgattgtgtaggtttgttagagttagatgggagtattgtgtttattgtgaagtttggtttttattttttaaaggttttgtattaaaggttaggtagtgaggattgaaatgatggtcgtagttttgatttaggtgtttaggtagtgttttcgaaggtatgagaggttatttagttcgagtttggttattcgtgttagattggaggtttgaggagggtttttgttttttggtagtgttcgggggtcggggtttagggtttaggttttttatttaggtatgaggatattttatttggggttttttgagagttttttttatagtttattttgtttttttagttttttgtggtttatattcgttttatgttttttgttttgaggttttagttttaattttttttttagggatttgttatttggtggagtagttttgagttttatttgagtttttgttatagatagtgtgtttgattagttttttgagttttagtttttttaattggatttattttttttgtttgttttttaggttgttgtgtaaattagttagatattggagtggggtagggtttagaggagtggtgtggttttagagttttttgttaattttttttttatgttgtagtttgatttggtttcggtggttatagtattttagggtttttagattgaatcgtgttgtatttgtatagttcgtttcggtggggggtatcggttttatagagtaggcgtagggttttgggttgtagtgagtgggggtttaggtgttaagttagggttttttgatgttagagttaatttcgtttttttgttttattttggtgtttatcgtcgtttagttattatttggggaaatagattttaggaagagggtagaaatataggggttttaatttagaatttaggaatttttacgttggtagtagttttagtagttgttttggtttattttttgtttggggtcgagattatttttgttatttttatagttagttttgtttagggagtttaatttatattatttataatgatgggaaggtttttgagagaggcgtggttttgtgattttatattgttgtttttagg

SEQ ID NO: 328 - DNA, 6850 bp, Artificial Sequence
  chemically treated genomic DNA (Homo sapiens)
tttgaaggtaatagtgtaaggttatagagttacgttttttttagaggtttttttattattgtggatggtgtgggttgggttttttgggtagaattggttatggaggtggtaaaggtggtttcggttttaggtaaggggtgggttaaggtagttgttaaggttgttgttaacgtgaagatttttggattttgggttggggtttttgtgtttttattttttttttgaaatttgtttttttaggtggtagttggacggcgatgggtattagggtgaggtagaggagcggggttggttttggtattagggagttttggtttagtatttgggtttttatttattgtagtttagggttttgcgtttgttttgtgaggtcgatattttttatcggggcgggttgtgtaggtgtaatacgatttagtttgggggttttgggatgttgtggttatcggggttaggttaggttgtagtatggggaaaaggttagtagggggttttgaggttatattatttttttggattttgttttattttagtgtttggttgatttgtatagtagtttgagaaataggtagggagggtgggtttagttggggaaattagggtttagggagttggttagatatattgtttgtggtagaggtttaagtggaatttagggttattttattaaatggtaggtttttgggaaagaggttggggttggggttttagggtagggggtatggaacgggtgtaagttatagggaattggagaggtaaggtgggttgtgggaggggtttttaggggattttagatagggtgtttttatgtttgagtaaggggtttggattttggatttcggttttcgagtattattaggggatagaggttttttttaggtttttagtttgatacgggtaattaggttcgagttgggtggttttttatgttttcgggggtattgtttgggtatttgggttagagttgcggttattattttagtttttattgtttggtttttagtgtagggtttttgaggaatgggggttaggttttatagtgggtatagtgtttttatttgattttgataggtttgtatagtcggatttatgagttttattttttagatgaggatattattaggtttagagaggtgaagtaatttgtttaaggataaaaggtataggtttgggatttaaattttgtgttttttgatatatcgatttttttaggttgatttttaatgtttgattttattaggttaggatattttttgtttagagttgagtttttgttttcgggaaggttaaattagagttatgtggggttggagtttgtttttcgagatttgttttaagtttgtttttcgggttaggttcgtagggtgggttatatgaaatttttgatagtaggtattagatattagttggaggaggaatggagggttaatattaggtaggttgtttataaagagggtttatggggtggggcggggttaattatagttcggtaggcgttataggaagggtttcgtttttttttgttagttttattaacggtttagagtagttgcggtcgcgttaaggggaagttgtaatttttaaaaataaaaattttaaaggaggaatttttttggcggttttggaagattttgggtttttatttttattacggggttttttgggtcgatagttaggggtaaggaggtacgtagggtcgtagcgatttggagtaagttttggggtttcgttggttgttttattttgagtggatgggaggttaaatttttggagagtggggagtatagttgggttggttggggtaggggtaagaagttaagttcggtggttggtagagttattgttatatttatttagtttttgggaaaagatttttttaaaggttatttcgtttcggttttttaggtatttttgtatgatattgcggatgttgtgggttaggggggcgtagtaagtagaagtttttagagttcgtgggggttgtaggtttagaaacgcgagttgagggtattgtggtggtgtcgttattttttttaggaaggaggttagttcgttaggtttatttatttattttagttataggttagattagaaggttttaaggaagtttttgtttgtatcgttttcgttaggttgtgtttttaaaggttagggtggtcggtaggtggttttttgtttagaggtttatcgtttgtggggtttcgttttagtgatgttatcggttggttttgggaatttggttaagttataaaagttaagtttggtttgtgagcggatgaaaagatatatatgtggtatttttacgtagtagtatatggttcggttgtaaaaaggaataaggtattaataggggttataacgtggatgagttttgaaaatatgaggttgaacgaagttagttataaagggttgttatatattgtgagattttatttatatgaatagatttacggatatagaacgtagattcgtggttgtcgggggttggagagagggagaggagtgattgcggtggggacggggtttttttttggggtaagggttgtataatacggttaatgtattaaaaaatattatattgtataataaaatgatgaattttatatgaattgtattttaattttttaaattgtaagaaaaggttatgttttggttcgtgtgtttttagtatttggatataaaatgtgatttttgttttgggttgtttggtatggttataggggagggtttggttattgtgatttttaaaatttaattcgatattttttattttgtttattttattttatattgagtgttgtttgggagcgttatattaggttatattttcggttttaaatattattttattgtttttttttgtttttttttggtttattttaagtttagttttgtcggtttgttttaatagttagttgaggtttgtatttggtttttattagtttgggtttttggggtaacgtgtagttgttatgttgagggtattgtaaggttgggggtttgaagggataatatatttgagtttatgttacgtttatatggttttgtaggtttatggggttattagtaggtttttcgtgaaatgattgtagttggtggagatttggattcgtaagtttaggttttttgtgtttgttatggtttttgtttttttgtatttcggttttgtttgtttttaggagtttagtttagggttggtcggattggttatttaggttgtggttacgaggattcgttgtatatttatttttgaggtattgtgtattttatgttaaagttattttttgttttaaatagttttgtttagggtatggttttgagtttgtgatattagatagcgtgtgtagaagttttgggaaggagaggaggtttttgggtttggaaagtttgtgtggagaaggtggaattttattgggtttttggagtgtaagtgggatttcggtagttggcgaagttaggggggtcggtagacgtgggaataggtaggggatagtatgtttagggatgagtaaggggttaatggggtaggagagagggtatataaaggttatggtgaggcggagggtagggtttttgtaaattagggggttttatagttaaggagtgggtaggagagtaggatttaggaggtttggtttagggcggtgggtggttcgattttattggagtgcgttacgcggaggaagtttaggtagaggtaatatttgggtaggaagaaggggaagggggtgggtgggagaaggtttaggttgtcggggatcgggagaagggttatgaggttagtttcgtgagggtttttaggttttgggttcgagggtttggaagaatggtagttttagttagaagagtcgtttgcggagagtagttttagatagtgcggatttggtttgtggattttgtttggtttttgatttcggtttcgagagggggtttttattcgtttttattgggtattgtttttttaggaagggttgtagtggattttcgggtttcggtttttgattttatttggttttagttttttttaggaaaggtcgagcgagatagtacgagtatagtagggttgttatgagtacggttttaaggtcgcgattttttggtttgttttttatttttagaggttgggaggggtcgcggttttttttaaagttgtttttagtaggaagtagggtattgaagataaggatgggtttaggtgattttgagttcgtattttatgattgttttggaatagattttgtttggatgggaagaggggggtttatgttttttatcggggagtgaggatgttttttgagaattgataggagtttcgaggatgggtttcgcgtttatattagtatattcgttttttcgggttatacgttagtttatgtttattagttatcgttaaggatatgtttttcggtatgtgggatttttagggatataggaaacggtggacggagattgtggtgttttatatatagtaagggttttataaaaattttttgaattgagaaagatacggtttttgtttttggtatttgtagataggaggtttgggttttgggcgatttttagggtataggttgtgtattgggagattggaacgtggagaaaattttaaggttaggggtttgtattttatttgggaggtgggttaggatattttggtttatagaaggggatgaaaaaaagtaaaaaaaaaaaaagaaaaaaaaaaaggtttgtcggtcgcgcgtaggttttcggttcggggtgataagacgttggcgcgggtaagcggggtttcgcgggttatagttagatttcggtttcgaggattcgggtcgttacgttagtttttttttttagaacgtcgaggttttaggagcgtgtgcgcgtcgggacgttttagagaatttggaagcgttggtttcggaggtaaggtcggtttggttttttttttttaatttttcgacgttattttttggattttttgtagatcgggttttagttttagcgtattttaggaagaaataatattttcgcgtttagttgagttaagcggttaggattttagaaggggcgaggtttttatggtaacgagggaaattttttgcgtttgcgtagaggcgttcggtacgttgggaaatgtggttttcgggttgtttttggaggttaagggaatggatataaggtggcgcgcgaacgttgcggtcgatgtggttaagttcgggtttttagttgtcgggcgttgcgggcgtaggagaggtcgcgaaggtttgaaaggtagtttttttgaggcgtttgggatgcggagtgaagagaaggaggtatagtttttttagcgcggttgattttgtcgtttgaaaatttggtttaataagcggtagttttggttagggcgagggtagttgttttcgaggtttcgttttagtttgggttgagtcgggagcggtcgagggagggggttgtgacggtgggagttggtttcggagggaagcgcgcgacggtcgtgttgtaagcgttttaggtttaggttgggcgatttttcgcgttgttgagaggtttttatgttcggtgggagttgaagtcgggtttcgggagtagtagttattttgatttttttattcgcgagttttaagtatttttggatttaggtttcgttttgggcggaaatgtgtagttagttgattgtttaggagttatttttttcgttttcgcgttagttttttggaatgagaatttagaaatttaggatttgatttcggttttgttagagattagtagttatttttttgagttttagtttttttatttttagaaaacgatggtattggggtaggcgcggtggtttacgtttgtaattttaggattttgggagacggagggggtggattatttgaggttaggagttagagattagtttgggtaatatggcgagatttttttttttattaaaaatatgaaaattagttagcgtcgtggtataaaaaaaaaaaaggaaaagatttttttttttggagatggagtttttttttgtcgtttaggttggagtgtagtggtattatttcggtttattgtaagtttcgtttttcgggtttacgttattttttcgagtagttgggattataggcgttcgttattatgttcggttaatttttttgtatttttagtagaaacggggttttatcgtgttagttaggatggtttcgattttttgatttcgttatttattcgttttggtttttcgaagtgttgggattataggcgtgagttatttcgttcggttataaaagtgttttataaagtattatttggaatgggggcgggggggagtttttagataatttaaatgtttattaataaatgattatttaattgatggattttataaaatagaatatgtgtggttattttttaaatgaggtaaattttttatgtattatttggggggaaaatttaaatggcgttttttttttgtttttatattattataattattaatacgtaagattttggtgattaaagatattgggttggttaggcgtaatggtttacgtttgtaattttagcgttttgggaggtcgaaacgggtggattatttgaggttaggagttcgagattagtttcgttagtatggtgaaatttttatttttattaaaaatattaaaaaaaattagttaggtatggtggtgggtatttgtaattttagttattcgggaggttgcggtaggagaatcgttttaatttggaaggtggtggttgtagtgagttaagattgcgttattgtattttagtttgggtggataagagtgagaatttattttaaaaaaaaaaaaaaaaggtgtggggtttttttttttatatattaagtaatagatta

SEQ ID NO: 329 - DNA, 13317 bp, Artificial Sequence
  chemically treated genomic DNA (Homo sapiens)
attttgtgtttaatattttataaagttttggggatttagttgtggttaaggtagttaagagttttgtttttgtcgtgttgatattttagtgtgggtggtgggttgttagcgtaagtaaatatatatagtaatatcggtggtgatgggtgtttaggggaaaatgaagggtaagggtaaggggaggtagggtgggtatgttttgtttagggaggttaggaaggttttttaagaaagggacgtgagtagaggttgaagagagtggagaggggtttgagtttttatttgagggtgtagtgtttgtaaggttttgaggtggggcgtttttatgtattttggtagttgagggagttaggtattgttgaagtgaagtgtttttagagaagtaaagggggatgttgtaggtcgcgtagggttttggggttgttttggggattttggtttttatgttgtatgggagggttcgagcggagaaggggtgggagttgatttaggtggttacggggttttaggttgtaggaggggcgtgggtagagtgttgattttttttattttataatatttttttattttttttttgttgtatttagtagtagtttagtttttttcgttgttgagtagtgttttattgtggatttacgtgtttgtttatttatttttttgtgggtagatttttggtttgttattagtttggggttattgtgaatattgttgttgttaatattgtagtataagttttttgtatatatattaatttttttgagacgaattgttaggtcgtgggataggtatatattgagttttgattttgattgtttaatagttttttatagtagttgaattattttgtattttttattaataatgagtaagggttttggtttttttatattcgagttagtagttggttttgttagtttttaaaattcgagttattttaggtaggtggttatgatttgtatttgtttgtaattaatgagattatgtatgttttttggttgtgtgggtgtttttttttgtgaggtgtttttgttttttttattttgttttgagttaatagttgtagttttggtttaggtatttagaagatttatgtttaggaattttaggaagtaatgagtgtggtggggtcgtgtagggattttttttcgtagggcgtgttatgggggttttataggcgagtttttgtttttttgtttgagtgttttttattggtagtttttcgagtgattaggttattttttttttttgagatgtagtttcgtttttgttgtttaggttggagtgtaatggcgcgattttggttttttataatttttatttttcgggtttaagcgatttttttgttttagttttttaagtagtatgtgttattacgtttagttaattttttgtttttagtggagataagatttttttatattggttaggttggtttcgaatttttgattttaggtgattcgtttattttagttttttaaagtgttgggattataggcgtgagttatcgtgttcggtttaagttagttatttttttggttgtagtggttggtattttattattataggattgcgttacggatattttagttgaggtattatttttagtgggaggatagggtaggatttaggcgggacgtaggggattttttaatttttttttttgttttttttttagttgtgttgattttttagttgttgagatgagtttgtaaaaagtagttttgttgattttagtagcggttagggttttcgttgtttttcggttgggagattcgaggtaaatagtttttttttttttagtttttgtttttatttgggtatggttattgattgtttggtggggtgttgggagtatttaggagagattttatgggagcgtcggtattttgtttaaggttatttagttggcggtggtttttggattttggaatttagattatttttggttatatttggttgtttttgtttttttttggaataatggtagttatgtgtttggttgtttattgggcgttaggtagtaggtcgagttttgggtttatagtgggtattttagtgttgttgtattataagggttttgagaggcgatgtttttgggtcgttgtgggttagcgagaggggagatgagatatggagtttttgttttattttttttatattagttttttttttggattttgagtttttttttttagttatttgggaagtattttgaattgagtttgtattagggaaggtgtggtgtaggttcgtgtaggggacgggttttttttagttttagttatagtttagaaggtttttggtgtttttttttgtttatttttttcgtgtttttttttattaggtttttttttgttttaggtttttgtattttttgtttttttgttgaaatatatttttttatgtgtttatatagtttatttttttagttaattcgggtgtttgttcgtaagtttcgtatattaagttaatattttgtttttttattttttagtttttttattatttgattatttgtatattcgtgtatttttttgttttttatattagattgtgagttttatgaaggtagggttgtgttttagtgatattttgttgttggtattattcggggtttaggatgtattttaaaaaagattggtgttatgaagagagtttggtagtgtgtttttggttgtgtgtggttttggggtgggggttagttggggatatttggtttttttttttatgtgtttattagataagacgttttgttggtttattgtattagcgttaataggtgttgggagggttgtttcgagggtgtataaagagtatatagtgtagtttttgaggtggggaaggttttttggaggaggtattggtttagttgagattttaaggaagagagagaagaacgtttagaaggaggtgttgtttttgatggaggttagagggaagggtttgagtgatagaagcgtaatatggagagttaggtagggcggagaggttggagaggtgtaatagttaacgttatggtttttagtttttttcgagggttttttaggtgtacgttttagtttatgtatttggaacgtagggtagtagaggcgaggttttgaagggttttggatttttagttgaggagtttggtttttttgttgggaatattagggagttataaaggttttgagtaggagaaagataggtttagcgttggggatttttttagttgttgaatgtggggtgagtgggagggagtaagagtggagcgtaggaattcggggaagaggtgggggtagatcggggtagatttgattagagttaggtcgcgggtaggatggggagagatggttacgttagagtttgatatatagaatagtgggagatatagaaatatatatatatttatatattttttgagatagggttttattttgttatttaagttggagtgtagtggtgtaattaaggtttattgtagtttggattttttaggttcgagtgatttttttgtttcgaatagttgatattataggtgtatagtattatgtttggttaattttttaatttttaatttttttgtagaaaaaaattaggttgtgagataagtttttattacgttgtttaggtaggttttaaatttttaggtttaagggatttttttgttttgattttttaaagtgttgggattatagatatgagttattgtgttcggtcgagatgtggggatgttgaggattgagagtttggtagttttgtgtgtttgggttgtggggtgtcgggtatgttgttggtaaggggagttttttattgttgtttttagtttcgtattattgtttttgtagtttggagtttagaatgtgattttttatttttttgtttatttttttgttatgtttattttgttttttttttcgttttttattatttattttttttttttttgtcgggatttgggtagtttgttattgttatatgttaggtagtagcgtgttcggtttattagtttttttggggtacgagagaaagttgatgtttatggtgtttttagagttagttgttatttttttgggcgttatcgtagttttcgatttgttgttcgtaaataattttaggttgggaaaggtaaaggcgttttggtttttgtggattttggttaggttttaggttttaggtaggggtttagttggcgttgtttcgcgtttttttttttttcgttttgggaatttgagacgaagtagtggtttcggcgttttttagtttgttggttgttggtttttgaggatagaagtgaaggttttggggtagggattagggtttcggttaagtttttaggattggtttttaggttttagatcgtgtatacgtagtaggttgtttttttgtttaagatttcggattgtttgagatttgttttttttttgttatttgatggggggagggaggtcgttgaggtttagggaatggtatgggatggtatggggggacgggagtgtgtttagtttgttgaaggtggtaggttggtggttttttggtttggaaagaagggagaggggagagagagaaaagagtgtgtgtgtgtaagatggtggagggataggtagatgttggtggttttgcgtatttttttaggtattttgggttgttttatttatattgggttattttagtgttgggttatgggaatgatacggggagggtagggtacggttattttgatgtttgtttagttaggagtgattgtgggtggaggggttatttttttttagtatgggtgttttgagtttggggtttggtttgcgtttaggtcggggagttttgttttttttagattggggtcgttggggatattgttatatttttttgtttagaatgggtttttgagagcgggttttacgttatttttgttggttttattttttgttgagtgggtagaatagttagagggttttagagttcggcgtttttagggaaggggttggtgtggaattttttttcgttttgattagttttttttttgttttgtagattgtgttttgtttacggtgttttttgtatgttttgttgttttgagttgtttcgagttaggtgatagcgtattacgttgttattatgaatgaggtgtttgttattaaagaaggttggttttataagcgtggtaagaggtcgtttttgttcgttagatttttttttttacgttggttttttttggaaagttgtgttttgagaggtagaggcggagggttttattagtttgaggagttagtatttcgtagttttaggtttatagttgtttatgttttcgtttcgtggatttttttagtggttatttgggtaggagagtagggatttgattgtgtatgagtgattttatttatagttttattttatagatgaagaaattgaggtttagagaggggaagttacgttattgaattaatatagtgaggtagtatttagtatttatttagttagtaagtatttattgattgtgtgttgtgtcggatagtttcgggtttcgagatatagtggttttttgatggagtttatattttagtgggggtggggtaggtagtaaataagtagatatggaatgtcggggtggtaagtgttggggtgaaaagtgggaattgtgagtgagggataatgggttgggggcgggggggtattaagaggttgttcggaggagacggtagtggttagaggtttggagtttggaggaggtgagacgttggttgggtaagggtgttttagggagagggatagtaaggatagaggtttttaggtggggatgtgtttggtgttttttggtaatagcgtggttggagtagtgtgagttagggcgagttgggggaggtaagtagaggagtaacgcggagtttagttgtgtcgcgtttgtaggttatggaaaaggattttggttttggtattttagacgagagtagttttgtgatgtcgtgagtcgatgcgtggtttgatttatttgtattagtgggaagttgaggtttttttttagtgaagttaggatagggaagagattttttttgattttagggttgtttgttttaaagtggttgttacgtaagattgggaggtagatggggagaagcgttatttgttgagagatggttttgttttaggttagtttttgtgggtttttttttggaaagaaggtttttaggtgtggcggttggttgttttgtgtgtatttgtatttatttagtaaatacgtgttgagtagcgtttgtgggttaggcgttgttttaggttttggggtttagtagtgagttcgataggtaaatattttattttcgtgttagtattttgggcgttgatagggaggtagatagtttttaggtagatatgtatgttttacggtggcgcgagttatggagaaaaaataagtaacgtgaggatgggagggtatgaggtaggtagggcggttagagggggtttcgttgagaagggggtatttgaataaaggtttgaaggaaatcggggattgagttttatagttatgttagaggcgatagttaatgagttttgagggggtaagtgggtttgtttaaagagggggtaggaagttggcgttgtaggtatcgggaagagttacgtattttgtattgtattagtttgtagacgtagatagggagtagcgatgagggatggacgtttttttttgggagtagtttttttatttgattgagtagaggagattcgtgttttgttgttttttttggatagagatggtttttaaggttttttggtttagttttttagtttgagtttggagtttgggtttgttgatggagttttttgagttttggtagttattaaggttttaattttggttttgttgtttttttttagtgtaattgtgagtaagttatgttattttattgagttttggttttatatttataaagtgggttaataagttagatttttgatgttgttagttttataagggtaggtatttttatgaggtttttttatagtggtatttttagtacgtttaaaagtggtgggtatatagtaggtatttagtaaatggttgttgaatgaatggttggcgtggtgtgtgggtggtgtgttggggaatatagggttatgggtttttgtttcgtggtttgtacgtgcggaggttatggtttattaggttggattgtgagagttttgggatgggtgtggaattgttggaggggtaagagtttttttttggtttaggattattgatggtattaaatgagttttggttttttttgggtttttagtgttcgtatttatgttataaggggttagatgatttagttataggtttgtttttgttatttgggatggtttagttttgatatatttgttttaggtttgtattttatatatacgtttgtgtatatttgtatttttgggtttttttagtgtttatttttttgagtagtagttggtagaggtgggtaaggtgaggtgggttttgttgattattgttgttttgggatttgtattattttatcgatttttttggtggttaaaataatggtagtgttggtttattgagtatttattgtgtgttagatatttgtttttgttttaggtaagtttgattttgttgaatttttatagatgttttgtggagtatatgttattttatagattggaaagttaaggtttagtaggaagagtgatttgtttgaggttttagtaaggagtgggtagagttgaggttggatttaggttttttgatttttgaattagtgtttttaaggtttggtttacgtgttgttttttatttagtaagttgtgtttaaggttaagggtgtagtaatagtatatttaattagagttatttatgttatgtgttggttttatttttgatatagttgtagtatattattattagtagagtatttgttttttgttacgttttatgttgggttttatttgtcggtttagaggtagacggtatagtagttaagatgtgggttgtgttttttaattttggtttttttaggtaatagttgggaaggttgggtaaattaataggatttttttgtgatttagtttttttattcgtaaaataggaatataattgtgaggatatttttttttttatttgttttttgttttttttttttttttatagatatatggttttgttatattgtttaggtgggttttgaatttttagttttaagtgagttttttgttttggttttttaaagtgttgggattatagttgtgagttattgcgtttagtttttaggtttttttttttagtttgttattaaagtatgaaaggttatagataaatgtttggataataaattcgttttaattttagtgtatagtttaagaaatagaataagacggttttcggaagtttttttaagtgttttttttaagtagttatcgtttttttaatttttagtaatatagatgaggttttttttagtttttattttttaaaaaaaaaaaaacggggatgaaatttatataacgtgagattaattattttgaagtgtatgatttattggtttttagtatattataatgttgtgtaattattatttttatttagttttaaaatttttttattattttaaaataaaattttgtatttattaagtagttagtttttgtattttatgttttagtttattttgtgttgttataatatattattcgagattgggtaatttataatgaatagaaatttattttttatcgttttggaggtagggaagttcgagatttagggttggtatttttttgttatacgttttatggtgaaaggggaagggtaagagagaataagatagggttgaatttgttttgtttttttttttttttgagatggagttttgttttgttttttaggttggagtgtcgtggcgcgatttcggtttattgtaatttttgtttttttggtttaaggaatttttttgttttagttttttgagtagttgggattataggcgtgtgttattatgtttggttaatttttgtattattagtagagatggggttttattatgttggttaggttggttttgaatttttgattttaggtgatttatttgttttggttttttaaagtgttgggattataggcgtgagttattgcgttcggtcgaattcgtttttttataaggaatttattttgtgataatgttattaatttatttatgagggtggtgtttttttgatttaaatattttttatgaggttgtattggggattaagtttttaatatatgaattttgggggataatttaatttatagtattttttgttttttggtgtttgttaattattagtttattttttgtttttatgaatttatttattttggatattttatgtaaatggaattatatgtggttttttgtgattggtttttttaatttagtaatatgattttttgttttgagttagggttttgggttatcgtttaggttgtagtgtagtggtgggattttggtttatggtttattgtagttttaattttttggttttaagtgatttttttgttttagtttttagagtagttgggattataggtaggtgttattatatttggttaagtttaatgtttttgaggtttttttatgtagtagcgtatattaatatgtcgtttttttttatggatgaataatttttatgttgtagatgtattatattttgttatttgttaatttgttgatggatattgggatgatatatttttttttttttttttttttttttttttttttttgagatggaattttattttgttattaggttggagtgtagtggcgtgatttcggtttattgtagttttcgttttttgggtttaagtgatttttttgttttagttttttgagtagttgggattataggtgtgcgttattatgtttggttaatttttatatttttagtagagatggggttttattatattggttaggatggtttttattttttgattttgggattcgtttatttcggttttttaaagtgttgggattataggcgtgagttattaagttcggtttcggggtgatatattttatatttaattttttgaagaagtagttgtattattttatatttttattagtagtgtatgagggtgttagtttatatttttgttaatatttgttttttttttattatagttatttttgggtatgtaaagttgtattttattgtgtgtgtggatttttttgtttttgttttgttttgtttttttgagatagagttttgttttgttttttatgttggagtgtagtggtacgattttagtttattgtaatttttattttttgggtttatatgatttttaggttttagttttttaagtattgggattataggtatgtgttattacgttcggttaatttttgtatttttagtagagatggggtttgattatgttggttaggttggttttgaatttttgattttaagtgattcgtttgtttcgattttttaaagtgttgggattataggtgtgagttatcgcgttcggtttttatcgtgattttgatttatgtttgttagatgattaatgatgttgaatatttttttatttttttgttgattatttgtgtatttttggaggaatatttttttgagttttttgtttattttaaaattaggtagtttgtttttttgttgttgtattgtaagagttttttatgtgttttggttaatagatttttattagatttttaagtatttttatttattttgtaggttatttttttatttttttgatagtgtttttttatgtataaaggtttttaattttgatgagtttatttgaagtttttttttttgttgtttgtgtatttggtgttatttaagaatttattgttaaatttaaagtaatgagatttatttatgtatttttagattttttttgtagttttagtttttatatttaggttaatttattttgagtttatttttgtatatggtttatagtgtgaagtaggatattataaaagaatgtgatatttatttttttgaatgtggatatttagttgttttagtttttttatttgtaaaatagggataagattgtgaggataggttattttgggtatattgtttatgggttattgttttttgttttgtaaggaatagtatttaaattaataaaaaaaattgtaaggatatttttttttttaggttttttttttttcgttttgaaaaaatatagtttttttgttgaagaaattgttttttttttattgaatgattttggtatttgtgttgaaaattagttgaatgtagatatttgggtttattttttggttttgaatttttttttattggtttgtatgtttgttttgtataaattgtattgttttgattattatagttttgtatagtaaattttgaaattggaaagtatttaattttattttttttttttaatattattttggttttttggggttttttgaaattttatgtgaatgtgaggattggtttttttatttttgaaaaaagaaaaagtttgttggaattttgatagggattgtattgaatttgtatattgttttgggtagtattgttattttaataatattgttttttaatttatgtatataggatgtttttgtatttatgtagatttttaatttttttaaataatgttttgtagtatataagttttttatttttttggttaagtatttttttggaggtttttgtaaatgttttttttttttttttttaagagttagggttttgttttgttattgggttggattgtagtggtattattatagttttaattttttgagtttaggtgattttgttatttcggttttttgagtagttgggattttaggtatacgtaacgatttttggttaattaaaaaatattttttgtggagattagattttattatgttgtttaggttcgttttaaattttagatttaagtttgttttagttttttaaagtgttaggattttataggtgggagttattgtgttggtgtttaatagttatgttgaggtaaaattgatgtattatatgatttatttatttaaagtatatagtttagttggttttagtatatttagagttgtgtatttattattatatttaggtttttttttttgttttttttttttttttttcgagacggagtttcgtttttgttgtttaggttggagtgtaatggtgtgatttcggtttacggtaatttttgttttttaggtttaaggagttttttgttttagttttttaagtagtgggattataggtatgtattattatgtttggttaattttgtatttttagtagagatggggtttttttatgttggttaggttggtttttaattttcgattttaggtgattcgttcgtttcggttttttaaagtgtcgggattataggtgtgcgttatcgtgtcgggttttattttttatttttgtagatttgtttgttttgggtattttatataaatggagttataatgatacgtggttttttgtgattggttttttttatttagtataagttacggtttttttatatggtagtatgttttagtatttcgtttttttttatgattgaatagtttttcgttgtatgaatttgttatattttgtttatttattcgttgttgatggatattagggtcgtttttattcgatggttgttatgaataatgttgttgaggatatttgtgtgtaagtttttgtgtggatgtgttttattatttttttttaatttttagtagttttttgatgagtgggttcgtgtgtgtgtgtgtgtgtgtgtgtgtgtgtgtgtgtgtgtttgtgtgtatagggtgtttggatatttatggtgaagaatagttggaaagagttaaggggcgttgggagggtgtggtagtagtgttattttgtttggtatagaagtgttttggtattggagttatttgtatagttgtattggtgaattttagtttatgggatttggttttatagggttatagggtatgtgtgtttggaagtttgggttttttttgggattaggttaggagttggtatagatagtttgttttttgttatacgttgaggtaattggtgttttagggtattgttgttggtatttttttgttaggtatgatttgtggattattcgggtttagtttagtgttttagtttgcgttagtaggggttatttggagggtttttttgggagaggtattttcgtgtgtttttcgtattttttcgtttcgtggtattttttgtgagttatcgttatattgggttttttgtcgtttatttgggatattatttaattttgttttaatttttttttttttttttttgttttattttagg

SEQ ID NO: 330 - DNA, 13317 bp, Artificial Sequence
  chemically treated genomic DNA (Homo sapiens)
tttgaaatgaggtaggaagggagggagagaggttaggataaggttgagtgatgttttaggtaggcggtaggaggtttagtgtgacggtgatttataaggggtattacggggcggggaggtgcgggggatatacgagaatgttttttttagaggagttttttaggtggtttttgttgacgtaggttggggtattgggttgagttcgggtgatttataggttatgtttggtaggaaggtgttagtagtagtgttttggggtattagttgttttagcgtgtggtaaggagtaagttgtttgtgttagtttttggtttagttttaggggaggtttaggtttttaaatatatatgttttgtggttttgtaaggttaaattttatgggttgggatttattaatatagttgtgtaggtagttttaatgttaaaatatttttgtgttaggtagggtggtattgttgttatatttttttagcgttttttgattttttttaattgttttttattatgaatatttaagtattttatgtatataaatatatatatatatatatatatatatatatatatatatacgaatttatttattagagagttgttaaggattaaaaggagatggtgaaatatatttatataaaaatttatatataaatgtttttaatagtattatttataatagttatcgagtggaaacgattttaatgtttattaataacgaatggataaataaaatgtagtagatttatataacggaaaattatttagttataaaaagaaacgaagtattgagatatgttgttatgtggagggatcgtaatttatgttaagtgaaagaagttagttataaaggattacgtattattatgattttatttatataaaatgtttagaataggtaaatttatagagatgaaaagtagggttcggtacggtggcgtatatttgtaatttcggtattttgggaggtcgaggcgagcggattatttgaggtcgggagttggagattagtttgattaatatggagaaattttatttttattaaaaatataaaattagttaggtatggtggtgtatgtttataattttattatttgggaggttgaggtaggagattttttgaatttgggaggtagaggttgtcgtgagtcgagattatattattgtattttagtttgggtaataagagcgaaatttcgtttcgaaaaaaaaaaaaaaaaaataaaaaaaaaaatttgagtatggtgatggatgtataattttgaatatattaaaattaattgaattgtatgttttaaatggatgaattatgtagtatattagttttattttaatatggttattaaatattagtatagtggtttttatttgtaaaattttagtattttgggaggttgaggtaggtttaagtttggagtttgagacgagtttgggtaatatagtgagatttggtttttataaaaaatgttttttaattagttaggagtcgttgcgtgtgtttgaagttttagttatttaggaggtcgaaatggtagaattatttgagtttaagaaattgaagttatgatggtgttattgtagtttagtttagtgatagagtaagattttagtttttaaaaaaaaaaaaaaaaagtatttataaaagtttttaaaaaaatatttaattaagggggtgaagggtttgtatattataaaatattgtttaaagaaattagagatttatataaatgtaaaaatattttgtgtgtatggattagaagataatattgttaagatggtaatattatttaaagtaatatatagatttaatgtaatttttattaaaattttaataggttttttttttttttagaaatagaaaagttaatttttatatttatatggaattttaaagggttttaaagagttaaaataatattgaaaaagaaaaataaagttaaatattttttaattttaaaatttattatataaagttatagtaattaaaatagtatagtttatataggatagatatatagattaatggaagagaatttagagttaaaaaataaatttaaatatttatatttaattgatttttaatatagatgttaagattatttaatggggaaagaatagtttttttaataaagagattatatttttttaaaacgaaagaaaagaaatttagaagaaaaaatatttttataattttttttgttaatttaaatattgttttttgtagagtagggaatagtgatttataggtaatgtgtttagagtagtttatttttataattttatttttattttgtagatgaagaaattgaggtaattggatatttatatttaaaagaatggatattatatttttttgtgatattttattttatattgtaaattatatataaaaataaatttaaaatgaattgatttgaatataagagttaaaattataaaaaaagtttaagaatatatgagtaaattttattattttgaatttggtaatgaatttttagatgatattaaatgtataagtaataaaaagaaaaattttaagtgaatttattaaaattaaaaatttttgtgtatgaaaggatattgttaagaaagtaaaaagataatttatagaatgggtggaaatatttggaaatttaataagggtttattaattagaatatataaagaatttttataatgtaataataaaaagataaattgtttgattttaaaatgagtaaaggatttaaagagatatttttttaaagatatataaatggttaatagaaagatgaaaagatgtttagtattattagttatttggtaaatataaattaaaattacgatgaaggtcgggcgcggtagtttatatttgtaattttagtattttgggaggtcgaggtaggcggattatttgaggttaggagtttaaaattagtttggttaatatgattaaattttatttttattaaaaatataaaaattagtcgggcgtggtggtatatgtttatagttttagtgtttgggaggttgaggtttgagaattatgtgaatttaggaggtggaggttatagtgagttgagatcgtgttattgtattttagtatgggagatagagtaagattttgttttaaaaaaataaaataaaataaaaataaaaaaatttatatatataatgaggtataattttatatgtttaaggatggttgtaatgaaaaaaaaataagtgttggtaaggatataaattgatatttttatgtattgttggtgggaatgtaaaatggtgtagttgtttttttaaaaagttaaatatagaatatattatttcgaggtcgggtttggtggtttacgtttgtaattttagtattttgggaggtcgaggtgggcggattttaaggttaagagataaagattattttggttaatatggtgaaattttatttttattaaaaatataaaaattagttaggtatggtggcgtatatttgtagttttagttatttaggaggttgaggtaggagaattatttgaatttaggaggcggaggttgtagtgagtcgagattacgttattgtattttagtttggtgatagagtgagattttattttaaaaaaaaaaaaaaaaaaaaaaaaaaaaaaaagaatatattattttaatgtttattaataaattaatagataataaaatgtgatatatttataatatagagattatttatttataagaaggaacgatatattgatatacgttattatatagaggaattttaaaaatattaagtttagttaagtgtggtggtatttgtttgtagttttagttattttggaggttgaggtaggaggattatttgagattaggaggttgaggttgtagtgagttatgagttaaggttttattattgtattgtagtttgggcgatagtttaagattttgatttaaaataaaaaattatgttgttaagttaaagaagttagttataaaaggttatatatgattttatttatatgaaatgtttagagtaggtaaatttatagagatagaaagtaaattggtggttagtagatattaggagatagggggtgttatgaattgaattgttttttaaagtttatgtgttggaaatttgatttttaatgtagttttatgggaggtatttgggttaagggagtattatttttatgaatggattaatgatattattatagagtgggttttttataaaaggacgagttcggtcgggcgtaatggtttacgtttgtaattttagtattttgggaggttaaggtaggtggattatttgaggttaggagtttaagattagtttggttaatatggtgaaattttatttttattaataatataaaaattagttaagtatggtggtatacgtttgtaattttagttatttaggaggttgaagtaggagaattttttgaattaaggaggtagaggttgtagtgagtcgagatcgcgttacggtattttagtttgggggatagagtaagattttattttaaaaaaaaaaaaaaataagataagtttagttttgttttgtttttttttatttttttttttttattatgggacgtgtgataagaagatgttaattttgaatttcggatttttttatttttagaacggtaagaaataagtttttgtttattataaattatttagtttcgggtaatatgttatagtagtatagaatgaattaagatataggatataaaaattgattgtttaatgggtataaagttttattttggggtaatgaaaaggttttgaaattagatagaggtagtggttatataatattgtgatatattaaaggttaatgaattatatattttaaaatggttaattttacgttatgtaaattttattttcgtttttttttttttaaaggataaaaattaaaaaaaattttatttgtgttattggaggttaggagagcggtaattgtttgggaggagtatttgggagagttttcggggatcgttttattttattttttgaattgtatattgggattggggcgagtttattatttaggtatttatttgtggttttttatattttggtaataagttaagaaaagaaatttaaaagttgaacgtagtggtttataattgtaattttagtattttgggaggttaagataggagatttatttgaggttaggagtttaagatttatttgggtaatatagtaagattatatatttatgaaaaaaaaaaaaagataaaaaataggtagaaggaaaaatatttttataattgtatttttattttgcggatggggaaattgagttatagagaggttttattagtttgtttaatttttttagttgttatttgggagagttagaattggaaagtatagtttatattttgattattatatcgtttgtttttaaatcggtagatggagtttagtatggggcgtggtagagggtaggtgttttgttaatggtggtgtgttgtagttgtgttagaagtgggattagtatatggtatgagtgattttgattagatgtgttattattatatttttggttttaagtatagtttgttgggtgagaggtagtacgtgggttaggttttgagagtattagtttaggagttagagggtttgagtttaattttagttttatttattttttgttgaaattttaagtaagttattttttttattgaattttagttttttagtttgtaaggtggtatgtgttttatagggtatttataaaaatttaataaaattaggtttgtttagagtagagataggtgtttggtatatagtaagtgtttagtaaattagtattgttattattttaattattaagggggtcggtggggtggtataggttttaaaatagtagtagttagtagggtttattttattttgtttatttttgttagttgttatttagaaagatgggtattgggaaggtttaagagtgtaggtgtgtataagcgtgtgtgtagggtgtaaatttgagataggtgtgttagagttaggttattttagatgatagaggtaggtttgtggttgggttatttggttttttgtaatatgaatgcggatattgaaggtttaagaggggttaagatttatttaatgttattagtaattttagattagagagaaatttttgtttttttaatagttttatatttattttaaggtttttatagtttagtttaatgagttatggttttcgtacgtgtaggttacgggataggagtttatgattttgtgttttttagtatattatttatatattacgttaattatttatttaataattatttattgagtgtttattgtatgtttattatttttagacgtgttggggatattattgtgaagaagttttatgaaaatgtttatttttgtagagttgataatattagagatttggtttgttaatttattttatagatgtgaaattaaggtttagtgaggtgatatggtttgtttatagttgtattaagaggaagtagtagaattagggttagaattttgatagttgttaagatttaggaagttttattaataaatttagattttaggtttaggttgggggattgggttaagggattttaaaagttatttttgtttagaaagagtagtaggatacgaattttttttgtttagttaggtggggaggttgtttttagggaggggcgtttattttttatcgttgttttttgtttgcgtttgtaggttggtatagtgtaggatgcgtggtttttttcgatgtttgtagcgttagttttttgttttttttttgaataagtttatttatttttttaggatttattggttgtcgtttttggtataattgtgaggtttaattttcgattttttttaggtttttatttagatgttttttttttagcgaagttttttttggtcgttttgtttgttttatgtttttttatttttacgttgtttgttttttttttatggttcgcgttatcgtgagatatgtatgtttgtttgggagttgtttgtttttttgttagcgtttaagatattaatacgaggatgggatgtttgtttgtcgggtttattgttggattttaggatttagaatagcgtttggtttataggcgttgtttagtacgtgtttgttgaatgaatgtaagtgtatatagggtagttaatcgttatatttggggattttttttttagggggaggtttatagaagttggtttgggataaagttattttttagtaggtggcgtttttttttatttgttttttagttttgcgtggtagttattttgggataaatagttttggggttaaaaagggttttttttttgttttaattttattaaaaggggattttagttttttattagtataaatggattaggttacgtatcggtttacgatattatagggttgttttcgtttggagtgttaaagttaaggtttttttttatgatttgtaggcgcgatatagttggatttcgcgttgtttttttgtttgttttttttagttcgttttagtttatattgttttagttacgttgttattagaaaatattaggtatatttttatttgggagtttttgtttttgttgtttttttttttgggatatttttgtttagttagcgttttattttttttaggttttaggtttttgattattgtcgtttttttcgggtagttttttgatgttttttcgtttttagtttattgttttttatttatagtttttattttttattttagtatttgttatttcgatattttatgtttatttatttattgtttgttttatttttattggaatgtaagttttattaggggattattgtgtttcggagttcggggttattcggtatagtatatagttaatgaatatttgttaattgaatgaatgttgaatattgttttattgtgttagtttagtgacgtgattttttttttttgggttttagtttttttatttataaaatggggttatgaatgagattatttatgtatagttagatttttgtttttttgtttagatgattattgaaggagtttacgaaacgggggtataagtagttgtgggtttggggttgcggaatgttggttttttaggttggtaagatttttcgtttttgttttttagggtatagttttttaggaggagttagcgtgggagaaagaatttggcgggtaaaagcggttttttattacgtttgtggagttagttttttttgatgatagatattttatttatggtggtagcgtggtacgttgttatttagttcgggatagtttagggtagtaggatatgtaggaggtatcgtggatagggtatagtttgtaagataagagaggagttggttagggcgggaggggattttatattagttttttttttgaggacgtcgggttttgaggttttttggttgttttgtttatttagtaaagggtaaggttagtaagggtggcgtggagttcgtttttaaggatttattttgagtagagagatgtggtaatgtttttagcgattttaatttgggggaagtagagtttttcggtttaagcgtaggttagattttaaatttaggatatttatgttggggggaggtggtttttttatttatagttatttttgattgagtaagtattaaggtagtcgtgttttgtttttttcgtgttatttttatggtttaatattgaggtaatttagtatgaatgaggtagtttagggtatttgagggaatgcgtagagttattagtatttgtttgtttttttattattttatatatatatatttttttttttttttttttttttttttttttttaaattaggaagttattaatttgttatttttaataaattaagtatattttcgtttttttatgttattttatgttattttttgagttttagcggtttttttttttttattagatgatagagaaaagataggttttagataattcgggattttgaataagaaagtaatttattgcgtatgtacggtttggggtttagaagttagttttgggggtttgatcgaggttttgatttttattttaagatttttatttttgtttttagggattagtaattaatagattgagggacgtcgaggttattgtttcgttttaggtttttagaacggaggggaggagggcgcgaggtagcgttagttgggtttttatttggagtttggggtttggttagggtttatagagattaaggcgtttttgttttttttagtttggggttatttgcggatagtaggtcgggagttacggtggcgtttagagaagtggtagttggttttagggatattatgggtattagttttttttcgtgttttaggggagttggtgggtcggatacgttattgtttggtatgtgatagtggtaggttgtttaggtttcggtagaaagaagggaggtaagtggtaggaagcgggaggaaagataagatggatatgatagggaagtaaataagagggtgagaaattatattttgggttttaagttgtaaaggtaatgatgcgaggttgggagtagtaataaggggttttttttgttagtaatatgttcggtattttataatttaagtatataggattgttagatttttaatttttagtatttttatatttcggtcgggtatagtggtttatgtttgtaattttaatattttgggaggttaaagtaggagaattttttgagtttaggagtttgagatttgtttgggtaacgtagtgagaatttgttttataatttaatttttttttataaaaaaattaaaaattaaaaaattagttaggtatggtgttgtgtatttgtaatgttagttattcgagataggaggattattcgagtttgggaggtttaggttgtagtgagttttgattgtattattgtattttagtttaggtgatagaatgagattttgttttaaaaaatatataaatatgtatgtatttttgtattttttattgttttgtgtgttaaattttaacgtgattatttttttttattttgttcgcggtttggttttagttaagtttgtttcgatttgtttttatttttttttcgagtttttacgttttatttttgtttttttttatttattttatatttagtagttagagggatttttaacgttgaatttgttttttttttgtttagaatttttgtggttttttggtgtttttagtaaaaaagttaaattttttagttgaggatttaaggttttttaggatttcgtttttgttgttttgcgttttaggtgtatgagttgagacgtgtatttagaaagttttcgggaaaggttaaggattatgacgttgattattgtatttttttagttttttcgttttatttgattttttatgttacgtttttgttatttaagtttttttttttggtttttattagggatagtatttttttttgggcgttttttttttttttttttgaggttttagttaaattagtgttttttttaggaagttttttttattttagaggttgtattgtgtgttttttgtgtattttcggagtaatttttttaatatttattaacgttaatgtagtagattagtaaagcgttttatttaatgagtatatgaagaaagaggttaagtgtttttaattgatttttattttaggattatatatagttagggatatattattagattttttttatgatattaattttttttggggtgtattttagatttcggatggtattagtaatagaatgttattaagatatagttttgtttttatgaggtttatagtttggtgtgaggggtagaaaaatatacgaatatgtaaataattaggtggtggggaggttggagagtggaagaataggatgttagtttggtgtgcgggatttgcgagtagatattcgagttaattgagggagtgagttgtgtagatatatgaggaaatgtattttagtaggggaatagaaaatgtaaggatttgaggtaggagggggtttggtgaggagaaatacgagagaggtggataggggagaatattaagggttttttgggttatggttgggattgagagaagttcgttttttatacggatttatattatattttttttgatgtaagtttagtttaaaatattttttaaatggttgggagggagaatttagagtttaaaggaggggttgatgtggagggaatagaataggggttttatgttttattttttttttcgttggtttatagcggtttagggatatcgttttttagggtttttgtaatgtagtagtattaaagtatttattgtgggtttagggttcggtttattgtttagcgtttagtgaatagttaaatatatggttgttattattttagagagaagtaaaggtagttaggtatggttaagagtggtttgggttttagagtttaagagttatcgttagttgggtggttttgggtagggtgtcggcgtttttatggagttttttttgaatgtttttaatattttattagatagttagtgattatgtttagatgaggatagaagttgagagaagggaagttgtttatttcgggttttttagtcgagaagtagcggaggttttggtcgttgttgggattaatagagttgttttttataagtttattttagtaattaaggagttagtatagttggagggagagtagggggaggagttggaagattttttgcgtttcgtttggattttgttttgtttttttattgagggtggtgttttagttgaggtgttcgtgacgtagttttgtggtgatgaaatattagttattgtagttaagaagatggttggtttaggtcgggtacggtggtttacgtttgtaattttagtattttgggaggttgaggtgggcggattatttgaggttaggagttcgagattagtttgattaatatggagaaattttgtttttattgaaaatagaaaattagttgggcgtggtggtatatgttatttgggaggttgaggtaggagaatcgtttgaattcgggaggtggaggttgtggagagttaagatcgcgttattgtattttagtttgggtaataagagcgaaattatattttaaaaaaaaaagatggtttgattattcggggggttgttaatggaggatatttaggtagggggatagagattcgtttatggaatttttatagtacgttttgcggaggggagtttttgtacggttttattatatttattattttttaaggtttttgggtatgagttttttgagtgtttgggttagagttgtagttgttgatttaagataaggtaaaaagagtaagagtattttataggagaggatatttatataattaagaaatatatataattttattagttataggtaaatgtaaattataattatttatttgggatggttcgaattttaaaaattgataaggttaattgttggttcggatgtagaggaattagaatttttatttattattggtgggaggtgtaaaatggtttaattattgtggaaaattgttaagtagttaaaattaaagtttaatatatgtttattttacgatttagtaattcgttttaaggaaattagtgtatgtataaaagatttgtattataatgttgatagtagtaatatttatagtaattttaaattggtaatagattaggagtttatttataagagaatgaataaataaatacgtagatttatagtagaatattatttagtaacgaaaaggattaaattgttgttgaatatagtagggaaggagtgagagaatgttatagagtgaaagaagttagtattttgtttacgttttttttgtagtttggagtttcgtgattatttgagttagtttttatttttttttcgttcgaatttttttatgtaatataaaagttaaaatttttaaagtagttttaggattttacgcggtttgtaatatttttttttgtttttttgagggtattttattttagtagtgtttggtttttttagttgttaggatatatggggacgttttattttagggttttgtaggtattgtatttttaggtggaaatttaggtttttttttattttttttagtttttgtttacgttttttttttgagaagtttttttaatttttttaggtaaagtatgtttattttatttttttttatttttattttttatttttttttaagtatttattattatcgatgttattgtatgtgtttgtttacgttgatagtttattatttatattggaatgttagtacgataaaggtaggatttttggttgttttagttatagttggatttttagagttttgtagggtgttgggtatagagt

SEQ ID NO: 331 - DNA, 6664 bp, Artificial Sequence
  chemically treated genomic DNA (Homo sapiens)
tattataagggtattaattttattaatgagggaaaagttttcgaggtttaataattatttttcgaaggttttattttttaatattattattttggggtttaagttttaatatatgtatttaggaggggtatatatttttaaattatagtaattcgtaagtgatatatattttaggttttatggaatttatatttatttttggttatatttagttacgtggatgttttatagtattttattattaatatgtttaaagtgatgttttatgttttatagttgttttttagtatttttttagaatagtaggatttttagtttgttgtaaagttatatatttaagttatttttgatgatttttttttttttttttaatttagttttagtttttaaaaatattttattgttattttttttttttgaaattgatatttttttaagtttagtatttgttgggattgttgtagagttttttattgtttgttggttttgatgttgtattattagttttttttatgattttttttttttaatttttatttatgattatgttattgttttgtttatatttttttgtttaagtttaacgtttaatttaaaatttttagtatgattttgaatattatttttaaggtatagatattatttaattatttagtttaatgtttatgatttttgttgagtatttagattttgtttatgtttagcgtattgaattaattttagtttataaatttgtattgtttttttttgttaatggattaagttttttatttttatttgtttttttggtaaattttttttattttttaagatttagtttagttaattttgttatgaagttttgtttgatgttttttttattatgttttgtatatagtagtttttattatattgtattgtaaatatttgtattttatttaggtggaagatttatagttatttatttgttatttttgatttttattagttttaaggttgatatatgaattttttttttttatattatgtttagtttttaaaattttaatgagagattaaggtgggttgatatgtatgtatttaaagtataattattaataggtttaaagtgatttttttttttttttgtggggcgagaatgaagatagggggtatggaggttgtatatgataaatttttattatttgtattttatattttggattattttttaaaatttatagaaaaattatattatttttataattagaaaaatatttaattttgttatagtaacgatagtttagtatttttatttgtggtgaaaagatttgaatttatatattttgtattttttgttatttttttttttgaattaatatgaaaaaggataaattttttttttttgtatatatttttcggtaatttttaaattttttttttttttttatatatttgtttgtatagagatagggttttattatgttgttaagttggttttaaatttttggttttaagggattttttattttggttttttaaagtgttgggattataggtgtgagttattgtgtttggttaatttttattatttttatttagtagtaatggaggttttggtaagattgatttatttatttatttatttattcgtttatttttgggttagggtagtatatttacgtggtttaatatttaaaagatataaaatttttttttttatttttgtattaggttatttttgtattttatagagggtatatttttattagttttttttatttttttttcgaagtgtatttttttttttttttttttttttttagaaggagtttcgttttattattaggttggagtgtagtggcgttatttcggtttattgtaatattcgtttttagggtttaagcgatttttttgatttagtttttcgagtagttgggattataggtatgtgttattacgtttagttaatttttgtatttttagtagagatgggtttttattacgttggttaggatggtttcgattttttgataacgtgatttattcgttttggttttttagagtgttgagattataggcgtgagatatcgcgttcggttcggaggtgtatttttaagtaaatgtttttatattttttttatttaaaaaaaatatttgttttgatttgggttgttataataaaatgttatagattacgtgttttaaataataaaattttatttttatttagttttggaggtttggtgtgtaagtttagagggcgggtaatattaggttttggtaagggttgatttttttattgataggtgtttttttattttaattttatatgagagtaattaagttttttagcgtttttttttataagagtattaattttattacgagggttttatttttatgtttttatttaaatttaattattttttaaagttttatttttaaatattattttagtggggtgaggtttttaacgtatgaattagcggggtggggggataataaatatttagattatagaaatacgtaaatataagaaataaaattaaaaagatttatgtgtaatattaattgatttttttttttttttttaaaatggagtttattaaaatataaatatgaagttttttagagtatatatttttttttgtttttttttgtagtttttttttttttaatattatttttagggtagtttttttaaaatatggttttaaggttgtgtgtattttttttgtttagattttttggaatagtgtttagcgtttattaggattttgattgtaaatttttttttttgattttaatattataggatgtagtattttttatattttattatggggggtattttgaattatttgggttgattttttggtttttgtgttttatttatataattttttttgtatggaaggtttattttagaattttttttttagtttttgtttaaatgttatttttgttagtattagtagtttttttttttgggtttttatattgttttgtaatataagttataaggtaagtattagaagagaatttttaattattattttgtttttttatttttaatatttttagcggtaattgtattttatttatttttgtgtttatgaagtatagtgttgtattttggagatattatatagaagttggtttaaagggtaataaattgtatttgttaagatgatagtatggatttataataatttttgaaattttataaagaaagatgattgagttaaattgatatatttagtattatagttgtggaagtttgtggttttttttatgttaaaggtaaaatggatataatgaattagttgttatttttagatgatatagaagttgaattttttttaagttttttaaagagaaagatatattaaaatttattaaaattagtattataaattgtatagaatagtttggttttttagagtatttttttggggtagtgagtttttatttaaaaaatgaagtttggattttaaatataagttttaaaagtgattaggttttagtaggagtttttaaatttttatttatattatgatttttaaatgttttgtttttgttgtttaggaataaaaattgttaaggttgagttagatgtaatgtataatattagatgatagatgtagtttattgtgttaaaaggtgttaaatatttaagtgtatgtgatatattttatattataagggtaaggaagttttattttatattttgatttgggttttttaatatatatttgtagtggatgtggtaattagtttttgttttatgttttattaggattaatgtaattagaaatttttaaaatggatttttattatgtttagttttgttttattgttttatttgtttattttaaaaagattttagaatggtgtttaggttgggttggtggtttacgtttgtaattttagtattttgggaggttaaggtaggaggattgttggagtttaggagttggagattagttagggtaatataaggagatattgttttcgtaaataaatagaaaaaaaaaaagtaagaaagaaagagagaaagaaggaaagaataagaaaaaggaaaaaaaaattaattgtagtaagtgtagaaattttttttaaggatatgatggatggtaatgaagatagagtttttgatattggattatttaaagtataatttaagtttttttttttttttttatagaattgtgaatttttgtgttttaattatatttaagttaggcgtggtggcgagtgtttgtagtcgtagttgcgttggaggttgaggtcgattgtttgagtttaggatttggaggttagtatgcgtaatataatgagatttagtttttaaatgtatgtttttttttatatatttaaaattttgatgtgaaaatattttaaaatttaatatattttaaatgtttttaattgtataataaataaaatgtaaataataaaataatttaatattaaatttaaaaatgaggtagaaataaagtatagcgatataaataataaatttttttttatatttttgaggcggttttttgagttttttattttttttttaaggttattgaaatgtgttttttggagttagttcgtaaattacgtatttagaaaaatataattatatatttttaattttaagtattagaagtgaaagtaatggaatttcgatgtaaatataatattatttttttgatgagttattttgagtataataaatttgaattgtgttaatgttgggagaaaaaatttaaaagaagaacggagcgaatagtagttttttgtttcgttgattagaaatagtaggacgatattttttcgattggaggagagcgtttgcgttcgtatttagttggcgttcgtttttttgttttttttttagtcgtttttttttttttttttcgcgttttagttattcgggaaggtttgtttagcgtagttgggttttgattggttgttttgaaagtttacgggttattcgattggtgaattcggggttttttagcgcggtgagtttgaaattgttcgtatttggttttaaagttggtttttggaaattgagcggagagcgacgcggttgttgtagttgtcgttgcggtcgtcgcggaataataagtcgggtatagtggttggggttagggtcgtgtttaggggacggtcgagggtttcggagggcgagtattgaggaacggggttttttaagaaggtcggattggaggttagggatttgcgcggggttcggttgggtttcggggggcggtgggtagggttttcgtttgggtttggtcgtgtgagttatattgggttggttttagagggaggttatgggagtttagtttggcggggttaggcggcgtgggggtgggggttcggggttgtagttatgagtcgaggtcggttgtttttaggaattgtttgaagaggttttcgggttttgattgaagtaaaattcgtttttttacgttgagcgtttgcggagtagtaggtttttttttgggttcggtttttgcgcgttttgttatttcgtttcgggggtgggaaagtgggatcgtatttgggttaggtataggcgcgggtttttagagttaggtcgttttgagaaatcgattttggaattcgtgggtttttttgggtttgttttgtttacggtttcggtttatttggagttgttaagaatagttagtttaggtatttaatttttatgagtagtgtagtgtagttttttttatttaaaaagatatatttttgtttttttttggattgatttttttttgaagatgaatgtgagaaatagaatttaaaggtttattttgagtgtgttttataaatgattttattattagtgatgggtgttagaaaaatttaggtaattatgtttggagttttgacgttttattggtaaattttagaggaagttttgaatttttggttgttagtttttttttttaatttatttattgtgatttaagtatatcgtttttttgtttagtttttgatattgtttaggttataattagaattttatttgtggaattgtattttttatttttttgttttacggtgtttaagtgatattttttatttttggaaaaagtattttgaaagttttgagtatgtttgtttgtgattttagtaagtagaggaaaaagattaaaattgttacgtgggtaattgtaaatatttaaaatgtttttgtcgttttaaataaaatttttttaatgaatagtttgaatatattttagttttgtttttataattttaaaaaataatgttttgaataaaattaggagtattataaagcggtataaatttgttgaaatatttgggtataattttggtatacgtaggtattattttaaagtgttataaaaagggaatataattttggtttttgtttggaaagaatagataagttgatatttgaatttgagggttattttgattggaagaagttaaatattatattagtatagaatatatacgtttttaatgttttaggagttaagaaggatggaaagttattgtaggagtttttatttttgtaaatattgtttgaatgtaattaatatttatggaatatttatgttgtagtaggtattgtggaaaatgttttatatatagtgttttattaatgtttaaaattattcgagttagtggtatgtaattaagttagttttttttttattttagg

SEQ ID NO: 332 - DNA, 6664 bp, Artificial Sequence
  chemically treated genomic DNA (Homo sapiens)
tttaaagtgaaggaaaaattgatttaattatatgttattaattcgagtagttttaagtattaatgaaatattatatgtaaagtattttttatagtgtttattgtagtataagtattttataaatattaattatatttaaataatatttataagggtaaggatttttataataattttttattttttttgatttttgagatattggaaacgtgtatattttatattagtgtagtatttagttttttttaattaaaataatttttaaatttaggtattaatttgtttattttttttaaataaaaattagaattatgttttttttttgtgatattttaaagtagtatttgcgtgtgttaaagttatatttaaatattttaataaatttatatcgttttatgatatttttaattttatttaaaatattattttttaaagttatgaggatagaattaaaatgtgtttagattgtttattaggaaaattttgtttaaaacgataaaaatattttaagtgtttatagttgtttacgtgataattttaattttttttttttgtttgttgaggttatagataaatatgtttaagatttttaaggtattttttttaagagtaggaaatattatttaagtatcgtaaaataaaagaatgaaaagtgtaattttatagataaaattttaattataatttaaataatgttaaggattaagtagaaaaacggtatatttgaattataatgaatgggttaaaaaaaaaagttgataattagaagtttaagattttttttgaagtttgttaatgaaacgttagaattttaggtataattatttagatttttttaatatttattattgatgataaaattatttataaagtatatttagaatagatttttaagttttattttttatatttatttttaaagaaaaattaatttagaaagaagtagagatgtatttttttaaatgaaaaaaattgtattatattgtttatgagagttaagtgtttgggttgattgtttttaatagttttaggtgggtcggggtcgtgggtagagtaagtttaagaaggtttacgagttttaggatcggttttttagggcggtttggttttagggattcgcgtttgtatttggtttaggtgcggttttatttttttattttcgaggcgggatggtagggcgcgtaggggtcgggtttaggaaagagtttgttatttcgtaggcgtttagcgtgggggagcggattttgttttaattaagattcgaaagtttttttaggtagtttttgagaatagtcgatttcgatttatgattgtagtttcgaatttttatttttacgtcgtttaatttcgttaggttgggtttttatagtttttttttaaagttagtttagtgtggtttatacggttagatttaggcgaaggttttgtttatcgtttttcgaggtttagtcgggtttcgcgtagatttttgatttttagttcggtttttttagaggatttcgttttttaatattcgtttttcgaggttttcggtcgttttttagatacgattttgattttagttattgtattcggtttattatttcgcggcggtcgtagcggtagttataataatcgcgtcgtttttcgtttaatttttaagagttagttttgaagttaagtgcgagtagttttaaatttatcgcgttaaagggtttcggatttattaatcgggtagttcgtagatttttaaagtagttaattagagtttagttacgttgggtaggttttttcgggtggttagagcgcgaaagaaagaggaaagggcggttagagaaaaagtaggagggcgggcgttaattgagtgcgagcgtaagcgtttttttttagtcgggagagtgtcgttttattgtttttagttagcggagtaggaagttattgttcgtttcgttttttttttaaatttttttttttagtattggtatagtttaaatttattatatttaaaatagtttattaaaaaagtgatattgtgtttatatcgagattttattatttttatttttaatatttagggttaggagtgtatagttatgtttttttaaatgcgtgatttgcgggttggttttaaggagtatattttagtgattttaagaaggaaatggaaaatttaaaagatcgttttaaaaatgtaaaggaaaatttattatttatatcgttgtgttttgtttttattttatttttgaatttaatattaaattattttattatttatattttgtttattatataattaaaaatatttgaaatgtattaaattttaaaatatttttatattagaattttaaatatatagagagaggtatgtatttagagattgggttttattatgttgcgtatgttggtttttaaattttgggtttaagtaatcggttttagtttttagcgtagttgcgattataggtattcgttattacgtttggtttaaatataattaaaatataaaaatttataattttatgaggggagagaaagaggtttaaattatgttttaaataatttagtgttaaaaattttgtttttattgttatttattatatttttgagagagatttttgtatttattgtagttaatttttttttttttttttttgtttttttttttttttttttttttttttttattttttttttttttgtttgtttgcggagataatgtttttttatgttgttttagttggtttttaatttttaggttttagtaatttttttgttttggttttttaaagtgttgagattataggcgtgagttattagtttaatttaaatattattttaaaatttttttaaaataaataaatagaatagtaaaatagagttagatataataaaaatttattttaaggatttttggttgtattgattttaatgggatatagaataaagattgattattatatttattataagtatgtattagaagatttaaattaggatatggaatggaatttttttatttttgtgatatagagtatattatatgtatttaagtgtttaatattttttaatataatgagttgtatttattatttggtgttatatattgtatttggtttaattttgataatttttgtttttaggtaatagaggtagagtatttgggagttatggtgtaggtaggaatttaagaatttttgttggagtttaattatttttaaaatttatgtttaaaatttaaattttattttttaaatgaaaatttattgttttagagaagtgttttagggaattaggttgttttgtgtagtttatggtattggttttaatgaattttaatatgtttttttttttgagaggtttaagaggaatttaatttttatattatttaaaaatggtaattaatttattatatttattttatttttaatataaagaagattataagtttttatagttgtgatgttaggtgtattaatttaatttaattatttttttttataaagttttagaggttattgtaaatttatgttattattttggtaaatatagtttattattttttgggttaatttttatgtagtatttttaaagtgtaatattgtgttttatagatataaaaatgaataagatatagttatcgttggaggtgttgagggtaggggagtaggatgataattgggaatttttttttggtatttattttgtaatttatgttatagggtaatgtgagaatttagaggaggaaattgttaatgttagtagaagtgatatttgaataaaggttggggaaaggattttggagtgggttttttatatagaggaaattgtataagtagagtatagaggttagaaagttaatttaggtaatttagggtgttttttatggtagaatgtagggagtattgtattttgtgatgttaaagttagagaagggagtttatagttagaattttgatgagcgttgaatattgttttaaaggatttgagtaggagaggtatatatagttttggaattatattttaggaaaattattttagaggtggtattaaaaaaaaaaaaattgtagaggagagtaggggaaggtatgtgttttgaaaaattttatatttgtattttggtaaattttattttggaaggaaaagaaaagattagttggtattgtatataagtttttttggttttgttttttatatttacgtatttttatggtttgaatgtttgttgtttttttatttcgttaatttatacgttgaaggttttattttattgggatggtgtttggagatgaggttttgggaggtaattaggtttagatgaggatatgagggtggggttttcgtgatggaattagtgtttttataagaagagacgttgaagagtttggttgtttttatgtgaggttagaatgagaaggtatttgttagtgaggaagttagtttttgttagaatttgatgttgttcgttttttgaatttgtatattaagtttttagaattgagtgaaaataaaattttgttgtttaaggtacgtagtttatggtattttgttatggtagtttaggttaagataagtgttttttttagataagaaaaatgtgagaatatttgtttgaaaatatattttcgggtcgggcgcggtgttttacgtttataattttagtattttgggaggttaaggcgggtggattacgttgttaggagatcgagattattttggttaacgtggtgaaaatttatttttattaaaaatataaaaattagttgggcgtggtggtatatgtttgtaattttagttattcgggaggttgagttaggagaatcgtttgaattttggaggcgaatgttgtagtgagtcgagatggcgttattgtattttagtttagtgatagagcgagattttttttaaaaaaaaaagaaaagaaaagaaaatatatttcgggaaggaggtggaagaaattaataaaaatgtgttttttgtggaatataagagtgatttggtatagaggtggaaaggagagttttgtattttttgaatattgagttacgtgaatgtattattttagtttaaaaatgaacgaataaataaatgaatgaatgaattagttttgttaaggtttttattgttattggataaaaatggtaaaaattggttaggtatagtggtttatatttgtaattttagtattttgggaggttaaggtggaggattttttgaggttaggagtttgaggttagtttggtaatatagtaagattttgtttttatatagataaatatataaaaagaaaaaaaaaatttaaaagttgtcggaaaatgtatgtaaaagaagaagatttatttttttttatgttaatttagaaaggaaagtgatagaaaatataagatatatagatttaggtttttttattataagtgaaaatattgaattatcgttgttatgatagagttgggtgtttttttgattataaaagtaatgtgatttttttgtaaattttaagaaataatttaaagtgtaaaatatagataataaaagtttgttatatataatttttatgttttttatttttattttcgttttataaaaagagaaagagattattttaaatttgttggtagttgtattttaaatgtatatatgttaatttattttaattttttattggaattttagaaattgggtatggtgtagggagaagagatttatatgttaattttgggattaatgaggattaaggataataggtgagtagttgtggattttttatttaggtggggtgtaaatgtttataatgtaatatggtgaagattgttgtgtgtagaatatagtggagagggtattaggtaaggttttatagtaaagttgattgaattgagttttaaggaataaaaagagtttgttaagaagataaatgaaggtggagagtttgatttattgataagaaagaataatgtaagtttgtagattgaaattaatttagtacgttgaatataaatagaatttgggtgtttagtaagggttataaatattaggttaggtagttaaataatatttatattttgaaggtaatgtttaaggttatgttaaaagttttggattagacgttggatttgaataaaaaaatgtgaataaggtagtgatatggttataagtgggagttaggggggaaaagttatgaagagggttggtgatgtagtattagagttagtagataatggagggttttgtaatagttttagtaggtgttgaatttggggagatgttagttttaagaggaagaaatgataatgagatatttttaggagttgggattgggttaaaaaagggagaaggagttattagggatgatttgggtgtgtggttttgtaataggttgagggttttgttgttttagagagatgttaaggggtagttatggggtatggagtattattttgggtatattgatagtgaagtattgtgggatatttacgtggttggatatggttaagggtaagtgtaggttttatagggtttgaagtgtatattatttgcggattgttataatttgaaggtatgtgttttttttaaatgtatatgttggaatttaaattttaaggtgatggtattaagaggtagggttttcgggaggtgattattaaatttcgagggttttttttttattaatgggattaatgtttttataata

SEQ ID NO: 333 - DNA, 6507 bp, Artificial Sequence
  chemically treated genomic DNA (Homo sapiens)
tagattgaaagtaatttttagggtggttttgtttatttttttatcgagaatatggttgtcggtttttttgaagattgtggtttggtataaggagaggtgtaggcgtttggttttgagtattttggaatttttagtcgtatagaatttggtgtttttttttttatttttataaggagttgttattttgtttggattttttgtttgtggattagaaataaacgtttttttaaaggattagtaaataggttgattttttgtgtaacgttgttttggggttttttttttattttggtagaaggagtttggagtttatgaggtagttagtattgtgtttttgtttagtcgtgttgtttttttttttttttttagttttttttttatgtttaagttagtttttagtcgttggtttttatggtatttttagtatagttggatattaagaggtaaaatttaaggtttggtttggtcgtgttaacgattgtatagatatttttttaaataattttgtgtaatatttttttagaatagtaagtttttgttgaattgttatagatgagtttttaggaatatatcgggtgtggttatttttattgggtgtgtttatggtcgtggtttgtgtttttgtaaataaatagaatatttgaattatttttcgaattgggttatcggtttttttatattgatatttagagatttgtagttttttaatttttaaggaaattttttttattgaaaggtataaaaaggttaaaaaagaaaattcgagagttttaattttttgtataatagtattaaaataatttgtttgtttggaaagatgagaatattgttgtataatttaaaatgtgtttttaatttgtgaaaaattattatggtgagttagatagttattttaaatagttgaatagagattattattagtaaatagagtttagttttgtagttgtttttaaaatttttgttttaaattcggtgagttttgtttgttgtcgtcgcgtttttgggtgattatttagacgggttagtgggaataacgggttaataagatagttttttatatgtgtttaaaggatggtttttcgaaggtttggaagtattttattgttggaagaagtaaataagaatgatattttagatggaaatagaatttttttttttgtttttgattaatatggtattaaggggtttttttttttttaatgtatgtacgtgttttgttgggggttttattttatagaatgagagtatttgagtttttttaatgaatttggttagttttgtgtttggttgaggatataggagtgggatatttattttcggattttttagagtatagaaatttttagttttgttgtttttgaagtattttttttagtttttttgcgggtttttatgtttgagtttgatggttgttggatttttatttaacgaaaattcggttggaaattgtttcgtttggtagtttttttttgttgttttttattttattttttttttatttgaaagtggtatttagttgatttgtttatttagattgtttacggagtttgaatttgttaacgtggtgttggaggttttattttgaaaagggttatagttagggtaattttttttatataggaaaatttgaaaattatattaatagtttacgttatagttaaattatattttttttatattaaataaaattatggagaattaaaagtatattatataaaacgtttatagtgttttgtatgtgatttattttagtatttatataattagattagtgttttttagtaaacggttttgttaattagcgagttattgttgattttgttgtggtggtaagttgatatcgtgtaattaatttcgtggatgttttttggttatttttgtttaaacgaagtagtcgtggtagtagttgtttatgatttttgtttagtaaagtaaaataaatgttaaatatggattgttttgtttttttttttgtggatttttggtgtttatgttattttgtttatcggtggggttggttattgttagtaaagaggttttttatagaagtggttggatttaaagttttggttgggaaaggtttttgtggtagtttttattaagcgtaagtgcgaggttatttttttttcgtgggttttggggtcgattttgttagggtttgatatgagtggttgtatttgggtatttaatagattttataaaggaagggtaaattggagatttttggtcgggtacggtggtttatgattataattttagtattttgggaggttggtgggtagatattttaggttaggagtttaagattagtttggttaatatggtaaaattttgtcgttattaaaaatataaaagttagttaggtgtggtggcgtacgtttataattttagttattcgggaggttgaggtaggagaattatttgtatttaggagacggaggttgtagttatttaaaattgtgttattgtattttagtttgggtgatatagcgagatttttttttaaaatagaaaaaaaaaggtgttgtggtttacgtttgtaattttaattttttgggaggttaaggtaggtagattataaggttatgagattaagattattttggttaatatagtgaaatttcgttttaattaaaaatataaaaaaattagtcgggcgtagtggtgggcgtttgtagttttagttattcgggaggttgaggtaggagaattatttgaatttgggaggtggaagttgtagttatttaaaattgtgttattttattttagtttgggtgatatagtgagatttattttttaaaaaaaagggtagggtgttgtggtttacgtttgtaattttagtattttgggaggttaaggtaggtagattacgaggttacgagattaagattattttggttaatatagtgaaattcggttttaattaaaaatataaaaaattagtcgggtatggtggtttagttattttggagtttaagatgggagaatggagtggaggcgggagaatggcgtgaatttaggaggcggagtttgtaatgagcggagatttcgttattgttttttagtttgggttagagcgagtttttttattagaaaaaataaaaatagttaggcgtagtggtttacgtttgtaattttagtattttgggaggttaaggcgggcgaattataaggtaaggagatcgagattattttggcgaatatagtgaaatttcgtttttattaaaaaaaatataaaaaattagttaggcgcggtggcgggtgtttgtagttttagttattcggtaggttgaggttcgtaggataatggcgttgaattcgggaggtggggtttgtagtgagtcgagattgcgttattgtattttagtttgggcgatagagtaagatttcgttttaaaaaaaaataaaaataaaaaaatagggagatttttttagttattaagaatttaggaagtaatattaagagtttgggggaggttaggcgcggtggtttacgtttgtaattttagtattttgggaggtagaggtaggttgattacgaggttaggagattgagattattttggttaatacggtaaaatttcgtttttatcgaaaataaaaaaaaaattagtcgggtatggtggtaggcgtttgtagttataggtatttaggagtttaatgcgggcgaatggagtggaggcgggagaatggcgtgaattcgggtggcggagtttttagtgattcgagatcgcgttattgtattttagtttgggtaatagagcgagatttcgttttaaaaaaataaaaataaaaaaagagtttgggtatataaagtaagtagtattttatttcgggatgaaaagaatttcgatatttatcgttttttttgggtttttgttagttttttgttatattttttatttttttattttaggtttagtaaatgcggatgtttattttttattgtttgttttttgagatttagatgtttaaagtatttttttgtgattttttaaggtaagaggaaaatttgatatatggaaagggaattaattgttcgttttattttttttttttgtaatgttttgaatttatgggtttggagtggggttttgggagttgggggaagtattatatttagtgagtttgtattttgaggatttattgttagtgttagttttaaaattatattgtaaaaggttcggcgcggtggtttacgtttgtaattttagtattttaggaggacgaagtaggcggattatttgaggttaggagttcgagattagtttggttaatatggcgaaatttcgtttttattaaaaatataaaaattagtcgggcgtggtggcgcgggtttgtggttttagttattcgggaggttgaggtaggaaaattttttgaattcgggaggaggttgtagtgagttaagattacgttattgtattttaatttgggcggtagagtaaggtttcgatttaaaagtaaatatatgaataaataaaataaaattatatcgtaagagttttttttgttttgtttttgagtaaggtttagagttaaatttcgagatcggtttttataagatatatagatttgaggcgttttacgaggtaattagtaggtaaatggagcgcgttttatttattcgttattaggggttttagcggttaagggggtggaatgcgggcgtttatcgcgaaggtattttgttcgtaagttttggtataggcgcgggtttcgttatcggaaaagtttcggtaggatttcggaagtcggttacgcgtttcgcgtaggcgtaaattgttttaaaagtcggcgtcgttttgttcggcgtttcggttcgcgtcgaagtcggaagtgtagtttacggcgtagttttttttggagttttggatttgagtaagcgttgttttatgcgttattatttcgcgtagatataggaagtgtcgtatagagcgagtttttgtcgttttgagttttgggttagaggtcggttattatattattattaggcgttaatataggaagtgaggatatttttggcgagcgtcggttgttgtttttttttaggtttagggatcggtcgcggtttcgtaggggtgagtttcgattgggcggattaggtgtgggagcgcgacgagaattgcgtatcgaggtttttttttcgagtaggtttcggagcggggcggattcgggttcgggggcgagcgatattttcgttttcgcggatagttttatttcgtacggaattttgggtggtggaggcggcgggtttaaacgttgtttggagttaacgtttgttaggttgaattttaagtgtgcgggattgaattcgaggaaatagtttagtgttcgggttaggtggttttgttcgcgagtatatttcggagtattttttcggttttaaggtgtagttgtttagtgtgttagtggttttacgtagtttaagcggtttttttagtagattttgatagtaaaagtagtgtttgatgagtggtaggttttgagttaagagtttttaaacggatgatttttaattcgcgatcgatattattacgtaggtgttgttattttggttgtacggaagattgaattgaggtgaattacgttatttaagattatataagaatgatagaaacgagatttgattttaagcggttattttttagaatttattatttttttttgtcgtttatgttgtagcgtagtggttgtttataagcgtattttagtttggaatttttgggtttaatcggttttttattttagtttgtagagtatatgggattataggcgttcgttattttgtttggtttataatttattatttttgtttttttttttttttttttttttttttttttttttgagacggggttttgttggagtgtagtgacgcgatttcggtttatcggaattttcgtttttcggatttaagcgattttgttgtttcggtttttcgagtagttgggattataggtattcgttattacgtttagttaagttttgtatttttagtggagatagggttttcgtcgtgttggttaggttggttttgatttttcgattttgtgatttattcgttttagtttagagtttatttttttttttttttttttttaattaagttttattttgttatttaggttggagtgtagtggcgtagttttggtttattgtagttttgatttttttgatttaagtgatttttttgtttttagtagttttttttttgtagttaggaatataggtacgcgttattatattgggttaatttttgtattttttgtagagacgaggttttgttatgttgttcgggttggtgttgaatttcggaattttagcgatttgttcgtttcggttttttaaagtgttagggttatcgttttgagttattgcgtcgggtataattttttatttttaatgaggatttattttgaattttttaaaagtgattaggtttaagtgtttagtattatagtttgttgtgttttgatgtaggttgaattatttttttttttgtag

SEQ ID NO: 334 - DNA, 6507 bp, Artificial Sequence
  chemically treated genomic DNA (Homo sapiens)
ttgtaaaaagaaaaataatttagtttatattaggatatagtaagttatggtgttgaatatttgaatttagttatttttgagggatttagaataaatttttattaagaataagaagttgtgttcggcgtagtggtttaagacggtaattttagtattttgggaggtcgaggcgagtagatcgttggagtttcggagtttaatattagttcgggtaatatggtaaaatttcgtttttataaaaaatataaaagttagtttagtgtggtggcgcgtgtttgtatttttagttataggaaggaggttgttagaggtaggaggattatttgaattagagaggttaaggttgtaatgagttaagattgcgttattgtattttagtttagataataaagtaagatttggttaaaaaaaaaaaaaaaaaaaggtaagttttaggttgaggcgggtggattataaggtcgggaggttaagattagtttggttaatacggcgaaaattttgtttttattaaaaatataaaatttagttgggcgtggtggcgggtgtttgtaattttagttattcgggaggtcgaggtagtagaatcgtttgaattcgaaaggcggaggtttcggtgagtcgaggtcgcgttattgtattttagtaagatttcgttttaaaaaaaaaaaaaaaaaaaaaaaaaaaaaaaaaaataagaatgataagttgtaagttaggtaaggtggcgagcgtttgtagttttatatattttgtaagttgagatgggagatcgattgagtttaggagttttaggttgaagtgcgtttgtgaatagttattgcgttgtagtatgggcgataaaaaagagtgatgggttttgaaaaatgatcgtttgaaattaagtttcgtttttgttatttttgtatggttttgggtaacgtaatttattttagtttagtttttcgtataattagaataataatatttacgtgatagtatcgatcgcggattaaagattattcgtttaaaggtttttaatttaggatttgttatttattaaatattgtttttattgttagaatttgttagaaagatcgtttggattacgtgaagttattagtatattggatagttgtattttgagatcggggagatgtttcgagatgtgttcgcgaataaggttatttgattcgggtattgggttattttttcgggtttagtttcgtatatttgaggtttagtttggtagacgttggttttagatagcgtttggattcgtcgtttttattatttaaagtttcgtgcgggatgagattgttcgcggaagcgagggtgtcgttcgttttcgggttcgggttcgtttcgtttcgaggtttgttcggaagaaagatttcggtgcgtagttttcgtcgcgtttttatatttggttcgtttagtcggaatttatttttacggggtcgcggtcggtttttgagtttgagaagaaatagtaatcggcgttcgttagaagtatttttattttttgtgttgacgtttaatgatgatataatagtcgatttttggtttagaatttaagacgataggggttcgttttgtgcggtattttttgtgtttgcgcgggatgatgacgtataaaatagcgtttgtttaggtttaggattttaaaagaaattgcgtcgtgagttgtattttcgatttcggcgcgggtcggggcgtcgagtagagcgacgtcgatttttggagtagtttgcgtttgcgcggaacgcgtggtcggttttcggaattttatcgggattttttcggtagcgaagttcgcgtttgtgttaaggtttgcgagtagaatgttttcgcgatggacgttcgtattttatttttttgatcgttgggatttttagtggcgggtgggtggagcgcgttttatttatttgttggttatttcgtgaggcgttttaggtttgtgtgttttgtaaaggtcgatttcggaatttaattttgaattttatttagaaataaagtagggagagtttttacgatgtgattttattttatttatttatgtatttatttttgagtcggagttttgttttgtcgtttaggttggagtgtagtggcgtggttttggtttattgtagttttttttcgggtttaaggaatttttttgttttagtttttcgagtagttggaattataggttcgcgttattacgttcggttaatttttatatttttggtagagacgaggtttcgttatattggttaggttggtttcgaatttttgattttaagtgattcgtttgtttcgtttttttaaagtgttgggattataggcgtgagttatcgcgtcgggttttttataatgtgattttgaagttgatattggtagtgggtttttaaagtgtagatttattgggtatggtgttttttttaatttttagggttttattttaaatttatggatttagagtattgtaggagaagaggataaaacgagtaattaattttttttttatatgttaggttttttttttgttttgaaaagttatagaaaaatgttttagatatttgaattttaggaaataaataatggaagataaatattcgtatttattgggtttgaaatgggaaaatgaaagatgtggtaagaaattgataagggtttaagaagggcgatgggtatcggaattttttttatttcggaatgaaatgttgtttgttttgtgtatttaagttttttttttatttttatttttttgagacggagtttcgttttgttgtttaggttggagtgtagtggcgcgatttcgggttattggaagtttcgttattcggatttacgttattttttcgtttttattttattcgttcgtattaggtttttgagtatttgtgattataggcgtttgttattatgttcggttaattttttttttattttcggtagagacggggttttatcgtgttagttaggatggttttaattttttgatttcgtgattagtttgtttttgttttttaaagtgttgggattataggcgtgagttatcgcgtttggttttttttaagtttttaatgttgttttttgagtttttggtaattggggaaatttttttatttttttatttttatttttttttgagacggagttttgttttgtcgtttaggttggagtgtagtggcgtaatttcggtttattgtaagttttatttttcgggtttaacgttattattttgcgagttttagtttgtcgagtagttgggattataggtattcgttatcgcgtttggttaattttttgtattttttttagtagagacggggttttattgtgttcgttaggatggtttcgatttttttattttgtgattcgttcgttttggttttttagagtgttgggattataggcgtgagttattgcgtttagttatttttattttttttgatagggagattcgttttggtttaggttggagggtagtggcgggattttcgtttattgtaagtttcgttttttgggtttacgttattttttcgtttttattttatttttttattttaggttttagagtagttgggttattatgttcggttaattttttgtatttttagttgagatcgggttttattgtgttagttaggatggttttgatttcgtgatttcgtgatttgtttgttttggttttttaaagtgttgggattataggcgtgagttatagtattttgtttttttttttgagaaataagttttattgtgttatttaggttggagtagagtgatataattttgggtaattgtagtttttattttttaggtttaagtgatttttttgttttagtttttcgagtagttgggattataggcgtttattattacgttcggttaatttttttgtgtttttagttgagacggggttttattgtgttagttaggatggttttgattttatgattttgtgatttgtttgttttggttttttaaagggttgggattataggcgtgagttatagtatttttttttttttgttttgagagaaagtttcgttgtgttatttagattggagtgtagtggtataattttgggtaattgtagttttcgttttttgggtataagtgatttttttgttttagtttttcgagtagttgggattataggcgtgcgttattatatttggttaatttttgtatttttagtagcgatagggttttgttatgttggttaggttggttttgaatttttgatttaaagtatttgtttattagttttttaaagtgttggaattatagttatgagttatcgtgttcggttaaaaatttttagtttattttttttttgtgaaatttgttgagtatttaaatgtagttatttatgttaaattttaataaaatcgattttagagtttacgaggagggggtggtttcgtatttgcgtttgataggagttgttataaaggttttttttaattagaattttgggtttagttatttttgtgaagagtttttttgttagtaatagttagttttatcggtgaataaagtagtatgaatattagaggtttataaggaagaaaataaagtagtttatatttaatatttattttattttgttgagtaagaattatagatagttattattacggttgtttcgtttggataaaaataattaggaggtatttacgggattagttatacggtattaatttattattatagtagaattaatagtgattcgttaattaatagaatcgtttgttagaaagtattaatttagttatataaatattgaaataggttatatgtaaaatattataaacgttttgtgtgatgtatttttagttttttatagttttgtttggtataaaggaaatataatttggttgtgacgtagattgttgatgtaatttttaagtttttttgtatggggaaagttgttttgattgtggttttttttaaggtggagtttttaatattacgttggtagatttagatttcgtgaatagtttaaatgagtaagttagttgaatgttatttttagatggaagggaaatgagatggaaaataataaaaaaggattgttaggcggaatagtttttaatcgagttttcgttgagtgaggatttagtagttattaaatttaaatataggggttcgtagggaaattggaggaaatattttagagatagtaaagttgaaggtttttgtgttttgagggattcgagagtggatgttttatttttgtatttttagttagatatagaattagttagatttattagggaagtttagatgtttttattttataaagtaaggtttttagtagggtacgtatatatattgggaaagaagaaattttttagtattatgttggttaaaggtaagagagagaattttatttttatttggaatgttatttttgtttattttttttaatagtgaaatatttttaggttttcgaaaggttattttttggatatatgtaaaaagttgttttgttggttcgttatttttattgattcgtttgagtgattatttaggagcgcggcggtagtaagtagagtttatcggatttgggataaggattttaaaggtagttataaagttgagttttatttgttgatgatagtttttgtttagttgtttaaaatgattgtttgatttattatggtaattttttataaattaaaaatatattttgggttgtgtaatagtgtttttatttttttaggtaggtagattattttaatgttgttatatagggaattgggattttcggatttttttttttaatttttttatgttttttagtaggggaagtttttttgaaagttagagagttgtaaatttttaagtattaatgtaaagaagtcgatgatttaattcggaaggtggtttaagtgttttgtttgtttataaaggtatagattacgattatggatatatttagtggaagtaattatattcggtgtgtttttagaagtttatttgtgatagtttaataagaatttattattttagaaaagtattatataaagttatttaaaaaaatgtttgtataatcgttaatacggttaagttaggttttgggttttgttttttggtgtttagttgtgttgggaatgttatgaagattagcggttggaaattgatttgggtatggagaagagattgagggagagggaggggatagtacgattgagtaagggtatagtgttggttgttttatgggttttaggttttttttgttaggatgaggaagaggttttagagtagcgttatataggaaattaatttatttgttaattttttggaaaaacgtttgtttttggtttataaatagaaaatttaaataggatggtagttttttgtgagggtggaggggagggtattagattttgtgcggttggaaattttaaggtgtttagaattaggcgtttgtatttttttttatgttagattataatttttaaagaggtcggtagttatattttcgatggggaggtggataaggttattttgggagttgtttttaatttg

SEQ ID NO: 335 - DNA, 5860 bp, Artificial Sequence
  chemically treated genomic DNA (Homo sapiens)
ttaaaaggggaagtattgttagtaataggtttttagagagtagtgttagtttgtttgtaagaaaagaggagaaattttttaaaaagttttaaagcgtgggttaatataaaggagattgtttttatgaaaaataaaaattagttaggtatggtgttgtatatttgtagttttaagttattcgggaaagatgagattggaggattatttgggttgggaaggttgagggtatagtgaattgtgattgtgttattgtattttagtttgggcgatagtgaaattttgtttaaataaaaataatttaattgggaagtatagtggtttttgaggatatttaatattaggataaagagtttatgaatatattattgatgtatataaattttaaggcgttaataaaagttaattgtttagtgttatttatttaagggaataggaggaattgtataatttttagattagttatagtggtgtttttaagggatatgttgttgtatatttgtatagttagggtatttagttttttaaattaatttatatattatgttttttaattgtgggtgagatttagttttaagatttgatttattatatgtaagtatattatttgatttttataaagaatttttagtggaagaggttattttgaattatttattaatatgattaatattagttagaaattattaatgatttttttttatattatatataggataatttttaatttgtcgttatagttgttgttttgaggattttaattttgttattttttaggttatatgaagttatttttttaaaaagtgtattttttatttttattgttattgtgtatttagtataaaaaatttaaatttaggttaggtgtagtggtttatgtttgtaattttagtattttgggaggttgaagtatgcggattatttgagtttaggagtttaagattagtttgggtaatatggttaatgaatattaagtatagttttgatgttttttatattaaagatttttttaaatttttgttagtttgtttttttttaagagtgggattttaggtagggcgtagtggattatgtttgtaattttagtattttgggaggtcgaggtaggtagattatttgaggttaggagtttgagatcggtttggtaacgtgggaaaattttgtttttattaaaaatataaaaattagttgggtgtggggtatatattttgtaattttagttattggggaggttgaggtatgagaattgtttaggaggtggaggttgtagtgagtagatattatgttattgtattttaatttgggagatagagtaagattgttttaaaaaaaaaaaaaaaaaaaaaaagagtgggatttaaaaaagttgattgaaaggtttgtttgtagggggtgtagatggggattaataatgtgggttttaatttattgtgatttggttgggttgttatattgggaaatttatgatattgatttttagatttttattttttgtataggtaagatttttttgagaaggtttgtatatttttttatttaaggatgtaagttaagtagttagttttttgggagtagagtagggaaagaagttgtaataggtttaatttttagtggataaaatttaaatttaattttttcgtttttagtaaggtgtttaagtttttaattgtgtttaatggtttttagtttatatattgtgtatttatttttttaaatttcgtattagttttggggagggatagttttttggttatatagaaagggaagggatacggggatttatttgttttttatgtagtttttaaatttattttttttagttttatttttatttttatttttagttatttggtgttattagtttaatttgagtttttttagagttttgtgatgttaattttgttttttattgttagttttgggatttatttttattattttttatttaaaggttttttgttttttaaaatgtgttttatattttgtttttatgggtttttttaaatattggtattttttattattaaaatattttagtgggtttttagaagagaatagaggttatttttatgtattttgtttttaattggtattttgttggagtttgtatattttttttttttttttttttaggttaaaaagattttattagatatataggaaatttgtaggttttttttttcgtattttttgtttttagtatatagtgaggaaataagagaaaatgggataaatgatataaaaatttgtttttatttttatattaggttttgtggttcgtttttgtaattttagtgatttgggatgttgaggtaggaggattatttgagtttaggagttttaggttgtagtgagttaagattgtttaattgtattttagtttgggtgatagagtaatatattttgtttttaaaaataataaattgtaaaaagattatatgaagtttaatttgtgatgttatgatttaaaattatatatataagtattttaagagttttttttttgatttttgtttttgattttgtttttttaaaagaaatgtgtgtttttgttgttggttgtttgtttttgagacggagttttgttttgttgtttaggttggagtgtagtggtataatttttgtttattgtagtttttgttttttgggtagttgggattataggtattcgttatcgtgttcggttaatttttgtatttttagtagagacgggggttttattatgttggttaggttggttttgaattgttgattttaggtgatttatacgttttagttttttaaagtgttgggattatacgtgtgagttattaggtttttgttttgagtaatattttatatttgttttattttattattattataatagttagttatgtttagtgtttgtatgtggtttagttttaaggattaagaaaatatatatgtatatatataaaatatatatatataaaaaaatatgttttttttttacggaattatgttgttgtttaggttggagtgtagtagtgtttattaatttttaatttttggatttaaacgattgttttgtttaggttttttaagtagttagggttatagggatatattattaagttcgattaatttttaaatttttttatttgtagagatggggtttttttatgttttttaggttggttttgaatttttggttttaagttatttttttgtttcgtttttttaaagtgttggaattataggtaggagttattgcgttcggttagtgttggagaatgtaatggagatgattttgtttatttttgagttttagtttagtttattgttagagaatatttatttttattttttttattttgtttttgagtttttttttttagaatttatttttttatttaaatgacgtacgtagtttttaaatttgcgttgtaagatttattttggtttttttcgtttgttttttgtatattaaaaatgaaaaagtttgtagaattaagttaagtagatggtttttttgtaaaaagatcgggttgaagtaaagtattgttttggagttggtttatagaaaaaaggtaaaattggttattttgattttaagttttaatataaattgttcgtttttttcgggaaatttgtttcgttatatatatttgattgcgtggttagttttttcgaagtttttcgtttttaatacggagttttttttatttttttatagtcggtttttagtagttgttgttggtttttcggttttagtattacgagtatcgtattttgaggtttataaagtattttgttttatcgattgtgatttttatagttttgttcggtggttttacgtaggtggcggtgtagttttttaggtttagagcggttaggagcgaagttcgtagtttcgtttggaagcgtagcgcggtcggtcgcgcgtttttgaggtttggaggtttgggttttttttagtagcgttcgagtatcgtttagtcgagttttatatcggatgttattttatatttgggtttagagtttaattcgcgtcgatgcggttcgtcgtttttaaatttttttagttaggattttttttcgattgtaaagtagttttgggcgggagcggtaatatttttacgttatttttttggagtcgtcgatatttagaggggtaggatacgggaacgcgcgttgttttgttttacggcgcgggtgcgcgagtttgcggtagcgtgacgtttttaagttttggcgggaaaagcgttgtatttggatttttgtagtggtgggtaaaggatagttcggtgaggaagggcggtcggtagagtagggaaggtttttaaagaaggagttcggggtttagattagtgagggagggtatggtgggagaaagttagtattgattagcgtaggggattggagagatttttgcggaggggcggtttcggagggtggaggaatggtattaggaggttttcgttgtgggggcgggggtaggagggattaattcgttgttagttaagaattttaaggaagagttttagttttttttttcgtttttgggggtagtttggtttcgtttcggtttttgggacgggtggggttgtggatggggatgggaattggaattgagtaattgggaggaggcgttgtcgtaggcgttttttgttttatatcgttttttatatttttttttttttttttttagatttttattttttttttttttttttttagtcgttcgtcggaaagtatttgttttttatttttttataataataattaattttttttggggtttgaggagggtagaattttaattttcggtgtgtttgggagtggcgattgtgatttatacgataaaatggttaggtttagaatagttgttcgtggttgaaagatttggataaatgtggatgagatagaaggggaaggtaagagttgttaattttcgtgggtaattttggggagaggcggggtttagtggttttattggtgattttatattttatattttttttggatttttgttttttatagtcgaggtgttcggtggagttatggtagtgttttttgtggaagattgggatttggtgtaaattttgggagaaggtgtttatggagagtgagtttttttaagtttgttttcgttttttgagtgtatatttattgttttggagttttatattttggtgatttagaaagtagatgtttgagatttaagggttttggtaattgaagttatatagttttttgttaggattaaaaattttttttttttttttaaaaaaaaaagttttttttgtagagagttggaagggatacgaagttattgtttttatgtttataaattgttttttagggtttaagtattgcggttaatgagtaaatgagtagattttggagattgtttgtttggttttagatttttgttttattatatattggttattgttttgtgattttaggtaagttttttaatgttattgtgtattttttttttattatttttagggtggtaataatcgtatttattttataagagtttaggatagttagttatataagtatatatagtatgggattaatgtttttaaaagtatatgagtagaatatgtatatatgtgatgtggtttagaattattttaatttattttatgaagcgtttattaaatgatttgtgtgatagtataatgacgtttttggagggttagttattgtattttatattttagaaaagagtagtgtgtgttgagaatatagtagaaattatttttttggttttttttttgtggaaaaagtaatagaggtaaaatcgttttggatgagttatgtttaatttttggaagttttagaagaaatggaattttgtaatgttaaaattttttttttttttaga

SEQ ID NO: 336 - DNA, 5860 bp, Artificial Sequence
  chemically treated genomic DNA (Homo sapiens)
tttaaaaaggaaaagagttttaatattatagaattttattttttttaaaatttttaaagattaaatatgatttatttaaaacgattttatttttattattttttttataaaggagaaattaaggaagtggtttttgttatgtttttaatatatattatttttttttaaaatgtgaaatataatagttaattttttaaagacgttattatgttgttatataagttatttaataaacgttttataaaatagattgagataattttaagttatattatatatatatatgttttatttatatatttttaagagtattaattttatattatatgtgtttgtgtaattgattgttttaagtttttatggggtagatgcgattattgttattttaaaggtagtgaaggagaggtatataatgatattaagaagtttgtttaagattataaaataatgattagtatgtgatagagtaaggatttgaaattaggtaggtaatttttagagtttgtttatttgtttattaatcgtaatgtttaaattttgagaagtaatttgtgggtatggaaataataatttcgtgttttttttagttttttataaagaaaatttttttttttaaagggaaggaaaaaatttttaattttagtaaaaggttgtgtaattttagttgttaaaatttttggattttaaatatttattttttaaattattagagtgtgagattttaaaataatgaatatgtatttagaaaacgaaggtaagtttaaaagaatttattttttataggtatttttttttagggtttgtattaagttttagttttttataaagggtattgttatgattttatcgagtatttcggttgtaaaaggtaggaatttagaaaagatgtagagtgtaagattattagtgaagttattgagtttcgtttttttttaggattgtttacgaaaattaatagtttttgttttttttttttattttatttatatttatttaagttttttaattacgaataattattttaaatttgattattttgtcgtgtaaattataatcgttatttttaagtatatcgaaggttgaaattttgttttttttaggttttagaggaaattaattgttgttatgaagaggtgggagataaatgtttttcggcgaacgattggggaaggaggagggagaggtgggggtttggggaagagaggaagaggatatagggagcggtatggggtagaaaacgtttgcggtagcgtttttttttaattgtttaattttaatttttatttttatttatagttttattcgttttaaaggtcggggcggggttaaattgtttttagaggcgaaaggaagggttgggatttttttttggggtttttagttagtagcgggttagttttttttgttttcgtttttataacgggaattttttggtattatttttttatttttcgaaatcgttttttcgtaggagtttttttaattttttgcgttagttaatgttaatttttttttattatgtttttttttattaatttagatttcgaattttttttttagaaattttttttattttatcggtcgtttttttttatcggattgttttttgtttattattgtaggaatttaaatgtagcgtttttttcgttaaaatttgagggcgttacgttgtcgtaaattcgcgtattcgcgtcgtaaagtaagatagcgcgcgttttcgtgttttgtttttttgaatgtcggcggttttaaaagggtgacgtggagatgttgtcgttttcgtttagggttgttttgtagtcggggagagattttggttgaagagatttaaggacggcggatcgtatcggcgcgaattgagttttgggtttaaatatgaagtggtattcggtgtgaggttcgattgggcggtgttcgagcgttgttgggggaagtttaggtttttaagttttaggggcgcgcgatcgatcgcgttgcgtttttaggcggggttgcgggtttcgtttttggtcgttttgggtttgaaaggttgtatcgttatttgcgtgaggttatcggataggattgtgaggattatagtcggtgaagtagagtgttttgtaaattttagagtgcggtattcgtggtgttggagtcgagaaattagtagtagttgttgagagtcgattgtgaagaaatgggaggaatttcgtgttgggagcgagaggtttcgaaagaattggttacgtagttaagtgtatgtggcggggtaagtttttcggagaaagcgagtagtttatgttggagtttgaagttaggataattagttttgttttttttttgtgaattagttttaaaataatgttttattttagttcggtttttttgtaggaagattatttgtttagtttagttttataaatttttttatttttaatgtgtaaagaataggcggggagagttaaaataaattttataacgtaaatttaaaagttgcgtacgttatttaagtggaaaagtaaattttgaggaaagagatttaagaataaaataggaaaaatggaaataagtattttttgatagtaaattagattggaatttagggataggtaggattatttttattatattttttagtattggtcgggcgtagtggtttttgtttgtaattttagtattttgggaaggcgaggtaggagaatggtttgaggttaggagtttaggattagtttggggaatatagggagattttatttttataaataaaaaaatttaggaattagtcgggtttggtggtgtgtttttgtagttttagttatttgggaggtttaagtagaataatcgtttgagtttaggagttagaggttagtgagtattattgtattttagtttgggtaatagtatgatttcgtaggaaaaaaatatatttttttatatgtatatattttatatatatatatatatatttttttagtttttaagattgggttatatataaatattaagtataattggttattatgataatagtaaagtgaaataagtataaaatgttatttaagataggggtttggtggtttatacgtgtaattttaatattttgggaagttgaggcgtatggattatttgaggttagtagtttaagattagtttggttaatatggtgaaattttcgtttttattaaaaatataaaaattagtcgggtacgatggcgagtgtttgtaattttagttatttaggaggtagaggttgtagtgagtagagattgtgttattgtattttagtttgggtaatagagtaagatttcgttttaaaaataaataattaataataaaaatatatattttttttaaagaagtaaagttaggaataaaaattaaggaaaaaatttttaaaatgtttatgtgtatagttttgaattatgatattatagattaggttttatgtaatttttttatagtttgttgtttttggagatagggtgtgttgttttgttatttaggttggagtgtaattgggtagttttagtttattgtagtttggaatttttgagtttaagtgatttttttattttagtattttaagttattgggattatagaagcgagttatagggtttggtataaaaataaaagtaagtttttgtattatttattttatttttttttgtttttttattgtgtgttgaaaataaagaatacgaagaggaagatttgtaaattttttgtgtgtttgatggagtttttttagtttgaaaaaaaaaaaaaaaaagatatatagattttagtagaatattagttaaagatagaatatatagaaatagtttttatttttttttgaaagtttattaaaatattttaatagtaaaggatattaatatttaaaagaatttataagaatagagtatgagatatattttggaaagtagaaagtttttagatgaaaggtaatgaagatgaattttaaagttagtaatggaaagtagaattaatattatagaattttgaaaaagtttaagttgaattggtgatattaggtaattgaaggtggaggtaaaaatggggttaaaaggggtaggtttaaaggttatataaaaaataaatagattttcgtattttttttttttttatgtaattaaggaattgtttttttttaaagttggtacgagatttaagagggtaaatgtatagtatgtgaattggagattattaggtatagttaaaagtttgggtattttattgaaaacggagggattaagtttaagttttatttattgaaggttgagtttgttataatttttttttttattttatttttagaaagttgattgtttggtttatatttttgagtaagagaatatgtaagtttttttaagggaattttatttatgtaaaagataaaaatttaaaaattagtattatggattttttaatgtaatagtttagttagattatagtagattgaaatttatattattaatttttatttatattttttataaatagattttttaattagtttttttgggttttattttttttttttttttttttttttttgagatagttttgttttgttttttaggttggagtgtagtggtatgatgtttgtttattgtaatttttattttttgggtaatttttatgttttagtttttttagtagttgagattatagggtgtgtattttatatttagttaatttttgtatttttagtagagatagagtttttttacgttgttaggtcggttttaaatttttggttttaagtgatttgtttgtttcggttttttaaagtgttgggattataggtatgatttattgcgttttgtttagggttttatttttaaagaggagtagattagtaagaatttgagaaagtttttaatatgaaagatattaaaattatgtttagtgtttattagttatgttgtttaggttggttttgaatttttgggtttaagtgattcgtatgttttagttttttaaagtgttgggattataggtatgagttattgtatttggtttagatttgagttttttatgttaagtatataataatagtgaaaatgaagagtatattttttaaaaagatagttttatgtagtttagaaagtaataaaattaagatttttagagtaataattgtagcgataagttaaaagttattttatgtatagtataaaggaagattattaataatttttaattggtattaattatattgataaataatttagaataattttttttattaaagattttttatagaaattaagtaatgtatttatatatagtaaattaaattttgaggttaaattttatttatagttgaagaatatggtatataaattggtttggaaggttaagtgttttggttatataaatatataatagtatattttttaggagtattattatgattaatttaaaagttatgtaattttttttgtttttttaaatggataatattaaatagttagtttttattaacgttttagggtttatatatattagtgatatatttataggttttttgttttgatattaaatgtttttaaggattattgtgttttttagttaaattgtttttgtttagataagattttattgtcgtttaaattggagtatagtggtataattatagtttattgtatttttaatttttttagtttaagtgattttttaattttatttttttcgagtagtttgggattataagtgtataatattatatttggttaatttttattttttataaaaataattttttttatgttggtttacgttttaaaattttttaagaagttttttttttttttttgtaggtaggttggtattgttttttagggatttgttattggtaatgtttttttttttaa

SEQ ID NO: 337 - DNA, 2221 bp, Artificial Sequence
  chemically treated genomic DNA (Homo sapiens)
aattgttatttttttaaggatttttttgtaaattaagttggtgtatttgaagtttgttttttttattaataatggttgggtttaaggttatttttttttgtaggaaaaaatttcgtatagagaggatttttttgttaaaatatagaatggggtgtaatttaatgtttggatttttaaaaggcgatttattgttgaagagaaaagtaagttataaaataggaaatagagtgtgagtttatttttggtttttaaaaaattatattataaaaagatatatatagaaaatgtttgttaggttatagttttttttttgaggggtgggttaagaatgtagggatggtggggaggagatagagattttttatttttgattttatttaattttgtgtttttttttataggtatgtgttatttttatataataaggaatatttgcggaaggtaggttgtagtgtttttggtttttttgtggagtttagaggagtgtagttaattttaagaatattgtattataaataattagtaataaatattattgtgttttaaataatatatgatatttttaatatttattagttaataagtatttattgaataaaagttagaaggaggttttttttttagaattaagtgtgatgtgtttaagttaattaaataacgaagggttttatgtgtttttcgttgtaaaataaagtaacgttaagagatcggagatttatttgttagattggttgttaaaatattttgttttattgtagaaatagatattttggattattcgtattattttattgagatagataggagggataggaaattttaggtaataaatatagtagttattttcgatcgtattttgtttatggttttagttatttatagttaataatggtttaaaattattaaatgaaaaattttagaaataaataatttgtaagtttgaaatggtgtatttttttgagtagtgacgaaatttcgtattattttgttttattttttttttattataagaaaaagggtaagtttaggataataagatatttttagagagagatagtttatatttatataatttttattatagtatattgttataatttttttattttatttatttatttttttgagatagaattttatttcgttatttaggttggagtgtagtggtatgatattagtttattgtaatttttatttttcgagtttaagcgatttttttgttttagttttttgagtagttgggattataggcgtgcgttatatgtttggttaatttttgtggttttagtagatatggggttttattatgttggttaagttggtttcgaatttttgattttaagtgatttattcgcgttggttttttaaagtgttgggattataggcgtgagttattgtgtttagataattgttttattttattattgttgttatttttttattgtgtttaatttataaatttaattttattaaagttatatatatggaaaaaaagttatttatatggagtttggtattatttatggttttaggtatttattgggggatttggagtttatttttgtgtattttaattgatagttgtaagagatgggggaaaggtaggaagagtgttttagtttttttagtacggtgtttgagtttttttttagtgtagtttttttttttagtttttttgtttgttatttcgtttttgtttttatttttatggtattttgtgggttttgttttttattggtttttttgttttttttaatttattttttattttgttgttagatatttggttttaggtagttttgtttgggttttttttttttgtttgttggtaagaggttttttaggtttggttattagtttttgttaattcgtttagcgttattttagtttttttggattttagttatttattatatcgtattttataatgttagtaagattttagatatgggtattatagtgttttgttttcggaagtttttttatatatgtttttatttttgtattcgtttttttggtgaattttttgggtgtgtttttaaaaaaatttagtttttagttaggtttggtggtttacgtttgtaattttagtattttgggaggttagagtaggtagattatttgaggttaggagtttgagattagtttggttaatatggtgaaattttgtttttattgaaaatataaaaattagttagacgttgtggcgtacgtttgaagt

SEQ ID NO: 338 - DNA, 2221 bp, Artificial Sequence
  chemically treated genomic DNA (Homo sapiens)
attttagacgtgcgttataacgtttggttaatttttgtatttttagtagagatagggttttattatgttggttaggttagttttaaatttttgattttaagtgatttgtttgttttggttttttaaagtattgggattataagcgtgagttattaggtttgattgaggattagatttttttaaaaatatatttagagaatttattagagaggcgggtataagggtggagatatgtgtagaagagttttcgggagtaaggtattgtggtgtttatgtttggggttttgttgatattgtaaaatgcggtgtggtgagtggttgaggtttagagggattgggatggcgttagacgggttggtaggagttggtgattaggtttagggggttttttgttagtaggtagggaggggagatttaggtaaagttgtttggagttagatgtttggtagtaaggtggagggtggattggaggaggtagggagattagtgaggggtaggatttataggatgttatgagggtgaggatagaggcggggtggtagataaggaggttggggaagaaaattgtattgggaagaaatttaagtatcgtgttgagagaattgggatattttttttgttttttttttattttttgtaattgttagttgaggtatatagaggtaagttttaagttttttagtggatgtttgaaattatgaatagtattaaattttatatagatgattttttttttatatatatagttttgataaagttaaatttataaattagatatagtaagagagtaataataataataaaatagaataattatttgggtatagtggtttacgtttgtaattttagtattttgggaagttaacgcgggtggattatttgaggttaggagttcgagattagtttggttaatatggtgaaattttatgtttattaaaattataaaaattaattaggtatgtggcgtacgtttgtaattttagttatttaggaggttgaggtaggagaatcgtttgaattcgggaggtgaaggttgtagtgagttgatattatgttattgtattttagtttgggtgacggagtgagattttgttttagaaaaataaataaataaaatagagaaattataataatatattgtaataaaagttatgtgaatgtggattgtttttttttgaaaatattttattgttttggatttgtttttttttttgtgatgaagaaggggtggagtagggtggtgcgagatttcgttattatttagaaggatgtattattttaaatttataaattgtttatttttggaattttttatttaatagttttggattattgttgattgtgggtaattgaaattatggataaggtgcggtcgggggtggttattgtatttgttgtttggaattttttgttttttttgtttattttagtaagatgatacgggtaatttaggatgtttatttttgtaatgaggtagaatattttaatagttagtttgatagatgggttttcggttttttaacgttgttttattttatagcgagggatatatggagtttttcgttatttagttagtttagatatattatatttggttttaaaaaaaagatttttttttaatttttatttagtaagtgtttattggttgataaatgttaaagatattatatattgtttgaaatataataatgtttgttattaattatttgtaatataatgtttttaaaattaattgtatttttttgagttttatagaaaggttagaagtattatagtttgtttttcgtaaatgttttttattgtataaaagtaatatatgtttatgaaagaaagtataaaattaaatggagttaaaagtaaaagatttttattttttttttattatttttgtatttttaatttattttttagaggggaggttgtagtttgatagatattttttgtgtatatttttttataatgtagttttttaaaaattagaaatgagtttatattttattttttgttttgtagtttgtttttttttttaataatagatcgttttttggaggtttaggtattgaattgtattttattttatgttttggtagaagagttttttttatgcggagtttttttttatagggaagggtggttttgagtttagttattgttagtagaaaaagtagattttaaatatattaatttaatttgtaaggggatttttggaaaaatggtagtt

SEQ ID NO: 339 - DNA, 5598 bp, Artificial Sequence
  chemically treated genomic DNA (Homo sapiens)
ttaaggagaggacgtgagttttgataggaggtgtttttagattggggaaaataggtttaaaaggaaagaggaacgtgaagaaggtggggagattgttttaagtagggtagagttcggggcgggagggaggtgtttggttaggttgtggagtttgggattttgggtttgttttcgtgggattttttgagtgtgaagttagtggtggatggaagggagttggttagggaagtttaggatggtagtaattaggagagaatgagacgttggttgggtgtttaattgtcgagttgttttgttagcggttcgttcggtattttggttttttaggtttgggatgaagggagaggttgtgagtgattagaaagaagggaaaatagaagtagagttgtcgtcggcgcgggaagaagatgaggagcgtagtaaatggagaaaatgtgtttaaagtttcggatatattcgagggagggtggagtaggttatggtgaattggaaatttagaaacgggtttttttaatttcgaagtttttagagtcgggggcgtcgggcgcgggcgcggcgggtaggttggggtggggggcgggtagttatgtcgttaggaacggggcggtttcgttgcggtcgcgtttgtttggttcgttttttttagtttagttcgggttttagttttagcgtcggcgttttagttgcgatcgcgagtttttttaagtaaggtagagatttcgcgagttttttagcgttttatttttttttatcggaaaaggataggggtagggaagtcgaggatttacgggttgcgttcgtgttgttgggtcgggaaggaggaagcgtgatagttggagcgggtatcgagaagggtttgcgttgggatacgggggtgtagcgggagggttgggttagaattcggtgggtaacgttttttagatttttttttttatttttttcgtttattcggagggatggtgaagttcggtttttgggattcgattcggagggaagttttttacggaatttttatagtgtcgtacgggtggagaagggtttttgtttggtttttaggtttttaattttttattttattttttttttatttgttattgggaagtttttgaaaatatttgagtttgaattttattttttattttgataggagaaatgagtttttttgaggaagaatggtaaatattattgggtatttttttagttttagtatagataagtttatattttttaattatgttagtatcgtaatttttttttatattacgtaatgatattttttatatatatatatatacgtatatatatatatatatatatatataatttttttagttaggtgtagtattgtagtttttagtgtttgtggaggtttaataagttttgaggttttaagtaaatgatttttttttgagggttatttattagtagtaacggttagggagaggaggaggatatagtttatgatgtgattaaggaatttagaagtttaggtaattaggtttgggtttttaaattcggggtttttgtttttttggggtagttttaatattttggagatatagttattttttgagtaatggtcgatttaaaggatttggaatgtgagtaatgaacgtttaagtgaaaaaaggaaattttaaatattaatataggttttggaaataatatttattttttggttaaaattttagtatttgatgtttaaaattagatttagagagttatgagttttaagatttagtggaatgtattaaggatgggtgtttagagtttgattgtgtttttaagagagtaattttttttttatgttttaatttttttttttgtaaaatacgagggttggtgatttttagttttgtggatgttttaagattttttgtttttaagttaatttttttttttttcgttttaattgggtaggggcgggtagggaaattagaggagggaagggaagggtgagttataaatagttggtaggttggtagtagattttatttttttagttttggttttcgtttagattagtttaggttatagttttagggttgggatggatttggaggaaaaaaaatggatttgttttaggtttttaagtttttaggattttatagtttgttgttttttagttttagggatagttaaatttttagttagagaagttaagaaaattattgaaaagattttaggagtattcgtttttaagattttagtttaggggtgtttttgaattttgagagtttagttttagttatttcgttatttttttagaggtaaagtttagaattttgatattatatgtttgtatttgatagatatattaataataaggggtaagacgtataattgggttttattgatgttagtagtttttgaaatttatgtttttttggtttaaagatattattttttttaatttttagaaatgtttttttaggtattatttttgtgtaataatgataatagttgatgtttattgagtttttattttgtgttatgttgtttgttaagtatattgtatatattattttatttaatgtttatattgcgattgatttttgtaggtgtttattttattgatgagaaaattgaggtttagggagatgaaatgattttttaaagagttaggattttgatttttgtttgtttaatttgtaagtttatttttttaatttttattgtatattatttttttaggtttaagatttggggagttaggaaggagtaagaaagagttagattattgtaaaaagagaggtagagaagaagtttgtttttttttttttgtattgtaatttgtttgttttttttttgttatttttttttttagattttattttttagaattttggagttattttagaatttttaggggtaattagagaggttaattaagttatagaggttttattagttataagattattagtatttattaggtttgttggtagtagaagttggattatggttattgaaaagtgttagatgggtagagttttttttttaggatgttagtattttagaatttttttttgagtgtttttagagagttgttggaataggaatggtgtgttgtataaaagtaggtagtagagatgttttaagggaagaggttgtagagaaagtttttgtattattagaaaggaaaagggttaggttgtttttgaatatttaaattgttttttttatttaataagttttaaatgagtgggcggagattagggtgttcgatggggtagttaataagtgttttttagtattatttatttatttaataaatatttatttagtatttattttatgtattataaattatttttttttttttgattgttaggtggatattttggtattttatttttatgtaattatatttggattaatagttttaaattatgaatttttagttttatataattatgtgtataattaatatttagtatttattatatattgggaagggtattttaggtagatagaatagtaagatttattgttttgagtaggggagagtttggtatgtttgaggaatagaaaggagtatagtgagattagatggcggggtgtgaggagagagtggaataagaggagggtagagggataaatagaggtattattatatggttttgggttggagttttggattttttatttattaattgttttaggaaatttaagtttttttgagttttagtttttttatttgtagaatggttatgttaataattttttatgtttgatgatttgattttaattgttagtataataataattagtattttttgtaggttttttaaatgttaggtattgtatgagtgattttttatatattgttttacgtaagttatataattgtgaaaaatggtttttattttttttattttgtagatataatttttttaagttatatagtggtattagagttaagaatgggatttagatatgattgatttagttttgttttaaaatcgtgttgtattatattaacgtaagatatgttattattattattgaattaaggaaagtcgtttattgtattttggtttttggatttagtagttaaaatttggggttttttaagtattgttgatttagcggagtggaaggaagtttttaggagtcgagatattagtattcggttttatcgttttaggattgggaaatattagatttgttggtagtagaagttggattatagttattgaaaagtgttagatgggtagagttttttttttaggatgttagtattttagaatttttttttgaggaagagattttgtgggtatttagagtttttttttttgttttttttttatttcgcgtttagttttttatttttttttagtggagtttcgcggaacgtagtttaggcggggtcggggttagggattttgttagagttggttttgtgtcgcgcgttagaagcgttagaggtcgttgcgtggcgtgggtggttcggggagtgggtggttgagcggagttggggtttttggttagaggcggaataaaatggggttatggttaggaagacgcgttaacgtagtaagagttatttagagggtcggaattgtcggaattgtcgaagattcgagatgggagagagtttaggatggggagagtttgtagagattgacgatggtggaagaaagcgtagaaatagataagggatatatttatagaaatatatatagattgagaaagtcgggtgcgggtgggaaggtgagggtggttagatgaattaagataggttgggggagagggagaaggatttagaaatggagagatagagatgagttagagaaatagagatagaggatagatattgttagggaaggtagaggtatagggaagagggatatagggaaaggaagatgtttagggagggattaggagagaaggaaagaataaaaaataatagtgggagtagagatagaatggaatagatagaagaaaagatatttagatagttggttttttttattgtacgttttgttatttttttttaggtttattttttgaagaggtttaagtaacggaagtattattacgaagttgtttttttggttatttttgagaaaaatagatagatggttaaggagaggggtttaataagttttagtgattttgtttagttgtaaaaatatatggaatgtgagtttttttgttaggtttttagttttggagattttgttttagagaatttttttttttttttattatattttttgttttttagtttttttagtggttttgagtagtgtgttgtttagatgtgtttatgattggaaatgggaggagtgggagatggggagatgttagaaaaagattcggatttattatagtttaattgggttgtattgtgtaaggtttcggttttttatttattttcgttatatttggattgtttgttttagtttttagagaagaggagtaaagagtggtattgttttggaggatttgaaatatttttttttttgtatttttgtgtttttttttggaatttttttattttatttgaatttttttttttgttggatttttttggtaagagaatttagttggattaataatgttgtttttttattttttttatattttaga

SEQ ID NO: 340 - DNA, 5598 bp, Artificial Sequence
  chemically treated genomic DNA (Homo sapiens)
tttagggtgtagagagagtaagagaatagtattattagtttagttgagtttttttgttagagaaatttagtaggaaaaaagatttaaatgagatgaagaaattttaagaagaaatatagaaatatagagggaaaaatattttagattttttaaaatagtattattttttattttttttttttgagagttggagtaagtagtttaggtatagcgaaggtgggtagagagtcgagattttgtataatgtagtttagttagattgtggtagattcggatttttttttgatatttttttattttttattttttttatttttagttatgggtatatttgagtagtatattgtttaaagttattgaggaagttggggggtagggggtgtaatgaggaggaggagggattttttggggtagggtttttagaattgaaggtttgataggaagatttatattttatgtatttttgtagttgggtaaaattattggggtttattaggtttttttttttggttatttgtttattttttttaaggatggttagaaaggtagtttcgtagtagtattttcgttgtttggatttttttagagggtaggtttggggaaaggtgatagagcgtatagtgggaagagttagttgtttgggtgtttttttttttgtttgttttattttgtttttatttttattattattttttgtttttttttttttttttagtttttttttaaatatttttttttttttgtgttttttttttttatgtttttattttttttgatagtgtttgttttttgtttttgtttttttgatttatttttgtttttttatttttggattttttttttttttttttaatttattttgatttatttgattatttttatttttttattcgtattcggtttttttagtttatatatgtttttgtgggtgtgttttttgtttgtttttgcgtttttttttattatcgttaatttttgtagattttttttattttgagtttttttttatttcgggttttcggtagtttcggtagtttcggttttttgagtgatttttattgcgttagcgcgtttttttggttatgattttattttgtttcgtttttggttagggattttagtttcgtttagttatttatttttcgagttatttacgttacgtaacgatttttagcgtttttgacgcgcgatatagaattagttttggtaaggtttttagtttcggtttcgtttggattgcgtttcgcggagttttattagggaagggtggggaattaggcgcggggtagggaagaggtaggggaagagattttgggtatttatagagttttttttttagaagagggttttgggatattgatattttagagaaaggattttatttatttggtattttttaatgattataatttaatttttgttgttaatagatttagtgttttttagttttgggacgatggagtcgagtgttagtgtttcggtttttgggaatttttttttatttcgttaggttagtagtgtttagggagttttaggttttggttattggatttagggattaaggtgtagtgggcgattttttttgatttagtaatgataataatatattttacgttaatataatatagtacggttttggaatagaattagattagttatatttgggttttatttttagttttgatattattgtgtgatttggggaagttatatttgtaaaatggggagaatgagaattattttttatagttgtgtggtttacgtaaaataatatatgaaaagttatttatataatgtttgatatttaggaggtttataagaaatgttagttattattgtattaataattagaattaaattattagatataggaaattattggtataattattttatagatgaagaaattggagtttagagaagtttggattttttaaggtagttgatagatggaaaatttaaggttttagtttaaggttatgtggtagtgtttttgtttgtttttttgttttttttttgttttattttttttttatatttcgttatttggttttattgtgtttttttttgttttttaggtatgttaagtttttttttgtttaaagtaatgagttttattgttttgtttgtttgggatattttttttagtatgtagtgggtgttgaatattggttgtatatatgattgtgtaaagttggggatttataatttggggttattaatttaaatatggttatatgggaataggatgttagagtgtttatttgatagttagaggaaaggagataatttgtagtatataaagtaggtgttaaataaatatttgttaaataaatgaatgatgttgagaagtatttattgattattttatcgaatattttgattttcgtttatttatttagggtttgttgggtaagggaagtagtttgggtgtttaagaatagtttagttttttttttttttgatgatgtaagaattttttttgtagtttttttttttgggatatttttgttgtttatttttatgtagtatattatttttattttagtagttttttgggaatatttagaagagggttttgggatattgatattttagagaaaggattttatttatttggtattttttaatgattatagtttaatttttgttgttaatagatttaatgaatattaatagttttatggttaatggggtttttatagtttaattagtttttttgattatttttggggattttaagatgattttaaagttttaggaaatggaatttgagggagaaagtgataaggagggagtaaataagttataatgtaaaggagagaggataggttttttttttgtttttttttttataatgatttaatttttttttgtttttttttagttttttaggttttaaatttggagaagtagtatatagtagaagttaagagaatggatttgtaaattggataggtaaggattagaattttagttttttaaaaggttattttatttttttgagttttagtttttttattagtaaagtgggtatttatagaaattagtcgtaatgtgggtattaaataagatgatatatgtaatgtatttagtaaatagtatggtatagaataagaatttaatgaatattagttattattattattatataagggtagtatttagagaaatatttttggagattaggaaaaatgatgtttttgaattaggaaggtataaattttagggattgttagtattagtgaagtttagttgtacgttttattttttgttattaatatatttgttaggtgtaaatatgtagtattaggattttgaattttgtttttgggaggatgacgaggtggttagagttagatttttagggtttaaggatatttttgggttggaattttggaaacgagtgtttttgggatttttttagtggtttttttgatttttttgattgaaagtttagttatttttggagttgaagggtagtaaattgtgggattttggggatttgaagatttagaataagtttatttttttttttttaggtttattttaattttgaggttataatttgggttagtttaggcgaaggttagggttgggagggtggggtttgttgttagtttgttagttatttgtgatttatttttttttttttttttttggtttttttgttcgtttttatttaattggggcgagaaaggaagaagttgatttggaggtagagaattttagaatatttatagagttgggagttattaattttcgtattttatagaggaggaaattgaggtatagagagagaattatttttttaagggtatagttagattttagatatttatttttagtatattttattaaattttagagtttatggttttttggatttaattttaaatattaaatattaaaattttaattaagagataaatattgtttttaaagtttgtgttagtatttaaagttttttttttttatttaagcgtttattgtttatattttaagttttttaagtcgattattatttaggaaatagttatgtttttagaatattgaggttgttttagaggggtaggagtttcgaatttgagggtttaggtttgattatttggatttttgaattttttaattatattatagattgtattttttttttttttttgatcgttgttgttagtaggtagtttttaagagggaattatttgtttgaagttttaaaatttattaagtttttataaatattgaagattgtagtgttatatttggttgagggggttgtgtgtgtgtgtgtgtgtgtgtgtgcgtgtgtgtgtgtgtgtagagggtgttattgcgtagtataggaggaagttacgatattggtatggttgggggatgtgggtttgtttgtgttgaggttgaagagatgtttagtaatatttgttatttttttttaggaaggtttattttttttattaaggtgaaaagtgagatttagatttaggtatttttagaaattttttagtgataggtggggagaggatggggtgggaagttggggatttggaggttaaataagaatttttttttattcgtgcggtattgtggaggtttcgtagaggattttttttcgagtcgggttttaggaatcgggttttattattttttcgaatgagcgggagggatggaggggaaggtttgggaaacgttatttatcgggttttggtttagttttttcgttgtattttcgtgttttagcgtagatttttttcgatattcgttttagttgttacgttttttttttttcgatttagtagtacgaacgtagttcgtgggttttcggtttttttatttttgttttttttcgatgggggagggtggggcgttggggggttcgcggggtttttattttgtttgagagggttcgcggtcgtagttgaagcgtcggcgttggagttggagttcgagttgggttggaggggacgggttaggtagacgcggtcgtagcggggtcgtttcgtttttgacgatatagttgttcgttttttattttagtttgttcgtcgcgttcgcgttcggcgttttcgattttgggaatttcgaagttggagaggttcgtttttaggtttttagtttattataatttgttttattttttttcgaatatgttcggggttttggatatattttttttatttgttgcgttttttatttttttttcgcgtcggcggtagttttgtttttatttttttttttttttaattatttatagtttttttttttattttaaatttgggagattaagatatcgggcgggtcgttaatagaatagttcggtagttgggtatttaattaacgttttatttttttttgattgttgttattttgaatttttttgattaatttttttttatttattattgattttatatttaggagattttacgggggtaagtttagagttttaaattttataatttgattaaatatttttttttcgtttcgggttttattttgtttgagataatttttttattttttttacgtttttttttttttttagatttattttttttagtttaaggatattttttgttaagatttacgttttttttttaa

SEQ ID NO: 341 - DNA, 5407 bp, Artificial Sequence
  chemically treated genomic DNA (Homo sapiens)
ttagggtatagaatttatgattttttaatgggtattgttaggtatttttggaaataagtataagaggttatatttttatatttgggtatatggtagatattttttgggggaggtttagaatttattatttaaatttatttttttttagtattttgtttatagtttttttaggatatgttgatttgagtttattgtaaggtagagatagtggatagattttttcgttaatgaatagtttaatgtttttaagtttatatggtattaataagttgtttatgaatagagatttagtttttttattatttttttaaggatagaagtttagaatttattaaaagttattaaatagtttatgaagtaggtttgttgaaaggtttagttttttttagaggtttttttagttaataaatttattttttattttttagtttttaattagtatagggaagatttttaaaaaataataaggtttataatatataatagttatagttagtttattgagtattttttatgtttttagttttggttatagatttttttagttaatttatataattattttgtaagataaaaattttattattttttaaatgaggaatgtgatatatagagattaaatgattttaagtgtttttgggtagtaggttaagaattaaatttaggtttatttgattttaaaatttgtgtttttagttatatatattttaaagttttataggataataggtgttgggagtggtttgatgttatatggttttaaaaatggagatgaggggagaggggaaagataaattattagaaatgttcggtatggggataattaaatagttttaagttggtggtttagattgatgttttgagttaagatgttggtggataattagttgttttagagttaaatagtaatagttgtttgtttgtaattttgaaggtttgggtaaattgaagttgaaggagtagaagttatgggtgagtagaggaagttgatttgtagatagattagatgatagtagagtggagatggtaggataggaaggttatgtggttttttagttggaaagaagagtaaaatttaaagatgttttgaattttaaattatttagtttttataatatttgaagtgttatgagatagatatttttatgtttttataataaattttttattgtttagttagttttagtgattttatgtattttataattaagaagtttttagtagagtaagtttgagttagaggttttattatattttgtttttagggtttattaggaattaggttttggtttatagttaggttggaaatagtttttatagttttgagtttggagtttgagatttgtttttttttttaaggaagatttagaggttatttgcgtttgtagagatatggttgaagttgtaggtttgaaagttgagttttgggttttattagagggggtttagttttttggaaattaaataagaagaaatggttgttggttaggttttaggggtagaaaagatttagtgagaattaaatttttattttaattttttaaaatatttttttttatgtattgtttttgtttataaagttttttagggtttttattttcgttggggagtaaaatgtttgtttttgtgtttaaagttttttttttgaatattagtattttgaatagggttatatgagataaaaataggtatagatgttttggggtttttattttggagataattttgaagtttagtttggttatagttcgtagaaaggttcgaatatttttaaagcggttgttgattttagttatttttaggagatttttgagaaagatagaaagttttgtgtaagtgtatagatttatgtatgtatatatatatatatgtatttgtgttttgggggtttttattttggttttagtattttatttgttttttttaggaagtttttgatgttggtttttattagtgaaaggtaaaatatagttatatttatagatttattttttagaggaatttgtggagagtgagagtgttgtataaggtatatagtgtagaagaagaaagttagtattgagatattaggatgggaaaggggaaggaagggttagagattagtatacggaggttggttttagagtataagttagataatataggggtttatttgggttatgttatatatagtgattttagggtttagagaagttaagttaaagtaatgtatagggtttcggatatttgaagttaagcggtaatttttatagtcgaagttagttattattagggatgtaggtttgagagtggaaggtaagggttatatattggtttgatttgagtttatgattgatttattatatggttttttatagtttttgatttttatttatcgttggcgaagatttttggcgatgcggtttattggttgtagtggttatttttttatttggttttggaagtcgcggtggtagagaagaaaagttttagggtttttttggaagagacgttgtgtagtattgttgggttttgagtataattgtttattgaggtagcgaaatcgggttttatttagtcgttgtgttatgcgggttcgtaaagtttttgttcgagttttatggttgtttgttttgggaataggagatatttttgttttttttgtgggggttttagttggggtttggtttggtatttgaggtggttgaaatttgtttttatatttttttttgtttttttgtcggtttcgttattgtttgcggtttaatgtatgagggggtttaggggaagtggatttagggttttgttttggtggattatttgtagtattatttttttaggttttgggatttatagggagggagatgggaaggtgtatatgaggtaagattttttatattcggagttacggtaagttattttagttatatttttgtttttgagatcgtgattgtggtttgtagagaagtattttttattgtttgagtatattattagttttaattttaatggtagtggataattatttttgtatgtagaattagttgatttttcgatatatatatattaatatatatatatatatatatttaatggtatttgtttggttaatattgtttaggtgttgggttgaatttataggggtatgtttttggtattttttttttttttttttatttttagtagagttattgttaataagagtttgtttgtggtattttttttttttttttattttttttttagagttattgtaaggtgggttttgtttttgatattttttttttttttttttttttattttagtagaggtattggtaaatgatgtttttttggggtattttttttttttttttttttttttttttttagagttatttatatataggttggggggatgttgggaaagagatgttgtttttagggttcgtaatgtggttaagagttggcggcgtttggagttttggaggaaaataggggatgatagtgggtttaaagagaatggatgaggtttggagaataagaagggagagatgtggatttgatttagattggtagaagtatttgaattttttttagttaagtttgttagaatttagaagaatttttatgttattattttaatttttgggaagttggagagtagagaaattatttattttattttttttaatgtgtaaatgagttaatggaggtttttttaaaggaaaatgtaaaggttataagtaataagattaaggttagagattaggaattttaattttttattttgagtttttgtttagagttgatatatttttgtaagaggtaaggaggtttttgaatataggagatatatgattatatacgtatattaaatatttaatatgtttttagttgtagtgtagaaaataaattgaaggggagaaattgtagatagagaggttagcggtttggataatggtaatggggttaggggatgaaaaaggaggaaataaagtaggtcgattttatgttggaggtagattgaagggtaagaaaagtttgaggaagtagggtttttatatttgtagaggtttaaaggagaagatgtattgtcgggaaggttgattttgtgttgtagttttattaggtaattttaggttaggtatttattttgattttaagttttttatatttttttttgaataatgatattgataatttttattgtttttaatttattttttatattgtaatcgacgatttttttaaaatataaatttgaagaaataattttattgtttaaaattttttattggtttttatttttaatatacgtaaaatttttattttttgaatttgaatagtatatatgttttttttatttattatgtattttaattataaggattatttgtgtttgtgattttgatagaatatgtttttttgttttagggtttttgtacgtatttttttttgtttgaagaatttttttcgttttattaatttttatttaataattttttttgatttaacgttagttttttttggaagttttcggatttttagattaggattcgtttttaacggtgttataggtgttttttttcgtaatatatatagcgttgggatttattaatgttcgtttcgcggtttgaaatagtttttattgttttcgcgagttatttattttgttttgcgaggaggtcgtaggcggaggtcgtgagattacgggtttaaggttcgcggttattggggtcgtttcggtttatttaggtttttcgaatatgagggtcgggagggtagggtcgtcgagttttcgtttttttttacgtgtatagcgtttttttggaagtcggagcgtttagatttgttagaatcgattcggaaattaaagcgtgatagttaggggttgttagagcggtcggcgcggcgtagcgaattatcgagtttagttaggcgcggttagaagggtagggaggcggtgggaggggagggacggaggttcgcgttgtttaagagcgttacgggcggggcggggtcggcggcgggttgcgggcgcggtcggacgggagtttttcggagaaggattttgtagttcgagtttcggtgagtgcgagaggattcgcgttttttgttattttttattttttttgagttttaagtaaggaacggagttaattttggggaggattttcggtttttttttttagagtatacggagtttgaatttttttattttttttaattttgttcgcggatagggtttagttgtttgttttcggatattcgtttagtagatattattttttcgttattttttgtttattttgattcgtttttatttcgcgtttagaggatatagttagggattatttcgtagtttcgaatttttttatagatttttattagtcggggacgtagtttaggttttttatttttaatataaatattttttttttgtaga

SEQ ID NO: 342 - DNA, 5407 bp, Artificial Sequence
  chemically treated genomic DNA (Homo sapiens)
tttataggagagaagtgtttgtgttgggggtagggggtttgagttgcgttttcggttagtgggggtttgtgaaggagttcggggttgcgggatgatttttggttgtgttttttagacgcgaggtaaaggcgggttagggtgggtagggggtgacgaagaggtagtgtttgttgaacggatgttcgagagtaggtaattagattttattcgcgaatagagttgggggaagtggggaggtttaggtttcgtatattttgggagaggggatcgggggttttttttagggttggtttcgttttttatttgggatttaggagaagtgaggggtgatagggggcgcgggttttttcgtatttatcgggattcgggttgtaggattttttttcggggaattttcgttcggtcgcgttcgtagttcgtcgtcggtttcgtttcgttcgtggcgtttttgggtagcgcgggttttcgtttttttttttttatcgtttttttgtttttttagtcgcgtttggttaaattcgatggttcgttgcgtcgcgtcggtcgttttagtaatttttggttgttacgttttggttttcgggtcggttttggtaggtttgagcgtttcgatttttagaggagcgttgtgtacgtggagaagagcggggattcggcgattttgttttttcgatttttatgttcgaagagtttgagtgggtcgaggcggttttagtagtcgcgggttttgggttcgtaattttacgattttcgtttgcggttttttcgtaaaataaggtgagtgattcgcgggagtaatgggagttgttttaggtcgcgaagcggatattggtggattttagcgttgtgtgtattgcggggagggatatttgtggtatcgttaagggcgagttttgatttgaagattcgagaatttttaaaagaaattgacgttgggttagagagagttgttgagtagaagttggtgaagcgaagagggttttttagataggaaaaagtacgtataagggttttgggataagagagtatgttttgttagagttataaatataagtggtttttgtggttgaaatatatagtaaatgaaaggggtatatatgttgtttaagtttaagaggtagaagttttgcgtatattgagaatagaagttaatgaaaggttttaagtaatggaattatttttttagatttgtattttgaaagggtcgtcggttatagtgtggaggatggattggagatagtaagagttgttagtattattgtttaaaggagggtgtgggaaatttagaattagggtaagtgtttggtttaggattatttggtaggattgtaatatagaattagttttttcgataatatatttttttttttgagtttttgtagatgtgagggttttgtttttttaggttttttttattttttagtttgtttttaatatggaatcggtttgttttgttttttttttttttattttttagttttattattattgtttaagtcgttggtttttttgtttgtaattttttttttttagtttgttttttatattgtagttagagatatgttaaatatttaatatacgtgtgtgattatgtgttttttgtgtttagaagtttttttattttttatagaaatgtattagttttaggtaaaagtttaaggtgaagggttggaatttttggtttttggttttggttttgttgtttgtggtttttgtatttttttttggggaaatttttattagtttatttatatattgaagaaagtgggataggtggtttttttgttttttagttttttagaagttggggtggtgatataaaagtttttttgggttttggtaggtttgattgggaagaatttagatgtttttgttagtttgaattaggtttatatttttttttttttgttttttaggttttatttattttttttaggtttattgttattttttgtttttttttagggttttaagcgtcgttagtttttggttatattacgggttttagaggtagtattttttttttagtatttttttagtttatgtataagtgattttgaggaggaggaggaggaaaggaagaagaaatgttttaaaaaggtattatttgttagtgtttttgttgaagtagggaagaaagggaagaagaaatgttaaaaatagggtttattttgtagtgattttgaggaagaagtagaaaggaagaagaaatgttataaataggtttttgttggtagtgattttgttgaagatgagaaaagaaagaggaaatgttagaaatatgtttttataaatttagtttagtatttggataatgttgattaaataggtattattggatgtgtatatgtgtgtgtgttggtgtgtgtgtgtcggggggttagttggttttatatataagagtgattatttattgttattaggattggggttaatggtgtatttaggtaataagaagtatttttttgtaggttatagttacgattttaaagatagaggtatggttgggatgatttgtcgtgatttcgaatgtaagagattttgttttatgtgtatttttttatttttttttttgtaggttttaaagtttggaagggtagtattataaatgatttattaaagtaaagttttgggtttattttttttaaatttttttatatattaagtcgtaagtagtggcggaatcggtaaaagaataagagaagatgtaagaataagttttagttattttaggtgttagattaggttttagttgaggtttttatagagaagatagaggtgttttttgtttttaggatagatagttatgaggttcgggtaggggttttgcgagttcgtatggtatagcggttggatggggttcgatttcgttattttaatgaatagttgtatttagggtttagtagtgttgtatagcgttttttttaggaagattttgaggttttttttttttattatcgcggtttttagagttaagtgaagaagtggttattgtagttagtggatcgtatcgttagggattttcgttagcggtgaatgggggttagggattgtgagaagttatgtggtgggttagttataggtttagattagattaatatgtgatttttgttttttatttttaggtttgtatttttagtggtggttgatttcggttgtggggattgtcgtttggttttaagtattcggaattttgtgtattgttttgatttggtttttttggattttagggttattgtgtgtgatatggtttaggtaaatttttatgttatttggtttgtgttttagggttaattttcgtatgttaatttttaatttttttttttttttttttattttggtattttagtgttggttttttttttttgtattgtgtgttttatataatatttttattttttataggtttttttggaggatgagtttgtggatgtggttgtgttttgttttttattgatgggaattaatattagggattttttagaggaggtaaatagagtattgaagttagggtaagagtttttaggatatagatgtatgtatgtatgtgtgtatgtatgagtttgtgtatttatatagaattttttgttttttttaggggttttttgaaagtggttgaggttagtagtcgttttgaggatgttcgaatttttttgcgggttgtgattaagttaggttttaagattgtttttaaggtgagggttttaagatatttgtatttgtttttgttttatgtggttttatttagggtattggtgtttaggaaggaggttttaggtataggaatagatattttgttttttaacggaagtgggagttttgggaagttttgtgagtagaggtagtatatagagggaggtgttttaaggagttgggatgaggatttggtttttattgggttttttttgtttttaggatttgattaatagttatttttttttgtttgatttttaaaagattgggttttttttggtagggtttaaggtttagtttttaggtttgtagttttagttatgtttttataagcgtaggtgatttttggattttttttgaaaggggaggtagattttaaattttaggtttagaattgtgaagattgtttttagtttggttgtgagttaagatttggtttttggtggattttgaggataaagtgtgataaaatttttggtttagatttgttttattgaaggttttttggttataagatgtataaagttattggggttagttaaataataaagagtttattgtgagaatatggggatatttgttttatgatattttaggtgttatgaaaattagatggtttggaatttaaggtatttttaggttttgtttttttttttaattaagaagttatatggtttttttgttttgttatttttattttgttgttatttgatttgtttatagattagttttttttgtttatttatagtttttgtttttttagttttagtttgtttaggtttttaaggttgtagataggtagttgttgttgtttgattttgaggtaattggttgtttattaatattttggtttaagatattagtttgagttattaatttgagattgtttggttgtttttatatcgagtatttttagtggtttattttttttttttttttttatttttatttttggaattatatagtattaagttatttttaatatttattgttttgtgggattttgggatgtatatagttgagagtatagattttggaattaggtagatttggatttaatttttggtttgttatttagaggtatttaaagttatttaatttttgtatattatattttttatttggaaaatggtagaatttttgttttgtagggtggttgtgtgggttaattggagaaatttgtagttagggttgggaatataggaggtgtttagtaaattagttatgattattatgtgttgtaagttttattgttttttgaagattttttttatgttggttggaggttgaggggtaaagaatggatttgttgattaaggaagtttttgggagaggttagattttttaataggtttgttttataggttatttaatgatttttaatagattttgagtttttgtttttggaggggtagtgagggagttgggtttttgtttataaataatttgttgatgttatgtgggtttgggggtattgggttgtttattggcggaagagtttgtttattatttttgttttgtagtggatttagattagtatgttttgggaaagttataggtaaggtgttgagggaaggtgagtttgaatgatagattttaggttttttttaaaaggtatttgttatgtgtttaggtataaagatatggttttttgtatttgtttttaggaatatttgatagtatttattgggagattataggttttatgttttga

SEQ ID NO: 343 - DNA, 6069 bp, Artificial Sequence
  chemically treated genomic DNA (Homo sapiens)
ttatagttattagtagggtattgtgttttgggaaaagttaatatttagatttttttagggattattagatagtggtttttattagaaattatatatattgaaaaaagaatgaatagagtttgaatgatttgtattaagtattgagaagtttagtatgagtgtaattgtagttttagaagaagaggagaaatagaatgggatagaaaaaaaaatttgaagaaatattggataaaagttttttaaatttgataaaaaaataaaaggaaatgattagaaaatgagaaattagtattttatagatttagggaatgaaatgaattttaattagataaatataaatttaaaattaaaataaatattatagggtaatgaaatattatagtgtaaggaaatattatagggtaattttcgataaatataatgaaaatttttataagtatttattaaaaaaagatattttagaaatattagtgttaatttttgataaatataaataaaattttaagagtatttatagaaaaaggtataagatatttaagaaattaatgataagaattatttttagttttttatagatataatggaggttggaaaacgagaatgatattttttaaagtgttgaaaataaaaataaaaattttttgaatggttttttattgtttataggataaattttaaggtgtttgatttttataatttggttattgattatatttttagttattttttgttttagtaatattttattatcgtttaatatttttttattatgtaggtttttttatgtggatagattttttttagttaattgtttgattaatttggttatataattttttttttttgtggtttaatgttttttttgtattggattgtttataataatttttaattataagttattaggtttttgggaaaggttttgatatggaggtttattttttttttttttgtgtttttaaatttttttattttggattaataaagtaagttatttgcgtgtttttaattatagatagattagttgtttatatttaaagttttacgtgtagtttttagataagttttgtttttgttttgagatgtggtgtgattatagtttattgtagttttaaatttttgggtttaagttatttttttattttagtttttagagtggttgggattataggtatatgttattatgtttagttgattaaaaaaaattttgttttgtagagatagggtttagttttgttgttagggttgattataagttttgatttatatttttttgttgtttgattttggttagtttttgatttatttagtattaattagtaaggatgatttttgtttttggtttgagtttttttgaaagagaggaagtagtagttatgtgtatgtttatatttggaagttggggagatagattgtgtgaaaggaagtttttgggatagtttttattttattaaaatatgtattgtattttttttaagtgtaattatatatatgtttttttgtttatttgtttttttagtttatgttttttttttttattgttgtttgtttattttttttttttgattttttttttgtatatatttttggaggttttttaaatttttttaaagagtttttgttaagaatgagtgatgagaaagattaaagaaggaaaattaagaggataaattagttgggtgttgtggtttacgtttgtaattttaatattttgggaggttgaggtgggtggattatttgaggttaggggtttgagataagtttggttaatattgtgaaatttcgtttttattaaaaatataaaaaattagttaggtgtggtggtgtgtgtttgtagttttagtaatttgggaggttgaggtaggagaattgtttgaattcgggaggtggaggttgtaataagttgaggtggtgttattgtattttaatttgggtaaaaaagcgagattttattttaaaaaataaataaataaataaaaattttaaatgtatgattttagtatattttttgttgggttaattttttttatttaaggtggtggtaagttatatgaaggtaagaattgtatttttgtattttatttgttgtatttatatttatattttttgtttttatcgtatgttaaatatgtaattagaattaaaattgagttacgttgtgttaatagtttgatgggtgattttgtagtaatagttttaattttggataagtttttttaaaaatgaatataatattttagtttgtaaattttataaaatgtattaataaataaaattattgtattagtttgggttgttataataaaatattagattgggtggtttatataatagaagtttatttttttaaagttatgtaggttgggaggtttaaaagagggtgttagtatggttagttttgggtgagggttttttttttggtttgtagatgtttgtttgtttgttgtgtttttaaatggagagagttttttggtgttattttttataaagatattaattttatgggattagggttttatttttatgatttaatttaatttttattatttttttaaaggtttagttttaattagagatggtttttgatttaagatttttttgattttatgatggtttaaaagttatatgtattttagaatttgtattttgagtatttataaaattatttagttttttatttagtatttagtagattatatgaaatatttaatattttattaaaaaataagttttgtattagatgattttgtttaattgaaagttaatgtaagtattttgagtatgttttaggtaggttattttaagttatgatgtttggtaggttagaagtattaaatgtatttttgatttaagatttttttaatttaaggtatttttagtttatggtgggtttattggaatataatttttttgtaagttaaggaatatttatatagttatattaggagtgagggttttagtatgaatttttgggggggatgtaatttagtttatattagttatgataaaatatgtagttatttaaatttttagaataaatttaaaatttatcgttattatttattttggatgttaataatagaatgtagatatagagtagttgttgtttagttttatggtttatttgttttagttaatttgaggatagtatagtataaataggtaaatttgtgtttgattttgtgattttatatatggtaggttgttttagtttttttagtgttgttagaaaggaatatttaaagttggataatttagaaatagaaaaggtttttcggtttatggttttgatgtttggaaaagtttaagattgagtatttgtatttgatggtagtttaagattgtttttatttatgttagaaggtaaaggagagttggtgtgtgtagagattatatggttagagaggacgtaaaagaagaaaggaagtgcgacgttttttttaattagttttggtggaaataaagagaatttatttattttttttttagggaggatattaatttatttttgaaggaattatttttatgatttaatattgtttattagtttttatttttaatattggggattaaattttaataggaggtttaggggaataaatatttaaattatagtataggttaattatatgtatgtattattaattacgtaaataattttgaagttaaatgtagaaaattgtaaatttttgaggttgatatttagggttaggattaaaataaaaagtattaatgttttaaatagtatttattgattatttattttattgtaaggttttagggagaaattgaatagatatggttattgatttaacggagtttataatttaggtagatatataggtaaattattttaatagttcggatggagaaaatatttgtgttttaaggaaggtatttaattgagtaagtttttttgaggagcgattttaaattgtgttataaagatggttaagaagagatgaggcggttgggcgtggtggtttacgtttgtaattttagtattttgggaggtcgaggttggcgaattacgaggttaagagatcgagattattttggtgaaatttcgttattgttaaaaatataaaaatattagttgggcgtggtggtatatgtttgtaattttagttattcgggaggttgaggtaggagaatagtttgaattcggaggcggaggttgtagtgagtcgagatcgtgttattgtattttattttggcgatagagcgaaattcgttttaaaaaaaaaaaaaaaagaggtaggttacggcgcgggggcggggaagggggtttgtagtatcggcgaggggaagaattaatttattgatgttttagttagtggttggagttttaagaatggatagatttggtttcgaaggttttttttataatattattgtcgttaagaatgtaagttgtttaagtacgaggatatttttagagggtttttagatttagttttttttggtttgtgttttaaattaagtatatgttttatattttttttaggttttaatttttaggtttgtttttttttgtttttttttgtcgtttttcgtttttaagaattttcggttgggatgatattttttaggtgtagaaattagggggaagtttttagagtagtgggggttgaatttaggatatagttatttttgttgttaagttttttttgcggcgttgaggaggtaggtttaaagtaattaattagagtagtcgtagagggaaaagttaagatagttttggttcggtttagcgttttttattttttagttttttatttttcgtcgcgtagttttcgttttttttatattaggtacggcgtttgattgatatgagggttcgtttaattttagtgcggtagagatcgttgtcgcgttagggatcggggaagggggcgattgaatttattagattgggtttagagtgggttttttgttcgcgcggattcgtttgtttatcgcgcgtgtttcgttttttttttaagagttacgcggcggcggcggagcgtaggtttcgtgtcgttacggttattacggcggtcgtagtggcgttttggagttttttttaggtgagttggagttgttcggttcggtagcgggaaggtgagacggttttgttggtaggtagatatatatatatttttttttagttcgttgttcgtttatatagtttgttattcgttgcgtcgtttttttttttcgcgttgagttagtttcgggggcgtcgtttgtaggttcggagtcgagtcggagggggcgcggaggttgttcggagggtttagatttttgtatcgggatttcgcgagattttcgggtcgttgttttagggagcgtgatttcgcggtttttttgttagtttttggagcgttgtgtcgggttgagagttcgggcggtcgttcgtgcgagtttgggaggtcgagtgtgcggcgcgttggttgatttgtttgtttttttatgaaaaagtttttttgttagttgtggcgtaattcgaggtcgggaaggtagggacgtggtaggaggaagggcgtttttatttttagttcgagaggaggggaggcgttagtttgcgcggtgttgcgggtggatattttcgggacgcgtttttttttttttttttatttatcggtcgttttttagtttggggttgtgattttaatggtttggatttgttttagattcgtacgcgagttgttggggttgtgaatttttgatttgagttgtaatatgtttggtaaaataaaaaattatttcgataggttttgtaattttttttttgtattaatatataagttaaattcgtcgttagaagtttaggaagttgggttttgtttaggggtgaggacgtaatcgtaggaacgttttcggtgttaaattgatggattcggagttatttgaaaataattatgtacgttagattaggtaagaagttttagaaattaggaaagaattaggttaaagagaattttttaatttttttttgggtagggagtaaagtagtttaatgtttttttaaaacgggtgttgttaaaaggtatttatttttaaaattttattttgatagacgtatga

SEQ ID NO: 344 - DNA, 6069 bp, Artificial Sequence
  chemically treated genomic DNA (Homo sapiens)
ttatacgtttattaaagtaaaattttaaaaatgagtattttttggtaatattcgttttgggaggatattgagttgttttgttttttatttaaagaggagttaggaaattttttttaatttaatttttttttaatttttagggttttttatttaatttaacgtgtataattatttttaggtgatttcgggtttattagtttgatatcgagagcgtttttacggttacgtttttatttttgaataaaatttagttttttgagtttttaacggcgaatttaatttgtatgttaatatagaagaaaggttataaaatttatcgaaatggttttttgttttattaaatatattataatttaagttaaaagtttatagttttagtaattcgcgtacgaatttgaagtaggtttagattattaaagttatagttttagattagaaaacggtcggtgggtggggggaggggagagggcgcgtttcgaagatgtttattcgtagtatcgcgtaggttgacgtttttttttttttcgggttggaggtgagagcgtttttttttttattacgtttttattttttcggtttcggattacgttatagttggtaaaaggatttttttatgagaaaatagataagttaattagcgcgtcgtatattcgattttttaggttcgtacgggcggtcgttcgggtttttagttcgatatagcgttttaggggttgataaggaggtcgcggggttacgttttttggggtaacggttcgagggtttcgcggaatttcggtgtagaagtttggatttttcgagtagttttcgcgtttttttcggttcggtttcgagtttgtagacggcgttttcggggttaatttagcgcgagaagaggaagcgacgtagcgagtaataggttgtatggacggatagcggattgaaggggggtgtgtgtgtgtttgtttgttaataaggtcgttttattttttcgttgtcgagtcgggtagttttagtttatttgaggagggttttaggacgttattgcggtcgtcgtgatggtcgtaacggtacgaggtttgcgtttcgtcgtcgtcgcgtagtttttgggagagaggcggggtacgcgcggtgggtaggcggattcgcgcgggtaggaaatttattttggatttaatttgataggtttagtcgttttttttttcggtttttgacgcgataacggtttttgtcgtattgggattgggcgggtttttatgttaattaagcgtcgtgtttgatgtggagggagcggaggttgcgcggcggagagtagagagttagagggtgagaagcgttgggtcggattagaattgttttagtttttttttttgcggttgttttggttggttattttgagtttgtttttttagcgtcgtaggagagatttaatagtaaaaatgattgtgttttgagtttagtttttattgttttgggagtttttttttggtttttgtatttgaagaatgttattttagtcgaaggtttttaggagcggggagcgataaagaaaaataaagaaaagtagatttgaaaattgggatttgggagaaatgtaagatatgtgtttaatttgaggtatagattaaaagaagttgagtttgagggttttttaaaagtgttttcgtgtttgggtagtttatatttttggcggtagtagtgttatgaagaggattttcggagttaggtttgtttatttttagggttttagttattggttgaggtattagtaagttggttttttttttcgtcggtgttgtaggttttttttttcgttttcgcgtcgtaatttgttttttttttttttttttttgaaacgagtttcgttttgtcgttagggtggagtgtagtggtacgatttcggtttattgtaattttcgttttcgggtttaagttatttttttgttttagtttttcgagtagttgggattataggtatgtattattacgtttagttaatgtttttgtatttttagtagtgacggggttttattaggatggtttcgattttttgatttcgtgattcgttagtttcggttttttaaagtgttgggattataggcgtgagttattacgtttagtcgttttatttttttttaattatttttgtggtatagtttaggatcgttttttagggaagtttgtttagttaggtattttttttggagtataggtgttttttttattcgagttattgaaatggtttgtttgtatgtttatttagattgtaaatttcgttgaattagtaattatgtttgtttagtttttttttagggttttgtagtagggtagatggttagtaaatattgtttaaggtattaatattttttattttaattttggttttggatattagttttaaaagtttgtagttttttgtatttaattttaaaattatttacgtgattggtaatgtatgtatgtggttggtttgtgttgtaatttagatgtttgtttttttaaattttttgttgaaatttgatttttaatgttggaggtggggattaatgggtagtgttgggttatggaggtggtttttttaggaatagattaatgttttttttggggagagggtaaatgagttttttttatttttattagagttggttaaaaagaacgtcgtattttttttttttttttgcgttttttttggttatgtaatttttgtatatattagtttttttttgttttttggtatgagtagaagtagttttaggttattattagatgtagatgtttagttttgaatttttttagatattagaattataagtcgaaaaattttttttatttttaaattatttagttttgggtatttttttttagtaatattaaagggattaagatagtttgttatatgtaggattataaggttaagtataaatttatttatttatgttgtattatttttaggttgattgggataagtagattatgaaattgggtaatagttattttatgtttatattttgttattagtatttaaagtgaataatggcggtgaattttgagtttattttaagggtttaaataattgtatattttattatgattggtatggattgaattgtattttttttaaaaatttatattgaagtttttatttttaatgtgattatataaatgttttttaatttataaaggggttatgttttaataaatttattataaattgaaaatattttaagttgaaaagattttaagttagaaatgtatttaatgtttttaatttattaaatattatagtttagagtagtttatttaaaatatgtttagaatatttatattagtttttagttaggtaaaattatttaatataaagtttattttttaataaagtattgagtattttatgtaatttattaaatattgaatgaaaaattggatggttttatgggtatttaaagtatagattttagagtgtatatggtttttggattattataaagttaaaaaaattttaagttagggattatttttagttggagttaggtttttagggaggtaataaaaattaaattaggttataagggtggggttttaattttataagattaatgtttttatagaaagtggtattagagagttttttttatttgagaatatagtaagtagatagatatttgtaagttagagagagagtttttatttaaaattgattatgttggtatttttttttggattttttaatttatataattttgaaaaaataaatttttgttgtgtaagttatttaatttagtattttattatggtagtttaagttaatataatggttttatttgttgatatattttataaagtttatagattgagatattatatttatttttgaagaaatttgtttagagttaaaattgttgttgtaaaattatttattaaattgttagtatagcgtgatttaattttaattttaattatatatttaatatacgatggaggtagaaggtgtgaatataaatataataggtaaaatatagaaatatagtttttgtttttatgtagtttattattattttaagtggggaaaattaatttagtaaaaagtatgttgaagttatatatttagggtttttgtttgtttgtttgttttttgagatggagtttcgtttttttgtttaggttggagtgtagtggtattattttagtttattgtaatttttatttttcgggtttaagtaatttttttgttttagttttttaagttgttgggattataggtatatattattatatttggttaattttttgtatttttagtagagacggggttttataatgttggttaggtttgttttaaatttttgattttaggtgatttatttattttagttttttaaagtgttgggattataggcgtgagttatagtatttagttagtttatttttttaattttttttttttaattttttttattatttatttttaataggaattttttaaaaaaatttaagaaatttttaaaaatatatgtaaaagaggagttaaagaagaaaaataagtaaatagtaatgaaaaaggaaagtatagattggaagggtagataggtagaaaggtatgtatgtaattgtatttagaagggatgtagtatatgttttaatggggtgggagttgttttagagatttttttttatatagtttgtttttttagtttttaaatataaatatgtatatggttgttgtttttttttttttaggggaatttaaattaaaaataggaattatttttgttaattagtgttgagtggattagggattaattagaattaggtaataagaaaatgtaagttaaaatttatgattagttttggtaatagagttagattttgtttttataaaataaaattttttttaattagttgggtatagtggtatgtgtttgtagttttagttattttggaggttgaggtgggaggatggtttgagtttaggaatttgaggttgtaatgagttatgattatattatattttaaaataaaaataaaatttatttagggattatacgtggagttttggatatgggtagttaatttgtttatgattaaaaatacgtaggtggtttattttattaatttaaaataaaagaatttgggaatataagaaagggaaaaatgagtttttatgttaagattttttttagaaatttgatagtttatagttagaaattgttatagatagtttagtgtaaggaggatattaagttataggggaaaggagttgtgtggttaggttagttaggtaattaattagaaaaaatttgtttatatagaggagtttgtataataaaaaggtattaaacgatagtagaatattgttagagtagaagatagttagaaatataattaataattaggttatggaagttaggtattttagagtttattttataggtaatgagaagttatttaaagggtttttgtttttgtttttagtattttaaaggatgttattttcgttttttagtttttattatatttgtgagaaattaggggtaatttttattattggttttttgaatgttttatgtttttttttatgaatgtttttaagattttgtttatatttattaaaagttaatattgatgtttttagggtgtttttttttaatgaatgtttataaggatttttattatatttatcgaaagttattttgtgatgtttttttatattgtgatgttttattattttgtgatgtttgttttggttttgggtttgtatttatttggttggggtttattttattttttgggtttgtggaatgttggttttttattttttggttatttttttttgtttttttattaaatttggaagatttttgtttagtatttttttaaatttttttttttgttttattttgttttttttttttttttgggattataattatatttatgttagattttttagtatttagtataggttatttaggttttgtttattttttttttagtatgtataatttttagtgagagttattgtttagtaatttttgaaaaaatttaaatgttgattttttttaaagtatagtattttgttgatggttgtag

SEQ ID NO: 345 - DNA, 8779 bp, Artificial Sequence
  chemically treated genomic DNA (Homo sapiens)
agaatattggtttttttttgtttttagtagatttgtgtcgtggtacgttttttatattttttagtattgatgaagttatagaagtttgtttcgatagtgtagtagaaggtagaagaggatagagggggttttgttttgagtggggagattgattgattgttaggattgagaagggggtgtggaaagacgtggttggtaggaggtttttggtgggaaagaagtcgtattgatttgggtaggttttggttatgaggaaggagttttagggagttagcgtgcgaggttgttggcgaggtaggttatagtttttcgtttttttttgggggtggtacgtgtatttgtgtgtgtgtagtaaagtttagtgattaggttataattagggagtggggggtttgtatggtgattttatatttgtgaggtgggtattggtgtttttggtggattttttttgtgaggagtttttttttttaaaaaaaaaaaagaaaaaaaaagaaaagagagttttgttttgttgtttagattggagtatagggtttcggtgatagtttattataattttgaatttttagtttaagtgatttttttattttagttggaagtggaattataggtgtatattatcgtgtttggttttttttttttttttttttaattttttttttaaaaagagataaggttttgttttgttatttttgttggagtgtagtgttatgattacggtttattgtagttttagttttttgggtttaagtaatttttttattttagttgggattataggtgtgcgttattatagttagtagattttttttttttttattagatgtgaggtttcgttatgttatttaggttggttttttaatatttgggtttaagtagtttttttgttttggttttttaaaatgggagattataggtatgagttattacgtttagtttattttattagggaggataaggatagtagataggtgtatttagggttttattattgtaaattgttttagagatttaaattttagaagttgttgagtaattggaagtgttgatttattataatttggggttattaagtgggtggtagatggattgggttgtgtaggggttgaaggatttattcgtaggtttagagtcgttggtttttttgaggttgtgttgtttttatgggattgagtgttgggacggggcgttttgggagtttggtaggattttattttgtacgtgggttttggtcgtgcgttttttttagatcgtggtaggcggtttcgggatgttgttaatgtagttgaattattattttaaaatgttataaaatttattttttataataatagtagtataaataaacgtttagatattttacgtttaaagagggtttttgttcgggttttttattttataattgatgtttaaaagtgtttttaaaggtaatattgtaattatatttatttatttatttatttgttgtagaaatgaagttatttattaaaatatatttatggtagtaagttttgatgggtttgaagaggaggtaggagtaaggtgttgagtttttaaatatcgttttgttagggagggattttgataggtgtttggttgatatgttgtggtcgaggtaggaaggaagttgtagaattttacgaaggtagaagattattagtaggtaggttttatgttattatattcgtgagagtggtagtggtttggtggttatagagatgtttgatagcgtgggtttggagtcggtgatcggttggttttgagaggtttttttaggaggtgtttggattttgatggatagtttttagttttacgtttttttttgaggtttgtagagggtgttagaagtgattttagaaagggttttttgaggtgttgcggtttttatttagtagttaggggttttgtttggaagtggtcgtgtcgtggtcgtgttgaatcgttatgagtttagagtttttcgggttttttttgttttgcggggaaggtttcggggttttttttattttttcgaatttttgtttagatattatttttttagtaaaggttgtttgattatttgaatttgtattatttttatttaaatagttttgttttttttgtttgttttattttttttatagtaattattattatttgatacgttgtgtatttttttgttttgtgtatggaagtttgtttgttttgttggaatgtaggtttttggagggtgtggttttggtttcgttttttgttgtatttttagtgtttaggacggtgtttagtatggagtagttgtttagttaatgttgtggttttgatgggattgtattcgttttatatgattgaagttgttggcgtggaagttgtgttatgttatgtaaagtatgtagtgggaaagtagtggggtgggggcgtttttgtattatattatttgttgttgtcgttttaaaaatttagaggtttttttatattttagttggatgttgattttaaaatgatcgatgtttttttttgatttatgaaggttgttgtttttggaatttgatattagagggaagcgaaattttataatgtgtggggtagtttggtgtggtggtttaggtttgtaatttagtattttgggaggttaaggatggcggattattcgagttttggagtttgagattagtttgggtagtatgatgagattttatttttataaaaattagttggatacggtggtgtatatttgtggttttattatttaggaggttgaggtgggaggattatttgagtttaggaggtcgagattgtagtgagttatgattatgttattgaattttagtttgggagatagagtgagatttcgttttaaaatagaaaaaaagttattaggtatggtggtatatgtttgtaattgtattattttgggaagttgaggtaggtagattatttgagtttaggagttcgaaattagtcgggataataagtaaaattttatttttatttttttaaaatttgtgtatataaaatttttgtatgaaagttgtgtggtatatgtttagttgttttatgttttattttttggatatgagtgtgattttttttgtttttgtagtgttatttaagttgttattagtttttttgggcgagtgatgtatttttttagttggtttgtttgagtttttggttagttaaggggttgtttttgattttttcggtattcgttcgtttttgtatagttatttttattattttaattggatggttttgtattgaggttaggttggatattagttttttatgggtagggatcgtgtttttttattggttgagtaattgggtttatagcgtaggtaagttattttttttaagagattttgataagtaaaatagtgaatatattttttttatttatttatttattattttttatttttgaggtaggatttttttttgtcgtttaggttggagtgtagtgatgtgattttggtttattgtagtttcgattttttcgggtttaggtaatttttttattttagttttttaattaattgcgacgataggtatatgttatcgtatttggttaatttttatatttttagtagaggtgaggttttgttgtgtttgtttaggttggttttgaatttatgggttgaagtgatttatttattttggtttttgcgttcggtttattttttttttttttttttttttttgagacgaaattttatttttgttgtttaggttggagtgtaatggtatgttattagtttattgtaatttttgttttgtaggttgaagcgatttttttgttttagttttttaagtagttggtattataggtatgcgttaataagttcggttagtttttttgtatttttagtagagacgggatttttttatgtggttaggttggtttcgaatttttgattttaggtgattttttcgtttttgttttttaaagtgttgggattataggtttgagttattgtgttcggtttaattttgtatttttagtagagaaggggtttattcgtgttggttaggttgattttgaattttcgatcgtaggggatttattcgttttatttatttaaattgttgggattataggtatgagttattaagttcggtcgtttttagcgtttaaaaggattgtagtttggttggtggtagtttttttgttttggtatagacgtagggggagattttgtgtttttagatagtatggattttaggattttattgagagatggaattaagagtttttcggggttttttgagtggggagttgtatcggaaattattattagcgcgtttgagttcgtttcgtattgtttttttgtagtgcggggggttattgttattatcgtgaggatacgttggggtttggggagggattgttatggttgtgggtgtattttgtacgttttgtcgatttagttttgtacgttgatttttttttcgtgttcgtttatattgttaattgggtttttgtttttttttttttttttcgtatttttgtgttttattgataattgttttgtagtcgttttgttgatagttgttaaattgttttttaaaaatatttttattgtaatttcggtttttggtgttagtcgtagtggtgtgagtgcgttcgttttattatagttttgttagtattgggcgtttttgtgtattgtaaatatatgcgattattatttttatttttttattttttttataattaaagatgtgtcgtgttatttttgtttaggttattttggttttgggatgagttggttggaggtttaggtagcgcgagggataggaggagggcgaggcgttgtttggtggattagcggggagttatggtacgggtaggatttaggagaggaggtcggtagtttatagtagatcgcggggtttagttggtttgttttgtgtttggggtttgtttttgagcgttgaaatgaggtttttaaattttagttcgtgtattgagagtaaggtagttgttttgagttttattttttttttttttttgtcgtttagtatgacgtcgtgtttatttagtttagcgtggtgttatgtttttgtttatttttattaatggtgaggatttagattgagtttagtacgttttttggtatttttggtggtagtaggtagggtttcgttatggacggtattgtagtcgagtttcggttcggcgtcggttttttgtagtatgtttagttttcgtcgtagtttcggaagaagcggtttgaggattttaagtttgggaaaatttttggggaaggttttttttttacggtgagtatttgttgttgttgtgtgttaaacgtacgtgatttttttggggaggtttatttttttcggggtttgtcggagattttaagtaaggttggtgtttttttaggtaggaggttttaggttttttgaggggtgttatttgttgtgaaggttatttgagtttttgggggttgggtattttttaagtagatgacgtgatgagtgtggttaaatatttaatttggttttgtagatgagaacgttagatatattttttgatggtttgcggaggttttttttgatgtagttaattttattttaatttggtattagtaagttatattttgtgtttttgtgttttattggtagggttttgggaagttgtttttttttttagattgaaagttagtatttttttagggtttttggggatatttattgatttttttttatttttttgttttgtttttttgaatatataaaatagtacgttttggatatttgttggagatatagtttttagagttttgtgtttcgagttttataaataggagtattgtcgtagtattgttaagttatatttgttatttgttttcggggtgtttttttttttgaaagtaaagaaatgaaggtcgaaagtagttgatatgggacgttttgttgacgtgggatttatgaagtcgtgtgtggttgtggatttagtgaaggttgtaataggtttaggggaggtttgagtaattcggggtgtattgtttttatttgggtttttaaagagatagagtttcgtgtcgttattgtggtcgttaaggtggtcgtcgtgtgcgtgttagggttattttagggagttttgggggtattttattttggagggtttgggtgagtttttgaataatttttttttgtttgatttttgtgaagaaatcgtaggtgaggtttatttttttttttttttttttttatatataggaaatattttataatgtaaagaaaaatatgaaatatagtttatttatatttttaatatattgttttaattaatgttaatttttgttgtttttatattttagattttttaaattgtaggttttatgaaataatttttttataaaaggattatgtttttatgaaaaatgtttttaattatgagattagtttttaaagttttggggatttagatttttttagaaagaagaaattttttggaaaattttgggtattttgtatggttgtttataattatttagtgaaagaataggttttttttttttttagttttatttgttttttgagatagagttttgttttgttatttaggtttgagtgtagtggtatgattatagtttattgtagtttcgattttttgggtttaagtgatttttttattttagttttttaagtagttgtagttataggaatgtattatcgtgtttagttaattgtaaaattttttgtagagatagggttttattttgttgtttagattggttttgaatttttaggttcgagtgattttttttttagttttgtaaagtgttgggattataggcgtgagttattgtgtttggttttagttttatttttttgtatgtttttttttaatttaattttattttattatgtatgtatttatttttttagaaatagagttttgttttgttatttaggttggagtgtagcggtgtgattatagtttattgtagtttttattatttgggtttaagcgatttttttgttttagttttttgagtagttgggattataggtatgtgttattatatatggtttttaatatttattttgattgaaaaaggaagatttatttgtgaaattgtttgtttttttgggttttggagatgggtggagagtaggtattgtttttttaggggttgtggttcgtgtttttttgaatttgtattagggaggtgttcgggagagtacggtgagttggaggtttttttatggggttgtttggaatttatagtattgggttttagattatatgtgttatttttagtttttttttagtttttttgaaatggagattatataaaagttgatttttaggggagggggaaaggatagtgataggaggttgggtaagagttagttgtagtatcggagagtcgggaggttttttgaggacggttataatttttagggagggatacgttacgcgttattttttggaagaggattttttttttttgtaggaaatttgtttgtgaagtgttgagtttagataacggaaagattatattagtatttttttagaaagggttttattaaatatcggtgttcgtttataatttttttttttttttttttatttatgaagttagtacgtgtttttgtggagaaacgtgattttatagaaatatatgagttagagaggggagttttgttcggtttattttttttttttttttggtagttgagagttatttatgcgtggcgtatttttttgggaagattttgagtatgtagagtttttagaatttaattttattttttttgagtgttataaggcgttttatatggtgttttttaggattttttttgacgtgttttattaggagttttgtttcgattgcggtttatagttcggggttaggtggatttggttttgtggttttttgaaggtttttttgttagtttttaggaatgttacgggataggttttttttgttttttgttttttaggtcgtttttttgtgggtgttttaggagatatttgtgttttatttggtggtggtggggtttttttggtatagttgttttatgttttttggttaaatcgtgggtttattaggaatttttagtttggtgttttagggtgtgttttaggttagttcgagtggagggttttttttttgtttgggatgtttgttttgttggagtgttttgtttcggaggtggggtttgagtgtagggtttaggggtgttgagaggatagggtaggaggtttgttgtatttcgggtaggtggtttttttttgtgggtacgtagggttatgtattgttggtttagttttttttgttttttatagttaggttttttttatggtgtttataagtaatattatataaaatgtatgataatagttatttttaaaaacgaaattttagggtagtttttgtaatgaatgtatattagaaggatatattgttgttatagaagtttttgtgttttgttatttgtggtggcgttattgttttttttttgttggtgaagggcgtggtagtcgaagaggtttttgagtttgtatttgtgttgtatcgttagggttgttagtagttgatttagaagtttttggaaataatagagagatggatatgtttttttttagttgttagaatatattaatacgagtattggtttttagttttatttgttagtataagatttaaaatattttattgtagatttaagtttttagtggggataggaagcgtgcgtgtggggtagagggattcgttaggtttagtgttttggttattatattgtgtgttttttttttttttttttttttttaattagg

SEQ ID NO: 346 - DNA, 8779 bp, Artificial Sequence
  chemically treated genomic DNA (Homo sapiens)
tttggttgggaaagaaaaggagaaaaagaaatatataatgtaataattaggatattgggtttgacgagtttttttgttttatacgtacgttttttgtttttattgaaggtttgagtttatagtgaaatattttgggttttgtattgataagtagagttaaaagttaatgttcgtgttgatgtgttttaatagttaagagaaaatatatttatttttttgttgtttttagaagtttttggattagttgttaatagttttaacggtgtaatataagtataaatttaggaattttttcgattgttacgttttttattaatagaaggaagatagtggcgttattataagtggtagggtataggggtttttgtgataataatatgtttttttagtatatatttattgtaaaggttgttttgaagtttcgtttttggaaataattgttattatatattttgtatgatgttgtttgtgggtattatgaagagagtttggttgtaaaggatagagggagttaaattagtaatgtatggttttgcgtgtttataagagggagttatttgttcgggatgtagtaggttttttgttttgtttttttagtatttttgagttttgtatttaaattttattttcgagatagagtattttagtagggtaggtattttaaataggggagagattttttattcggattagtttggggtatattttgaggtattagattggagatttttggtgggtttacggtttagttagagagtatgaggtagttgtgttagggaggttttattattattaagtgggatataagtgttttttaagatatttatagggggacggtttgaggagtagggagtagaggaaatttgtttcgtgatatttttgggggttggtaggaagatttttaggaggttatagggttaggtttatttggtttcgggttgtgagtcgtaatcggggtaggatttttgatgggatacgttagaagagattttggaaagtattatgtgagacgttttgtggtatttaagaagaatgaagttggattttggggattttatatatttaaggtttttttagaggaatacgttacgtatggatggtttttagttgttagggagaaaggggaagtgggtcgggtagggtttttttttttagtttatgtgtttttgtgaggttacgtttttttataagagtacgtgttagttttataagtagaaaagaggaagaaagaattgtgaacgagtatcgatatttagtggaattttttttaaggggatattgatgtgattttttcgttgtttaaatttaatattttataagtaggttttttataagaaggaaggatttttttttagagaatggcgcgtgacgtgtttttttttggaggttgtgatcgtttttagggggtttttcggtttttcggtgttgtagttggtttttgtttagttttttattattgtttttttttttttttttggaaattaatttttatgtgatttttattttaggaaagttgagaaagaattgagggtaatatatgtaatttgagatttagtattgtggattttaaatagttttatggaggagtttttagtttatcgtgttttttcgggtatttttttggtgtaggtttagaaagatacggattatagtttttggagggatagtgtttgttttttatttatttttagaatttagggaaataggtaattttatagatgagttttttttttttagttaagataaatgttaagggttatgtatggtggtatatgtttgtggttttagttatttaggaggttaaggtaggaggatcgtttaagtttaggtggtgaaggttgtagtgagttatgattatatcgttgtattttagtttaggtgatagagtaagattttgtttttaaaaggataaatatatatataataaaataaagttaaattaaaaagagatatataaggaagtaaaattgaggttaagtatagtggtttacgtttgtaattttaatattttgtaaggttgaggagagaattattcgagtttaggagtttaagattagtttgggtaataaagtgagattttgtttttataaaaaattttataattagttgggtacggtggtgtatttttgtaattgtagttatttgggaggttgaggtaagaggattatttgagtttaggaagtcgaggttgtagtgagttatgattatgttattgtatttaagtttgggtgatagagtaagattttgttttaaaaaataggtaaagttgagaaaagaggaggtttgtttttttattgggtggttgtaagtagttatgtagaatgtttaaggttttttaaagagttttttttttttgaaaggatttgagtttttaaaattttggggattagttttatggttgaaggtattttttatgagggtataatttttttataaaaaaattattttataaaatttgtaatttaaaaaatttaaagtgtaagggtagtaaaagttaatattaattaaaataatatgttgggaatatgggtaagttatattttatgtttttttttgtattgtgaaatattttttatgtgtaaaaaagagaaaaaaggaaaataaattttatttacggtttttttataaaggttaggtaagaaagaattatttaggaatttatttaggttttttagagtgaggtgtttttagggttttttggaatggttttagtacgtatacggcggttattttggcgattatagtggcggtacgggattttgtttttttagaggtttagatggagatagtatatttcgagttgtttaggttttttttgaatttgttataatttttattaaatttataattatatacggttttatgggttttacgttagtaaaacgttttatgttagttgttttcgatttttatttttttgtttttagaggaaaaaatatttcgaagataggtaataagtgtgatttgatagtattgcgataatatttttgtttgtgaaattcggaatataagattttggaggttgtgtttttagtaaatgtttagagcgtattgttttatgtatttaaaaaaataaaatagagaaataagaagaggttaataaatgtttttaaaaattttggagagatattaatttttaatttaagaaaaagaatagttttttagggttttgttagtgagatataaggatatagaatgtaatttgttgatgttaggttaaaatgaaattaattatattagaaaaaattttcgtagattattaagagatgtgtttaacgtttttatttataaaattaggttaaatatttagttatatttattacgttatttgtttggggggtatttagtttttaaagatttaagtggtttttataataggtgatattttttaaggggtttgagattttttgtttggaaggatattagttttgtttggagttttcggtaagtttcgaggaaggtgagtttttttaaggaaattacgtacgtttgatatatagtagtagtaaatatttatcgtggaaaaagagttttttttaaggatttttttaaatttgaagtttttaggtcgtttttttcgaggttgcggcggaggttgggtatgttgtagggagtcggcgtcgggtcgaggttcggttgtagtgtcgtttatggcggggttttgtttgttgttattaggaatgttagggggcgtgttggatttagtttgggtttttattattgatggggatgggtaggaatataatattacgttggattggatgggtacggcgttatattaggcgataaagaggaaaaggaagtaaggtttaaggtagttgttttgtttttaatgtacggattaaggtttaaggattttattttaacgtttaaaaataaattttaagtatagggtaggttagttgagtttcgcggtttgttgtgagttgtcggtttttttttttgagttttgttcgtgttatggtttttcgttaatttattaggtagcgtttcgttttttttttgtttttcgcgttgtttgagtttttagttaatttattttaaggttaaggtaatttgagtagagatagtacggtatatttttaattgtgggggggatggagagataagagtgatgatcgtatgtgtttataatatatagagacgtttagtgttggtaagattataataaagcgagcgtatttatattattgcggttggtattaaaaatcgggattgtagtggaaatgtttttggaaagtagtttggtaattgttaataaagcgattatagaatagttgttaatgagatatagaaatacgaaggagaggagggagggtagaaatttagttaataatgtaagcgggtacggagggaagattagcgtgtaaagttaggtcggtaagacgtgtaaggtgtatttatagttataataatttttttttagattttaacgtgtttttacggtggtggtagtggtttttcgtattatagaagaataatgcgaggcgagtttaggcgcgttgatggtggttttcgatataattttttatttaaagaatttcggagagtttttgattttattttttagtagggttttgaagtttatgttgtttgaagatatagggtttttttttgcgtttgtgttaggatagagggattgttattagttaagttgtaatttttttaaacgttaaaaacggtcgggtttggtggtttatgtttgtagttttagtagtttgggtggatgaggcgggtggattttttgcggtcgggagtttaagattagtttgattaatacgaataaattttttttttattaaaaatataaaattaggtcgggtatagtggtttaggtttgtaattttagtattttgggaggtagaggcgggaggattatttgaggttaggagttcgagattagtttgattatatggagaaatttcgtttttattaaaaatataaaaaaattagtcgggtttgttggcgtatgtttgtaatgttagttatttgggaggttgaggtaggagaatcgttttaatttgtaaggtagaggttgtagtgagttgatagtatgttattgtattttagtttaggtaataagagtgaaatttcgttttaaaaaaaaaaaaaaaaaaaaaaaataggtcgggcgtagaggttaaagtgggtggattattttagtttatgagtttaagattagtttgggtaaatatagtaaaattttatttttattaaaaatataaaaattaattaggtacggtggtatgtgtttgtcgtcgtagttaattgggaggttgaggtaggaggattatttaagttcggggaggtcgaggttgtaatgagttaagattatattattgtattttagtttggacgatagagggagattttgttttaaaaataaaaaataataagtaaataaataaaaagaatatatttattattttgtttattaaagttttttaaaggaggtgatttatttacgttatggatttaattatttagttaataagaggatacggtttttgtttatagaaagttgatgtttagtttgattttaatataaaattatttagttaaagtggtgggggtggttatgtagagacgggcgggtgtcgggagagttaagggtagttttttggttggttaggggtttagatagattagttggggagatgtattattcgtttaggaaaattgatgatagtttagatggtattgtaagagtagggaggattatatttatgtttagaaagtgaaatataaaatagttaaatatgtattatatagtttttatataaaaattttatatatataaattttgaaaaaatagagatggggttttgtttgttgtttcggttggtttcgaatttttgaatttaagtgatttgtttgttttagttttttaaagtgatgtaattataggtatgtgttattatgtttggtgattttttttttgttttgagacggggttttattttgttttttaggttggagtttagtggtatgattatagtttattgtagtttcgattttttaggtttaagtgatttttttattttagttttttgagtagtgggattataggtgtgtattatcgtgtttagttaatttttgtagagatggggttttattatgttgtttaggttggttttaaattttagggttcgagtgattcgttatttttggttttttaaagtgttggattatagatttgagttattatattaggttgttttatatattgtaaagtttcgtttttttttaatgttagattttaaagatagtagtttttatgagttagaaagaaatatcggttattttgaaattaatatttaattgaagtgtagaaaggtttttggatttttgaaacggtaataatagatgatgtaatataaagacgtttttattttattgtttttttattgtatgttttatatgatatggtatagtttttacgttagtagttttaattatgtaaagcgaatgtagttttattaagattatagtattggttgagtagttattttatgttgggtatcgttttgggtattggaagtatagtagagaacgaaattaagattatattttttagaagtttgtattttagtaggatagatagatttttatatatagagtaggaaaatgtatagcgtgttagatgatgatgattattatgagaaaaataaagtaggtaaagagaataggattatttggatgagggtggtgtaaatttaaataattagatagtttttgttgggaaggtgatatttgagtaaagattcgagaaggtggggagagtttcggagtttttttcgtagagtagaggaggttcgggaagttttggatttatagcggtttagtacggttacgatacggttatttttagatagagtttttggttgttgggtagggatcgtagtattttagagaattttttttggggttatttttggtattttttgtaaattttaagggggagcgtgaggttgggggttgtttattagggtttaggtattttttgaaggaattttttaaagttagtcgattatcggttttagatttacgttgttagatatttttgtggttattagattattgttatttttacgggtgtgatgatatgggatttgtttattggtagttttttgttttcgtggaattttgtaattttttttttgtttcggttatagtatgttagttaagtatttgttagggtttttttttggtaggacgatgtttagaagtttaatattttgtttttgttttttttttagatttattagaatttgttattatgggtgtgttttaataaataattttatttttgtagtaaataaataaataaataaatgtagttgtaatattgtttttaaaagtatttttaagtattaattgtgaaataaaaagttcgagtaaaagttttttttgagcgtgaagtgtttaaacgtttatttgtattattattgttgtaaagggtagattttgtagtattttgaggtggtgatttaattgtattaatagtatttcgagatcgtttgttacgatttggaggaaacgtacggttagggtttacgtgtagggtagggttttgttaggtttttaaaacgtttcgttttagtatttagttttatggaggtagtatagttttagggaggttagcgattttgggtttgcgggtgagttttttagtttttgtatagtttaatttatttgttatttatttggtgattttaaattgtagtaagttaatatttttagttatttaatagtttttgaaatttaaatttttggaataatttatagtaataagattttaggtgtatttgtttattatttttgttttttttaatgaaatgggttaggcgtggtggtttatgtttgtaattttttattttgggaggttaaggtaggagaattgtttgagtttaggtgttgggagattagtttgggtaatatggcgagattttatatttaataaaaaaaaaaaaaatttgttggttgtggtggcgtatatttgtaattttagttgaagtgggagaattatttgagtttaggaggttgaggttgtagtgagtcgtggttatagtattgtattttagtaggggtgatagaataaaattttgtttttttttaaaaaagaaattaaaaaaaaaaaaaaaaagagttaggtacggtggtgtgtatttgtggttttatttttagttgaggtgggaggattatttgggttgggagtttaaggttgtggtgaattattatcgagattttgtattttagtttgggtaatagagtaaggttttttttttttttttttttttttttttttttaaaaaaaaaagttttttataagagaagtttattaaaaatattagtgtttattttataggtgtggggttattatgtaagttttttattttttggttatgatttgattattgggttttgttatatatatataggtgtacgtattatttttaagggaaggcggggagttgtggtttgtttcgttagtagtttcgtacgttggttttttggggttttttttttatgattaaggtttgtttaggttagtgcggttttttttttattaggagttttttgttaattacgtttttttatattttttttttagttttggtaattaattaatttttttatttaggataggattttttttgtttttttttattttttattgtattgtcgagataagtttttgtgattttattagtgttgagaaatgtgaaagacgtgttacggtataggtttattgagaatagggaaaggttaatgtttt

SEQ ID NO: 347 - DNA, 7072 bp, Artificial Sequence
  chemically treated genomic DNA (Homo sapiens)
atattttgggaggttaaggtaggtagattatttgaatttaggcgttttagattagttagggtaatatggtaatattttatttttagtaaatatataaaaaattagtcgggtatggaggtttatatttgtagttttagttatttgagaggttgagatgggaggattatttgagttcgggaggttaagtttgtagtgagttgagattgtattattgtattttagtttgagtaatagagtgagatttttttttaaagaagagtttttatttattggtggtgatattgttattgtggtggttattattgggagaaagtttttttaattttatgtttttttgattagaaagtttttttagtggaggttatttattttgaatattaatgaagtaggagttggttaaatggttgaggggatgagagaagggggagggagaggagagagaatgaggggagggaataggatatagggagtggtatatagaggtatagaggtgtggtggaatatagaaggtatgaaagtagaaattggtggaatttaattatggaagggaattggaagaggagaatttggaagaaagagttaaggatagtttataagggataaattataaaaggtttaaagtattatgtaggttaggtgtggtggtttatatttgtaattttagtatttttggaggttgtggtaggtggataatttgaggttagaagtttaagattaggttggttaatgtggtgaaatttagtttatattaaaaatataaaaattagttgggtatggtggcgtatgtttataattttagttattcgggaggttgaggtaggagaattatttgaatttggtaagtggaggttatagtgagttgagattatattatcgtattttagtttgggagatagagttagattttgttttaaaaataaaaaataaaataaaaataaagtattacgtaaagattttggatttttaaaaattaatttatagaaaaattttttttagaaatttgtgaagtgtttattattatgtattgttaaagtttaattaaataaggaaatagaaaaatgtgtttaatggttagtttttgatattaagaatggagaataaagtggaaggttttatagggatttagatttggttgtaggtttatggagttgtgttgattgtgattgattttttatagtttttttttttagaatttgaagtggtttttttttatttatatggtataataatagtttatatttttaatggtattaagattgtggtatagttttttataattttttttaattttatttgtttttatagttagagttttgatatttggttttggtgtttattattttttagttagttagaatttaggggataaattttgattagtttaaattatttatataattttatttttttttttattgattggttgaggtattaatgcgtttttgttataattttggttagagatataaggggatttagaagatttttgggaaagtttttttttttttgaaaaagaaatatataagatggtatggatttttttttttttgtgtgtcgtgttggtgtttgatatttggaattttgtattttttagagttatttaatataatattttatatagtacggtgagataagtttttgttttattgaaaattgaagatttataataattttttgtgaaatatgtagggtggttgttattatttggtagattaggaagttaaaagaaatgaaggggtatatatgaggtttaaagaatgtgtagaaataaatttaggttttatgaatgtgtgtgtttttataatattaggatgttttttttaaattttattaaatatagattaaaaaatattaggtatagttttataaaggtttgtttttgtgttcggataataaagtaaggtatgaaggtgaattaaattgttagattagattaaaatgtttttttgtatttttattataatgtataaattatttgaagttgagttaaaaaaaaatatgataagatgattatgtttttttaagatgaaagattttttcgagtttgagtgatatagttattttaatagtaaataattaataatagagtttttagttagtatgtttaaagcggtgaggtttttggggatgtattcgttgttttacgttttgaggagtttttttagtttattttagtgtgttatatatatgttattattatttatatgtggtaatatatgaaatacgtatgggaagtatatatttgtttggttatgtttttttttgttttttatattgttattttttttagattttttattttagtgaattgatttgtttattgttttatagatgttttttggtttgaggatttgtttttgtgattttttttgttttgaattttggatttttttttgtatatttaaaataaaaatttttaaattttatttaaagtgaatttttttagtaaattgttggtttgtataatgaaagttatattatataattaaatcgtttggattgtatatgttaacgtattgtatatgttatttttttttttgtatgttttgtttttttaagtagattataaataatttttttgaaggttgttggaaagagttttttttaaaataaataatttttaatgtttattgattattgatattttttattgtgtttttattttttaaattgttttattttgttattgttgtgattattgatatgatatagaaggttagagtttttgattgtgtttttttttttaattaaaatgatttttgtgtttatagatttatagaagggaaaaatattattaaaatgggatattaatgaggattgaaggttttttaaatattttggggatataaaatatttttattcgtaaaggatgtttttatacggaggaagtatttatagaggaaggaaatttttgttattattttttattgggaatatttattatagatagttaaattttagtggttatattaagatttggggaagagtagggtatttttaattttaagttattaataaatttgatatatttgttagtttagttataaaatagaaaattttttgtttaattaaatttagtttaatagtttttttagaagtaggtagggttaagaggttgagtttcgtgtttttggaataatgtggtatgtgtgtgtgtatgtgtagtgttagattgggatttggttttttggaagtgattgagttaggatagggaagggatttattgaatggtttggggaatagggttggttaagtttatggtttttttgaggttagtttttttatttttaaatttttttttattttatttatttttaggaatttttttatatattttgggtaaaatatagtttggtaagtttttatattatggtttggtggttatagtgtgttgatttttttttaggattaattaagaaagttagttttggtgtttttaaagttgttagttttttaagggagtatttttatataggaatatattttgagaagttgataagatttttttaaatatttgggaggtagtttttgaattaaattatttgtttgttgatgttaattattagagtgttatttaaaagttaaaatttaagaggtatatgtaaaaggaaataagttaaattaattatttattttaatattagagtaatttagaggaatttttaattatatatttttaagagatttgtgaggttaattttattttatttgttgtttttgaagtttagttggagttttttaatatttcgattggaggatgaattttagtatagggaattttgagatggagggagggggcgttggtttaggatgtttggaggttttagaaagaattgaggttatttggaagatataacgttattttaaaaatgatttaggatggtttttttatgtattttttatttttataggaattaggggttattttttaggatggaatttgtttgatgttgtaatagtgtttagttttttaatttttttatgataataggtaatttttttttgttttgtttatagttaattaattagttattgttgatagtaaggttttatttttaatataggatattttttgaagtattaatttttgttttaatagttgatttttgtttggaatataatgtgttataatgtagtggtatttagtattaaaattaaaatatttttttatttattttttaattttaatatttttagtattttaattattatttgaagggttatttattgtagtatgttatatttatatatatatatgtatatgttgtagtgtttttagtttgagttagtgatattttaggttttaaatgttttgaaaaaatagagaaagtttttattaagttaaggaagtgagtttgtagattatgtttttaaaaatttttagtttgataatttagtttttaagatgattaggtttttttttttttattttttagttagtatgtgcgaataaggatttttttgaatttttaggaggggaatgagtttaatttgattggtaaaagtttttttaataggatatttaatattgtggtttttagaattagttataaagatattttatatgtttatgttttataatgggtaattttggtttggatttatgttattttgttttagtattataatttttgaaaaattagtttaaagagaaaaaaaaaagaaaagaaaaattatggtaaatattgtttagttttatatttttattttttttatgttaaaataggaaatgtatttttgatatttttaaaatgagtaattatacgtataattaatttggttaaaattttttttttggtaattgtaatattttttttgtatttggatatgaagggagttttagaaaagcggaagaatttagacgtatattgggtaggtttgaatttgttttgtttttaaaaattaaataaatgattttttagtattatcgttttcgttgttttattaggtattgtttttttttattttttgttttttgtggggtttgattcggaatagtggtatttttttttcggttagattatttgaaattgttgtcggtttttgagatgatattattatcgaatgtttgtgttttattgtttagtttaatttgtattgtggatatttataacgtttcggtaatagttttgtaggtgtattatatttttgtttttgttttgggaggaaaagggagggtacggtagttaggttttatatttttataagtgtatgttttaagattattgtatttatagtgtttttaatatttttttataaaaggggaaagttttatagttttaattatgaaggaaattagtgagtattagttagtttgtttttttttgtattttataagatcgtttggtattattgaggtagaagttattgttgtgtatttatatgttgtttaaatttggatatgttttattttaagttagtgttaatattaatgtattttatagtttttttttttgttagttattttataatgtagtaaaagattaaaatgaatgttttaagttataagagatagttttttgggatagttggttttatttattaagtataattttatattttaagagagggaatattggttttaaaagttaagttaagatttgaatataagtttggattaaatgaaatttgttttttttatttttttattaagtttttttttttggtatatattaaatgttttattattttttaaggaaataatgtagttttaagtttaatattagttatttaagagagtaaacgatattttttgaaatattaattttttgttttaataattgattcgtttagaatataatgtattataatgtagtgatattaaatattgaaagtaaaatatttaattttttagtgttaatattttttaaattttaattattatttgaaggattttttattgtagtatgttttatttatatataagtgttttgtgaagggtaggtatttattgaattttgtggaaagagtgagtaggttaatgagaataaatttgtgaatttgtgttataaaaatgaaaatattagagtaaaaaagaagttaaatgattgggggttttaatagaaggttattggagtttagaaattttgttttttattttgtagtttttttattattaagtagagatagattaaatgaattttaattaattaattaaataatgttaaaattatttaaatgtttttattgggagagtatagttttgggtgatttttttaagatattgttttaatatagtagtgatagttagaatgttgataaattttatgatttaaaattttatatatttgtaaatggttttgattgtaattttattaatttcgatatgttttagttttataaatgaaatgatttgtttttttaattagaaagaaaaaatgaaattaagaggtaggaaatttattagggagtagattttaggtttaggtagtttgaaaataggtaacgtgaagtaaggttgggtgaggtgtttgggttttaagaagtgtgagatttaataaagaggaagtaagttaaaggtttgtttttaaagtgagattttttggtatttcgtgttgtattttgtaaattgggatttgaattttaattgtattattttagtaatttatatgttttagtatgtttaagaataatgtttattttgagttattataatgtgttatgcgttgtgttggatgagtgttttatttatttttttaaaatttttaaagtatataaaagtagaacgattaataagtttttatatatttgttatttatattgaataagtattattttatttaattttttttttggggtatttattattaattagtttgagagatgagaaataggtttagagattaagtagtttaaattatttagaaagtaagtggttgggttaggatttatcggttcgattttaaagtttacgttttgaagggttgtagtgtttttagtttaaaatatttggtttttttgggtttttgtgtatatgtacgtcgtttatattttttttttttttattttattagaaaatataaggggaaagtgttttttttgtgataaatttttgtgttttttcgtttttagg

SEQ ID NO: 348 - DNA, 7072 bp, Artificial Sequence
  chemically treated genomic DNA (Homo sapiens)
tttgggagcggagggatatagggatttgttataagaaaggtattttttttttatattttttggtgagatgagggaagaggaggtataggcggcgtatatgtgtatagggatttagagggattaagtattttaaattggaagtattatagttttttagagcgtgggttttggagtcgggtcggtgagttttggtttagttatttattttttgggtgatttgggttgtttaatttttgagtttgttttttattttttaaattggttagtaatgaatgttttagagggagagttaaataaagtaatatttgtttaatatgggtgataggtatatgggggtttattggtcgttttatttttgtatattttgaaaattttaaagaggtaggtaaaatatttatttagtatagcgtatgatatattataatggtttagaatggatattgtttttaaatatattgaaatatatagattattaaaatagtatagttaaggtttaagttttagtttataaggtgtaatacgagatgttaaaaaattttattttgaaaataggtttttaatttattttttttttgttaagttttatattttttggaatttagatattttatttagttttgttttacgttgtttgtttttaaattgtttggatttaggatttattttttaataaattttttgttttttggttttattttttttttttaattaggaaagtaagttattttatttgtaaagttaaaatatatcggaattagtaaagttatagttaaaattatttgtagatatgtaaaattttgaattatggaatttgttagtattttggttgttattgttatattagggtagtattttagaagagttatttaaggttgtatttttttaataggaatatttaggtaattttaatattgtttaattaattaattaaaatttatttgatttgtttttatttaataatggaggagttataggatggaaggtaggatttttggattttagtgattttttgttaagatttttaattatttaattttttttttgttttaatatttttatttttgtaatataaatttataaatttatttttattaatttatttattttttttataaaatttagtaagtatttattttttataaagtatttatgtataaataggatatattgtaataggaaattttttaaataataattgaaatttgaaaggtattaatattgaaagattaggtattttgtttttaatgtttagtattattatattgtaatatattatattttaaacgaattaattattgaaataaaaaattaatgttttagaaaatatcgtttatttttttaaataattaatgttagatttaaaattatattatttttttaagaaatagtggagtatttgatgtatattaaaaaggagagtttgataagaagataagaaagataaattttatttgatttaaatttatgtttaaattttggtttaatttttaaaattaatatttttttttttaaaatatgaagttatatttagtaagtgaaattaattgttttaaagaattgttttttgtggtttaaaatatttattttggttttttgttatattatagaataattaataaagaagagaattgtaagatatattgatattgatattaatttgaaataaaatatgtttaaatttaggtagtatataaatatatagtaataatttttgttttagtgatattaaacgattttataagatgtagaggaaaataggttgattaatatttattggttttttttatggttgaggttatgaagttttttttttttatgagaagatgttggaaatattgtaagtatagtaattttgaagtatgtatttgtaggaatatgaagtttggttgtcgtgtttttttttttttttttaaaataaaaataaaaatgtgatgtatttgtaaaattattgtcggaacgttgtagatatttataatataggttggattagataatgaaatatagatattcggtggtagtattattttaagaatcgataatagttttagataatttagtcgagaaggaagtgttattatttcgagttagattttataaagagtaaaaaatagaaggaagtaatatttgataaagtagcggaggcgatgatgttgaaggattatttgtttaatttttgaaaataaaataaatttaaatttatttagtgtgcgtttaaattttttcgtttttttggggttttttttatatttagatgtagaggaagtgttgtagttattaggaaggaagttttaattaagttgattatacgtgtgattgtttattttaaaagtgttagaaatgtattttttgttttagtatagagagggtaggagtatgagattgagtaatgtttattatggtttttttttttttttttttttttttttgaattaattttttaaaaattgtgatattgagataaaatgatataaatttaaattaaaattatttattatgagatataaatatatgaaatatttttgtagttagttttaagagttatagtattaggtattttattaggaagatttttattagttaaattaaatttattttttttttgggaatttaaaagaatttttgttcgtatatgttaattgaggggtgggggaagagaaatttagttattttgaggattaagttattaagttgaaaatttttaaaggtatggtttgtaagtttatttttttagtttggtgagagttttttttatttttttagagtatttggggtttaaaatattattggtttaaattgaaagtattgtagtatgtgtatgtgtgtatataaatgtgatatattgtagtaagtaattttttaaataatggttgaaatgttaaaagtattaaaattgaaagatgaataaaaaggtattttgattttaatattaagtattattatattgtaatatattatattttaaataaggattaattattgaaataaaaattaatgttttagaaaatattttgtgttgaggatggagttttattgttagtaatgattgattaattaattgtagataaaatagaaggaggttgtttgttattatggggaaattggggagttgaatattgttatagtattaggtagattttattttgggaggtggtttttgatttttatgggagtagagaatgtatagaaaagttattttgaattatttttagagtagcgttgtattttttaggtgattttagttttttttagaatttttaagtattttgaattagcgttttttttttttattttagaattttttatgttagagtttattttttaatcggggtgttgagggattttagttgagttttaagggtagtagatagaatggagttgattttataagttttttggaggtatgtaattaagagtttttttgaattattttgatattgagataaatgattgatttgatttatttttttttatatatgttttttgggttttaatttttaaatagtattttaatagttgatattagtaggtaaataatttaatttaaaggttgttttttaaatatttagaggggttttattagttttttaaagtatatttttatataggaatatttttttaggaggttggtagttttagaagtattaaggttagtttttttggttggttttgagggaagattaatatattgtagttattaagttatgatgtgagagtttgttaagttgtgttttatttagagtgtgtgggagggtttttgggggtgggtggagtgggaggaggtttgagggtgggagggttgattttagagggattatgagtttggttagttttgttttttagattatttaatagattttttttttgttttggtttagttatttttagggggttaagttttaatttggtattgtatatatatatatatatgttatattattttagaaatacgagatttagttttttggttttgtttgtttttgaaggaattattaagttaagtttgattaggtaaaggattttttgttttatgattaaattggtaaatatgttaggtttattggtggtttgagattaaaagtattttgtttttttttaaattttaatatagttattaaaatttgattatttgtagtaaatgtttttagtaagaagtaatggtaaagattttttttttttgtggatatttttttcgtgtagaggtattttttacgagtaagaatattttatatttttagaatatttagaagatttttagtttttattaatattttattttaataatattttttttttttgtgaatttgtggatatagaaattattttggttgggaaaaaaaatataattaaaggttttgattttttatattatattagtggttatagtaatgataagatagaatagtttagaaaataagaatatagtaggaagtattagtgattaatagatattaaaaattatttgttttgaggaaggttttttttaatagtttttagagagattatttatggtttatttggagagatagaatatgtagaggaaagaataatatgtgtaatgcgttagtatatgtagtttaagcggtttaattgtgtgatgtaatttttattatgtaagttaatagtttattggaggagtttattttgggtgagatttgaaaatttttgttttaaatgtgtaggggaaggtttaggatttaaggtaagaggaattataggggtaagtttttaagttagaaggtatttgtgggatagtgaatagattagtttattgaaatggagagtttgagaaagatagtagtgtgagagatagggagagatatggttagataagtgtgtgttttttatacgtattttatgtgttgttatatgtaaatagtggtgatatgtgtatggtatattggggtgaattgaggaagttttttaaagcgtgagataacgggtgtatttttaaggattttatcgttttgggtatattggttgggaattttgttattggttatttattgttggagtagttatgttatttagattcgagggaattttttattttgaaaaaatatgattattttgttatatttttttttagtttagttttagatgatttatatattgtgataaaaatgtaaaaaggtattttaatttaatttgatagtttagtttatttttatattttgttttgttgttcgagtataaaggtaaatttttatgaagttgtgtttgatattttttggtttgtatttggtaagatttaagagaagtattttggtattgtagaaatatatatatttatgagatttaggtttatttttgtatattttttaggttttatatatgtttttttattttttttggttttttaatttattaaatgataataattattttatatattttataggaagttgttataaatttttagtttttaatggaataaaaatttattttatcgtattatgtaagatattatgttagatgattttagaaggtatagaattttaggtgttaaatattaatacgatatatagaggaagaagagtttatgttattttgtgtgttttttttttagagagaggaagatttttttaaaggttttttgggtttttttatgtttttggttagaattgtggtaagggcgtattgatattttagttaattaataggaaaggggatagaattatgtgaatggtttaagttaattagaatttgttttttgagttttggttggttagagagtggtggatattagaattaaatgttagggttttgattgtaaggataaatgggattagggaggattgtaggagattgtattatagttttgatgttattaggaatgtaggttattattatgttatgtgggtggaggggagttattttaggttttgagaaaagaagttatgggaaattagttatagttaatataattttatggatttatagttagatttaggtttttatgggattttttattttgttttttatttttagtattagaaattgattattgagtatatttttttgtttttttgtttagttaaattttgataatatatagtagtaagtattttataaatttttggaaaagatttttttataaattggtttttaaaaatttaaaatttttgcgtgatattttatttttattttattttttatttttgagatagagtttagttttgttttttaggttggagtgcggtggtgtgattttaatttattgtaatttttatttgttaggtttaagtgatttttttgttttagtttttcgagtagttgggattataggtatgcgttattatgtttaattaatttttgtatttttagtatagattgggttttattatattggttagtttggttttgaatttttgattttaagttatttatttgttatagtttttaaaagtgttgagattataggtgtgagttattatatttggtttgtataatattttagattttttatgatttattttttatgaattatttttaatttttttttttagattttttttttttaatttttttttatgattgaattttattaatttttgtttttatattttttgtgttttattatatttttgtgtttttgtgtgttattttttatgttttattttttttttttatttttttttttttttttttttttttttttatttttttagttatttgattagtttttgttttattggtatttagagtgagtaatttttattgagagggttttttggttaggaaagtatagggttagggaagtttttttttaatagtaattattataataataatattattattaataagtggaagtttttttttagggaagggttttattttgttgtttaggttggagtatagtagtgtaattttagtttattgtaggtttgatttttcgggtttaagtgatttttttattttagttttttaagtagttggaattataggtgtgagtttttatattcggttaattttttgtatatttattagagatgagatattgttatgttgttttggttggtttggaacgtttgggtttaagtgatttgtttgttttggttttttaaagtgt

SEQ ID NO: 349 - DNA, 5493 bp, Artificial Sequence
  chemically treated genomic DNA (Homo sapiens)
atttgttgtaggtgtttgtgtacgtgcggaagtagtcgtcgtagtagggttatgaatatttcggcgtttagtcgtatagttttttgtggttacgtttattagtaggttagtatcgttatttttagagtttaggtttaattttttttagtttttagatttttatttatttatcgggtttttgttttttttttttttagtttttatgttagttttttattatgtggggttcgtagtatttagggaggtagattttatagatttgtattaggtattagaaggttttttggggaaggggtagggtataggtttgtaagtgtttattaaggaagggatcgtggaggagaaggtaggataggggaaaggagtgaaggggagggtttgggtattataggggtttgtatttagggttatttttaatttgcgtagtttttggaagttttttttaaaagtttttttttttgtttaagatagggtttgttgaggggtttagggtgttggaaattatagggtttatggtgttagatttgaaggttatagggttggggtttattggttaagggttgggagtgttttaaagtttaagttttgggtttttgggtttttggggttggggtcgtagtttttaagtttagaattaggagtcgtggggttaaggtgataatatttagatttttagatgattggggttaaggttggggttaagggttttaggtttttggagttaaggttattaggtttgaaggttattgaggttggtagttatgaggatttgggttattaggatagggtttaggaattaaggattgtaggtttttgaggttatagtttttggggatggggttttttgggtttaggttattagggtttttagagtagggttaaggttatttatttttgggggtaggtgtatgagtagtatagtagttacgggtttttgggtttggtagtagttttgtttcggtcgatatagggtgtaggttttgagtatttgtaggagtttttgttgtttgtgtcggaagattttataaggggttagttttgtaggtatttttttttttattttttgggggtttttgtttaggttttagtttttttgggtttttttgggttttttgagatgtaagattgtagagttgggttagggaaagtgggttggagtatttggggtttgtggggttgggggtttttgggtattatcggtttcgtattcgtggttttgaggcgatataaatatttcgtgtagagggaattgacggtgtaggtttttgttaatggtttttatttattgtgggtttttaggggtttttgttagtttttgtgggtagttaggaaggtgggtgtgagggtttagtgtggtgaggggttttgggtaggggaattggggtttttgtttatttttttatttgataggtgttagggttgtttttttggtatatatgggttttatataataggggttagtatcgggcgcgtagggtagacgggatgttttttcggtattgtatttttatttgtgggtgaggttaagggttttattaggtagtttttatagtttttgttggtaggttttaggtatagtttattagtaggtaggggtttattttgggtggtagggagtaaaggtcggaggtgttgggatatagggtgggtatattttgttaagatgtgggttgaggtagagaggaatgagttatggaagttaagtggggtttttgttttttttatttttttgtatcgtcgggatatggtttttttttagtgcgaggttatttttatttattttatttttcgttggcggatgaggtttgtaggtgggtggttcggtttgggggtgtatggtataggtatttagacgttgggtagttgttatttaaggtttatattgttattttttaggttatttaggtgaatttagtttttggttttagggatttttgggagttttgtggggtgatttgtgatttaggagttgttaatgtttgttacggggataggaaaggatgtggtttcgacgtgggtagaagtaggagattgaaggggtgagtgggtgtgtattgggggagggattggttggttgttatttaggatagggatatagataatttataggggaagttggttggagagagttttggattggaagtttagagttttgagtttgagtttgggtttgtgtttgatttgtgtgatttggggtaagtttttgtttatatttggatttgtgtttttgtttgtagtttggggaaagggggaaggaggaggtatgggttttgtgatttggatttgggatttttgagttagaggtttaaaggggaaggatgttttgttttagtagtgggtgtaaattttcggaggttgggggtaagagacgtatagaggttttttcggattttttttattttagggttttatttggtatttgtagaggggtgttattggttgagttttttttttaatttttattattagattttttcggtttttttttagaatttagtttttagttttttgttttttgttttagtatttcgttagtttttattttgtttttttattttggttttgttgagttgtttttattgaatttatatcggtcggtttgtcgatatgggttatgttcgttgagttttgagtcggattttaaggagttggagttattttgtagttcgggaggttgtattaggtttttttttagggtttgggttatggtgttcggggttttcgatgttataggtagagaaagtggggagaattagtgtgaggggttattttcggttagtttggggtttggttgcggggttagaggggggaggttttagggtattttattaagttttttatgtttttttttttatgggggtaggggttaggttttgttttgatagaaaagttaggtttttgttcggagatttagttttaagttttgtttttgtttttattagtttagtttatttttcgtagtattttattttttttttttattttttttttttttttatatagttttggtaatcgttgggggttttttttaagggtggggggtgttatttttttttttttgaggttttttttgtttgttttagtgtttttgagttgtgggttttttttattttttttatggttttagtgattgtaggtttgagtttttgtgttggtgtggagggtttaggattgttagacgtaggggtcgggttatttttagtttttttgtttgttttttttgagatagagtttcgttttgttgtttaggttggagtgtagtggcgcggttttagtttattgtaatttttatttttcggatttaagtgatttttttgttttagttttttaagtagtagggattatagataagtattattatgttcggttaatttttgtatttttagtagagatagggtttttgttatattggttaaatttttgattttaggtgatttatttattttagttttttaaagtgttgggattgtaggtatgagttattgcgtttggattttatgtttgttttttgagatagggttttgttttgttatttaggttggagtgtaatggtacgatttgggtttattgtaatttttattttttggttttaagagatttttttgcgttagtttttatagtagttgggattgtaggcgcgtattattatgtttagttaatttttgtattttttgttgagatagggtttcgttgtgttgtttaggttggacgtaagagattatttcgttttagttttttaaagtgttggaattataggtttgagttattacggtaggtttatttttagttttgaggttattggtatgtaaagtattaatttagggttttaataagaattaaggtttatttatcgtttgttttttttttttttttttttttttttgagatagtttcgtattgtcgtttgggttttattttttaggtttaagcgatttttttgttttagttttttaagtagttgggattataggaggtttttattatgtttagttaattttttgtatttttagagagatggggttttattatgttggttttggtgtgtttttattttttgttttttttttatttgttcgttttggttttttttttttttgtgattatttgtgttttttttttttttttattgttttttttttttgttttttttttttttttttttttttttggttttgttttttaattttgttttgggttgtttttttttttgtttgttatgttttttttggtttttttttatttgttttggttttttttttatttgtttttcgtttttgtttttttttgtttttttttcgttttttttttttgggtttattttttatttttttttttttttttttttgtttatatttattatttttttttttatttttttttttttttgttttttattttttttaagttgtattttttgtttttgtgtttattttttatttttttttatgtttttcggtattttttttttatttttttttttgggtttttttttggtttattttttattattttttgaataattttttttttttatgtttttttttttttattttcgttttttttttttttgttgtttttatttattttttattttttttttttttttttttattatttttttttttttttttgtatatcgttttgtatgtgttatattgtatatttgtttagaattttttaggtttttttttttttttagattttgtgggttttcggttataagatttaaaggggggcgaaaagagggcggggaaaggggagggggaggtttcgggaagttaggagaggaggtcgtaggttaggggggaaatggggcgggcggaaggagagttaggtcggaaagaggttatcggagggcgggaagtaggggcgggttaggagtagatgggatggaggcggcggggtcgttatgtttaatagcgagaagtttaatttggatttaattatcgggcgtttgttggaagtttggtcggggcgagggaggttcgagttcgtcggattatggtttcgtgttcggttcggaaagtggcgcggggcgggttttcggggttagtttagattgggcggggacgggtagcgaggtttcgtggtcgtagttgttttttcgcggacgcgtttgagaggttcggggttagtttcgacgcgcggagtagttttttttttttttcgggttgggggcgtacgggttgtttgggtttttggggcgagggagaaattcgggaagttcggtttaggaaggggttttgcgttgtgaggtttttggtggtagttttttgcgtacgatagtcgtttttcgaggcgttgagggtagttgggggttttttttgggaggtttgaggtcgcggtttcgggaggtttagtagtaatagttgtttgtgggtaaggaggggtcgaggaggtttaggcgttttcggaggtatttatggggttattcgtgtcgtttattttttttttgttagggtttagggttttgatattttattgcgttttagt

SEQ ID NO: 350 - DNA, 5493 bp, Artificial Sequence
  chemically treated genomic DNA (Homo sapiens)
attggggcgtaatggggtgttaggattttggattttgataggaggagggtgggcgatacgggtggttttatggatattttcgggggcgtttaggttttttcggtttttttttgtttataggtagttgttgttgttgagtttttcgggatcgcggttttaagttttttaggggaagtttttagttatttttagcgtttcgggaggcgattgtcgtgcgtagggggttgttattaaaaattttatagcgtaggatttttttttggatcgggtttttcgggtttttttttcgttttaagagtttaggtaattcgtgcgtttttagttcgggagagggggggagttgtttcgcgcgtcggagttggtttcggattttttaggcgcgttcgcgggggggtagttgcggttacggaatttcgttgttcgttttcgtttagtttaagttggtttcgggggttcgtttcgcgttatttttcgggtcgggtacggggttatggttcggcggattcgggtttttttcgtttcgattaagtttttagtaagcgttcgatgattgagtttaggttgagtttttcgttgttggatatggcggtttcgtcgtttttattttatttgtttttggttcgtttttgtttttcgtttttcggtagttttttttcggtttggtttttttttcgttcgttttattttttttttggtttgcggtttttttttttagtttttcggggtttttttttttttttttttcgtttttttttcgtttttttttggattttatggtcgggggtttataagatttagaaggagaaggagatttaagaaattttagatagatatatagtgtaatatatatagaacgatatgtaagggaggaaggaaagatgatagaaggagagaaaaaagagataaagaataaataaaaatagtagaggaaaagaaggcgaaaatagaaaaaaaaaagtataagaaagaaaaattatttaaaaaatgataaaaaatagattaaaggaagatttaaaggagaggataaagaaagaatatcgaagaatataagaaaaagtagaaaataaatataaggataaagaatataatttgaagaaaataaaagataagaagaaagaaaagtgaaaaaaaaaataataaatataaataaagagaaaaggaaaagagagtagaagatagatttaaaaaaaaaaaacgaaaaaaggatagagaagaataaagacgaaaaatagataaaaaaaaaattaagataaataaaaaagaattaaaaaaagtataataaataaaaaaagagataatttagaataaaattgaagaataaaattagaaagagaaaaaaaaagaaaagagatagaaaaaaaaaatagtaaaagaaaaaaaaaaatataggtgattataaaaaaggaagaaattaagacggataaataaaaaaaagatagaagatagagatatattaaagttaatatggtgaaattttatttttttaaaaatataaaaagttagttgggtatgatgggagttttttgtaattttagttatttgggaggttgaggtaggagaatcgtttgaatttgggaagtggagtttaggcgatagtgcgagattgttttaaaaaaaaaaaaaaaaaaaagaagagtagacgataaatgaattttaatttttgttggaattttgagttggtgttttatatgttagtaattttagaattggaagtgggtttgtcgtggtggtttaggtttgtaattttagtattttgggaggttaaggcgggatggttttttgcgtttagtttgggtaatatagcgaaattttgttttaataaaaaatataaaaattagttgggtatggtggtgcgcgtttgtagttttagttattgtggaggttgacgtaggaggattttttgagattaggaggtggaggttgtagtgagtttagatcgtgttattatattttagtttgggtgatagagtaagattttgttttaagaaataaatatgaagtttaggcgtagtggtttatgtttgtaattttagtattttgggaggttgaggtggatggattatttgaggttaagagtttgattaatgtggtaaaaattttgtttttattaaaaatataaaaattagtcgggtatggtggtgtttgtttgtagtttttgttatttggggggttgaggtaggagaattatttgaattcgggaggtggaggttgtagtgagttgagatcgcgttattgtattttagtttgggtaatagagcgagattttgttttaaaagaaataaataaaagaattggaggtggttcggtttttgcgtttaatagttttgggttttttatattagtataggaatttaagtttgtagttattggggttatggggaaggtgggaggagtttatagtttaggggtattggggtaggtaggaagagttttagagaggaaggggtgatattttttatttttgggaggggtttttagcggttgttaaagttgtgtgaggaggaggaggaagtgagaggaggaggtgaggtgttgcgggaggtgagttgggttggtggggataggggtagggtttggggttgggttttcggatagaggtttggtttttttgttagggtagggtttaatttttgtttttataaaagaggagatatagggggtttggtgagatattttgaaattttttttttttgatttcgtagttaggttttaggttggtcgggagtggttttttatattggttttttttattttttttgtttgtggtatcgaaggtttcgggtattatggtttaggttttgggggaggatttggtgtagtttttcgagttgtaggatgattttagttttttggggttcgatttagagtttagcgggtatggtttatatcgataggtcgatcggtatggatttagtgggggtagtttagtagagttagggtaagggggtagggtgagggttggcggaatgttgggatagaggatagggggttgagggttgaattttggagggaggtcgggagggtttggtggtagggattgggagggggatttagttagtagtatttttttgtaggtgttaggtggaattttaaggtgggaagggttcggggaggtttttgtacgttttttatttttagttttcgagggtttgtatttattattggggtagaatattttttttttttgaatttttggtttaggaattttagatttaaattatagaatttatattttttttttttttttttttttaagttatagatagaaatataagtttagatatagatagaaatttgttttaggttatatagattagatatagatttagatttaaatttaggattttgggtttttagtttagggttttttttagttagttttttttatgaattgtttgtgtttttgttttgggtgatagttaattagttttttttttaatatatatttatttatttttttagttttttgtttttgtttacgtcggagttatatttttttttgttttcgtgataagtattggtagtttttgggttataggttattttatagggtttttagagatttttagggttaggagttgggtttatttgggtagtttggagggtggtagtgtgggttttgggtaatagttgtttagcgtttggatatttgtgttatgtatttttaggtcgggttatttatttgtagattttattcgttaacgggagatgaagtgggtggagatgatttcgtattgggagaaaattatgtttcggcggtataagaaggtgaggggggtaggggttttatttggtttttatggtttatttttttttgttttagtttatattttggtaaaatgtatttattttgtgttttagtattttcggtttttgttttttgttatttaaagtgggtttttgtttgttgatgagttgtgtttggggtttgttagtaggagttatggaggttgtttagtggagtttttggttttatttataggtaaagatgtagtgtcggaaaggtatttcgtttgttttgcgcgttcgatgttggtttttgttgtgtggggtttatgtgtgttagaagaatagttttggtatttattaggtgagggagtgggtaggggttttaatttttttatttagagttttttattatattgaatttttatatttatttttttggttatttataggagttggtagaggtttttggagatttatagtggatggagattattggtagggatttgtatcgttaattttttttgtacgagatgtttgtgtcgttttagggttacgggtacgaggtcggtgatgtttagggatttttagttttataagttttaggtgttttagtttattttttttagtttagttttatagttttgtattttaggggatttaggaaggtttagggaggttgaggtttgggtagaggtttttagagggtggagaagggggtgtttgtaggattggttttttatggggtttttcggtataggtagtaggggtttttgtaggtgtttaaggtttatattttgtatcgatcggagtagggttattgttaggtttaggggttcgtggttgttgtgttgtttatgtatttgtttttagaggtgagtgattttgattttgttttgggaattttagtgatttaggtttagggaattttatttttaggaattgtggttttagaaatttgtaatttttgatttttggattttgttttagtgatttaggtttttatgattgttagttttagtgatttttaagtttaatgattttgattttaggaatttgggatttttgattttagttttgattttagttatttaggaatttggatgttattattttgattttacgatttttgattttgaatttggggattgcgattttaattttaaagatttagaaatttaggatttgaattttgggatatttttaatttttggttagtgaattttaattttgtgatttttaaatttaatattatgagttttgtgatttttaatattttaaattttttagtagattttgttttgggtagaggagggggtttttgggaagggtttttaggaattgcgtaggttaggagtggttttgagtgtaggtttttgtggtgtttaggtttttttttttattttttttttttgttttgtttttttttttacggttttttttttggtgagtatttataggtttgtgttttgttttttttttaggaggttttttggtgtttggtgtagatttgtgaggtttatttttttgggtattacgggttttatatggtgagaggttgatatgggggttggaggaaggaggggtaggggttcggtgagtgggtgggggtttggggattgagggaggttgagtttgggttttgggggtggcggtgttggtttgttgatggacgtggttataggaggttgtgcggttggacgtcgaggtgtttatggttttgttgcggcggttgttttcgtacgtgtataagtatttgtagtaggt

SEQ ID NO: 351 - DNA, 6052 bp, Artificial Sequence
  chemically treated genomic DNA (Homo sapiens)
aaaatatatgtatatatagaaatttagatttttatgtatgtttgtatattataaatatttttaagataagtatacggtttcgaaagataattatataattataattatttttaaagaaaatgtgtatgtttataggtttataaagttattttttattatttgtgaaatggtttttaaagatatatattatatatatagtaaaatagaataattgttttaaatttaattgagggttggataaggtagtttatatttgtaatttcggtattttgagaggtcgaggtaggaggattatttaaggttaggagtttgagattagtttcgttaatatggtgaaattttgtttttattaaaaataaaaaattagttgggtgtggtggtaggtatttgtaattttagttattcgggaggttgaggtaggagaattatttgaattcgggaggtagaggttgtagtgagttgagaacgtgttattgttttttaatttgggtaatagagtgagattttgttttaaaaaaaaaaaaaaaaagaaagaaagaaaaaatagtaataatagggttgggtatagtggtttatatttgtaattttagtacgttgggaggttaaggtaggtggattatttgaggtcgggagtttaagattagtttgattaatatggagaaatttcgtttttattaaaaatataaaattggttaggtatggtggtttatgtttgtaattttagttatttgggaggttgaggtaggagatttatttgaatttaagaggtagaggatttgtgatgagtcgagattgagtcgttgtattttagtttgggtaataagagcgaaatttcgttttaaaaaaaaaaaaaaaaaaaaaaaattacgtatatataaaaattatttaggtatggtggtaggtatttgtaattttagttatttagtaggttgaggtaggagaattatttgaatttgggaggtggaggttttagtgagtcgagattgcgttattgtacgttagtttgggtgatagagtaagattttgttttaaaaaaattataattataattataaaataaatttgatatatttttttataattttgagaaaaattttttagagttttataaaatatattaatgttaaatatttatagtttgtaatatgaatgtagaaaatagatggattaatttggttaataagtttaaatattttttgaggtgggtttgttgtaaaatttaatgaatagatgattgttttttgattataaaattggttgtcgtttttgaaaattaaaaaaataataatataaagttataagatataagtatataattttagtaaaattattttaaaattgttagatgtttgtattgtattatgttaatagttacgtggaggatatttatgaaagtatgacgttttagttatttgggaggttgaggcgggagaatggtatgaatttaggaggtagagttggtagtgagttaagatcgcgttattgtattttagtttgggtaatagagtaagattttgttttataaaaaaaaaaagaaagaaagaaagaaaaaagaaagtatattagaattgaattcggttgggtacggtggtttatatttgtaattttagtattttgggaggtcgaggtaggcggattataaggttaggagatggggattagtttggttaagatggtaaaattttatttttattaaaaatataaaaattagttgggcgtggtggtgggtgtttgtaattttagttattagggaggttgaggtacgaatatcgtttgaatttaagaggtagaggttgtagtttttagaggttttttttgtgttatggagttttattttgtcgtttaggttggagtgtagttgtacgatttttagtttattgtaatttttatttttcgggtttaagcgattttttttgttttagttttcgtagtaattagttattacgtttagtttgatatgataattttaaagaattttttagtgtttatttggattgttaagttttatttgaaatttttgttagataatttaacgtgaaatttaagagtaattttagatttttatattttgaaaaatattttagtaaagtttggtaagtaagtggttttattgttttataattttatagtgtagaaataggttttttgtttattaaaagtatatagtttgggttgggtacggtggtttatatttgtaattttggtattttgggcgtcgaggtagtggattatttgaggtcgggagttcgagattagtttgattaatatggagaaattttatttgtattaaaagtataaaattagttggatgtggtggcgtatgtttgtaattttaggtattcgggaggttgaggtaggataattgtttgaattcgggagacggaggttgtagtgagtcgagatcgtgttattgtattttagtttgggtaataagagtgaaatttcgtttttaaataaataaatatatagtttggaatatatgtttaattttaatgttattagttaatattatttaaagatttatttagattttagttatgtaataaattttgagtatttgttgtgtgttggttatggttggtgtatattatagagtaggattgttgttgtgggtttatattttattagtgggtttagatgagtcggtagaagtaaattggtaagtataaaataaatataagtatggttgagggggtgtggtgggtagtgatttgatgttgagagagttttttaaaaagtatgtagtaagtttgtgaggggagaggagatggatgagagaagtttttttttagggtgaagtgtggtatttgagtagaggtttgaagtttgagtagttgtatgataattgatggaagatggttttggtagtttttatttttatataatttttttttttttgttaattttagggaatttaagaagtttttagattatgtttgttgatgttttttataagtattattttttaaatataaatttttattttttttggaaaagttgtatttaattttaatattaagagtaatttttaaggttaggtgtagtggtttatgtttgtaatttcggtatttggggggttagagtaagaggattatttgagtttggaaggttgaggttgtagtaagttatgattatgttattgtattttagtttgggtattaggtttttttaaaaaagaagaatttttaaattgttgttagtattgtttttgttttttattgatttttgaatgtttttatttagaggataaatagaaatagaataaaggagttaaaataaatataaattatgtttaaaggtgatagtggagagcgtttaaagttaaaaaaaaaaattgttagtaatattgattttatttgatggtattgattaattgtaatagtatttataaaataaagtttgttattatatggtatgagttatttatcgtagaaatatttttttagaagatttagagttagttatttatttataagtgtgggattttgttgaaaaaaatttacgttgaaattagaagtttttaggattttttttttagttaaaaataaagttttttgttgggtagtttgtttaagtttttggttaatttatggtgaaattattaatgattggtattttttggttaatgaagtggggattttattttttatcgggagtattttttgagttttaattttgtatgtgtgtttagagagaaaaaaaattatttacgaaaaaaatatttttgttgtttagttgttgttttattaaatatgtatttgttttatattttttttcgaagattattattattatgtttttattgttttttgttgtataatatttttattagaacgagatttagttatatattttggggtttaaaagtgaattttataattgtaaaattaaggtatatttagtagtttcgtgttattttatttgtatttaatgattatttagtttgttataattggaattaaaataaaattttttttttataattatttacgtgttgataagtgagttttgttgtaaagtttgtattttgatagaagaattttaagtgttttggtggtgtggatgttttatgttgtgtaatgattttttttttttattattattttatttgtttaaattattagggaacgtgtttttttatagtatagtatatgattgatattttttgttttatatagatatgagtataaatataaatgtaggtttagaaaatgtatggtaaaataagtataatgaattaatatttttttaatgaaatgaaaataatattaatatttttttataggtaaattaaattagagatttttaggaggagatatttatggttttttggaaaatattgatgggggagggttttgagtatttttaattttgtttttttttttttttttttttttttttttttttttttttttgagacggagtttcgttgtgttgttaggttggagtgtagtggcgcgattttggtttattgtaattttcgtttttcgggtgtaggcgatttttttgagtagttgggattataggtgtacgttatgttggcgaggatggtttggattttttgattttattatgatttgttcgttttatttttttaaagtgttgggattataagcgtgagttattgtatttggtttgtagttttgtttttaatagtattcgtatagataggatggttttttttttggaatattataaaagaagttttatttggtatcgaagatgtaattaagttttgtttaagattttaagattttaattagatattaaaattatgtttattataagtgttttgaaaatgaagttatttagaaagttagttaaattatgtttttgtttttttatttaaatttcgtattgtattttgtattttggttttattggattaattgcgattttttttttgtagtgagagggtttaagtttggtaagaatgtttagttttaggagaatgaaattagaggattgtgtttaaagtttcgtgaaattttttttagttagtttattttattagaatttgaagtattatttaaaatatgtggtaagtttggggtatataggttattttttgttatatgattgattaattgagttaaggatatgttgatgattttgtattagttagtagaatgattattttgtttgcgaatagtttggaattatttaaaagtaagttaaatagtagttttagaataaatatttttaatggatttagtttatttagatgtattttagatttttaaaaaaaatattttgttgaaggaataaatattgtaaaagaaaaaaatgaaattaagaatggagagttgaggaaaggtttgaattatatggatgtataggaatatgtttaagtttaaagtaatattggttatagttaaaaatagaatttttttgatattgattttgtggttttgttttttgtataatagaagtaaataatttgtgttttaatttaatgtaaaattaaattttattcgtttgagtaatatatttttatagtatatttgtattgataaaattttgtgtttatgtttttaaaagtaaaatgttttttggtattatttagtagggagaaattgaaagttaaatgtattgatgggtggggggtgggggtggtgtgtatgtgtgtatgtgtttttgtttagatggggttaagatttattagaagtgtagtagttttgttgatatagtatttagagattgagttgttagagatttgatattgattagttagtttgaaagggatattatgttatttggtaagaatgtatgtttggatataataattttttttatagaataaatttttaatagttgaattttatgtgaggttttggatatatatatatatttaaaatttttgttaagtttagttgaattaaatatgatataagattggaaattatttagtgttggttgtttagttaaatttttattattagaggttaatgttattgtataatgaatatttaaagaatgtttttttaaagttttgttagtggattgagttttaagtatgggaatattgtgtaataaaatttttgtttttagg

SEQ ID NO: 352 - DNA, 6052 bp, Artificial Sequence
  chemically treated genomic DNA (Homo sapiens)
tttggaagtaagaattttgttatatagtgtttttatatttaaagtttaatttattaataaagttttggaaagatattttttaaatatttattgtataatggtattgatttttagtaatgagagtttaattgggtagttaatattaagtaatttttaattttatattatatttagtttaattgagtttaataaaaattttaagtatatgtgtatgtttagaattttatataaaatttaattattaagaatttattttgtggaaagggttattatgtttaagtatgtatttttgttaagtaatatggtattttttttaggttgattgattaatattagatttttgatagtttagtttttgggtattgtgttagtagaattgttgtatttttagtgagttttggttttatttgaataaaagtatatatatatatatatattatttttattttttatttattaatgtatttagtttttaatttttttttgttagataatgttaaagaatattttatttttaaaaatatgaatataaagttttattaatgtaaatatgttataagaatatattatttaaacgaataaagtttggttttatattgagttaaaatatagattatttgtttttattatgtagaaaatagaattataaaattagtattaaggaagttttatttttagttataattagtgttgttttaaatttaaatatatttttatatatttatgtagtttagatttttttttagttttttatttttagttttattttttttttttgtaatgtttatttttttagtaaaatattttttttaaaaatttgaagtatatttaagtaaattaagtttattagaggtatttattttaaagttattatttaatttatttttaagtagttttaagttattcgtaaataggataattattttgttagttaatataaggttattaatatatttttgatttagttaattaattatgtaataaaagataatttgtgtgttttaaatttattatatattttgagtggtgttttaagttttagtaggataggttgattgagaaagattttacgagattttaagtatagttttttgattttatttttttgaagttggatatttttattaggtttggatttttttattgtaagagaaaaatcgtaattagtttaatgaagttaaaatataaaatataatacgagatttagataaaggggtaaaaatatggtttaattagttttttgagtggttttatttttaggatatttataataaatatggttttaatgtttaattagaattttaaaattttagataagatttaattgtattttcgatattaagtaagattttttttatagtattttaaaaaaggagttattttgtttgtgcgaatgttgttagaaataggattgtaggttagatgtaatggtttacgtttgtaattttagtattttgggagggtgaggcgggtagattatgatgaggttaagagatttagattattttcgttaatatggcgtgtatttgtaattttagttatttaggagaatcgtttgtattcgggaggcggaggttgtagtgagttaagatcgcgttattgtattttagtttggtaatatagcgagatttcgttttaaaaaaaaaaaagaaaaggaaagaaaagaaaagaaaagaaataggattggaaatatttagaatttttttttattagtgttttttagaggattatgggtatttttttttgaggatttttgatttaatttatttatgaaaaaatgttagtgttgtttttattttattaagaaaatgttggtttattgtatttattttgttatgtattttttgggtttgtatttgtgtttatgtttatgtttatatagggtaaaggatgttagttatgtgttatattgtaagaaagtacgttttttaataatttgaatagataagataataatgggagaaagaaattattgtatagtatggggtatttatattattagagtatttagggtttttttattaaagtataaattttgtaatagaatttatttgttagtacgtaggtagttgtgggaaagaaattttgttttggttttagttgtaatagattggatagttattagatatagataaagtagtacggaattgttaaatgtattttaattttatagttataaagtttatttttggattttaaaatatgtaattaagtttcgttttgataaaaatattatataataagaagtaataaaagtatagtaataatagttttcgaggaaagatatgaaatagatgtatatttaataaaatagtaattgagtaataaaaatgtttttttcgtaagtaattttttttttttttagatatatatatagagttagaatttaggaaatattttcggtgaaagatgggatttttattttattggttagaaaatgttaattattagtgattttattataagttaattaaaaatttgggtagattgtttagtaggaagttttatttttggttaggaaggaaattttagaagtttttggttttaacgtgaattttttttagtagagttttatatttatgaatgaatagttgattttaagttttttaggagagtatttttgcgataaatagtttatattatataatggtaagttttgttttatgaatgttattgtagttagttaatgttattagatgaaattaatgttgttaataatttttttttttggttttggacgttttttattgttatttttgaatatagtttatatttgttttaatttttttattttgtttttgtttgttttttgggtggggatatttagagattagtaaaaagtaaaagtaatattaataataatttaaaaattttttttttttgaagaagtttggtgtttaggttggagtgtagtggtatgattatggtttattgtagttttaattttttaggtttaagtgatttttttgttttggttttttaagtgtcgggattataggtatgagttattgtatttggttttaaaaattatttttaatattaagattagatgtagtttttttagagaaaataaagatttgtatttaaagaatggtgtttatgaaaaatattaataaatatggtttgaaagttttttaaattttttaaaattagtagaaagaaaaaagttatataaagatagaaattgttaaaattattttttattagttattatataattgtttagattttaggtttttgtttagatattatattttattttggagaaaagttttttttatttattttttttttttttataagtttgttgtatgttttttgaaaggtttttttaatattaggttattatttattatatttttttaattatgtttgtatttgttttatatttgttagtttgtttttgtcggtttatttggatttattggtagaatgtaaatttatagtagtagttttgttttgtagtgtatattagttatagttagtatatagtaggtgtttaaaatttgttgtatgattgaaatttggataagtttttaagtagtgttgattggtggtattagaattaaatatatattttagattatatatttatttatttagagacggagttttatttttgttgtttaggttggagtgtaatggtacgatttcggtttattgtaattttcgtttttcgggtttaagtaattattttgttttagtttttcgagtatttgggattataggtatgcgttattatatttagttaattttatatttttagtatagatggggtttttttatattggttaggttggtttcgaattttcgattttaggtgatttattgtttcggcgtttaaagtgttaggattataggtgtgagttatcgtgtttagtttagattatatatttttgatgagtaaaaagtttgtttttgtattataaaattataaaataatagggttatttgtttattaggttttattggagtattttttaaagtatgaaaatttagaattatttttaaattttacgttgaattgtttaatagagattttaaatggggtttggtagtttaagtgaatattggagagttttttaaagttgttatattaggttgggcgtggtggttggttattgcggaggttgaggtagaagaaatcgtttgaattcgggaggtggaggttgtagtgagttgagaatcgtgtaattgtattttagtttgggcgatagggtgggattttataatataaaaagagtttttagaaattgtaatttttgttttttgggtttaagcgatgttcgtgttttagtttttttagtagttgggattataggtatttattattacgtttagttaatttttgtatttttagtggagatggggttttattattttggttaggttggtttttattttttgattttgtgattcgtttatttcggttttttaaagtgttgggattataggtgtgagttatcgtgtttagtcggatttaattttaatatgtttttttttttttttttttttttttttttttttttgtgagatagagttttgttttgttgtttaggttagagtgtagtggcgcgattttggtttattgttagttttgttttttgggtttatgttattttttcgttttagttttttaagtagttgggacgttatgtttttataaatattttttacgtaattgttaatatagtatagtataagtatttgatagttttaaaataattttgttaagattgtgtgtttatgttttgtaattttgtattattatttttttaatttttaggggcgatagttagttttgtagttaaaaagtagttatttatttattgaattttatagtaaatttattttaaagagtatttgaatttgttgattagattaatttatttattttttgtatttatattataaattgtaagtatttgatattgatatattttgtgaagttttggaaaattttttttaaagttatggaaaaatgtgttagatttattttataattatgattatggtttttttgagatagagttttgttttgttatttaggttggcgtgtagtggcgtaatttcggtttattgaaatttttattttttagatttaagtgatttttttgttttagtttattgagtagttgggattataggtgtttgttattatgtttggataatttttgtgtgtgcgtggttttttttttttttttttttttttgagacggagtttcgtttttgttgtttaggttggagtgtaacggtttaatttcggtttattataaattttttgttttttgggtttaagtgagttttttgttttagttttttaagtagttgggattataggtatgggttattatgtttggttagttttgtatttttagtagagacggggtttttttatgttggttaggttggttttgaattttcgattttaggtgatttatttgttttggttttttaacgtgttgggattataggtgtgagttattgtgtttagttttattattattattttttttttttttttttttttttttttttttgaggtagagttttattttgttgtttaggttggaaagtagtggtacgtttttagtttattgtaatttttgtttttcgggtttaagtgatttttttgttttagtttttcgagtagttgagattataggtatttgttattatatttagttaattttttatttttagtagagatagggttttattatgttggcgaggttggttttaaatttttgattttaaatgatttttttgtttcggttttttaaaatgtcgagattataggtgtgagttgttttgtttagtttttagttagatttaaagtaattattttgttttgttatatgtatagtgtatatttttagagattattttataggtaataggaagtaattttatagatttgtgggtatgtatattttttttaaaagtaattatgattgtgtagttgtttttcgaaatcgtatatttattttaaaagtgtttataatatgtagatatatataggaatttaggtttttatatatatatgtgtttt

SEQ ID NO: 353 - DNA, 9923 bp, Artificial Sequence
  chemically treated genomic DNA (Homo sapiens)
aatttttttgttttagttttttaagtagttgggattataggtatgtattattatatttaaattttattttttatttgaatggatgaaagttttttgtatgttttattatattatggaggtttatgatattttgattatagaatatggattaataggtcgggtgaggtggtttacgtttgttttttatagtttatttttattaaatttatgtagataggaaaatttatttattttgtatttagagcggggtagttagtagagtaggtagaaggaaaggagtttaaggtttttgttagtataatattaatagtcgattttttgcgtgtgttgttatatagattttatttttttttttatatttattgttttgtataagatatttagttagtggtaggttatatttttttttttatggtaatagggttttattttgttatttaggttggagtatagtggtacgatttttatttattgtagtttttatcgttttaggtttaagtgattttttattttagtttttcgagtaattgtagtcgggattataggtatacgttattatatttagttaattttttttttgagacggagtttcggttttgttgtttaggttagagtgtaatggtacgattttagtttattgtaattttcgttttttaggtttaaagaattttttgttttagttttttaagtagttgagattataggtgtgtgttattatatttagttaatgttgtatttttagtagagacggggttttattttgttggttaggttggtttcgaatttttggttttaagtgagttatttgtttacgttttttaaagtgttgggattataggtatgagttattgcgtttggattaattttttattttttgtagagatagagtttttttgtgttgtttaggttggttttaaatttttggtttgaagagatttttaggttttagttttttaaagtgttgggattataggtataagttattatgttttattgtatttttaattattaataattatttttatttataataaatgaattggatggtgttaatttttattttttagattttatatttttttttagttattgtttagttttttttattttttttttttttttgaggtagttttttattttgtatattatatatttttgaaaatttgaaagataaatatatgaaaattattagatttgtatattataaggggttgggcgtagtggtttatggttgtaattttagtattttgggaggttaagtgggtggattgtttgaggttaggagtttgagattagtttggttaatatggtgaaatttcgtttttattaaaaatataaaaattagttgggtatggtggtgtgtgtttgtagttttagttattcgggaggttgaggtaggagaatggcgtgaagtcgggagatagagtttgtagtgagtcgagattgcgttattgtattttagtttgggtgatagagtgagatttcgttttaaaaaaataaataatagaaaaaaataaataaaatagtatgtaagaatgtattaattaggaattatggtttgtgtttataattttagttatggggaggttgaggtagaaggattatttgaatttaggaatttgaggttatgattgtgttattgtattttaagtgggtgatagagtaagattttgttttttaaaatatataaaattaaaagaaaaaaaaattaaataaagaatgttttaggtatttagatttatatggatgaaagtttttatttggtagtgttattatatgttttttggttttttatgttttagaggaattaagggttagatagatggtatatgggtttaaagaggatatgtttgttttttttagtagtaggtaagttttaggttttaggattatagtgttttttgaggttttggagatgggtaaaaatattagttattttgtttggattagtatttatatagatataaatatttatttataaataaatgttttttttttttaagttttttttttagtaggtaatagcgggtatgtagtttattatgtgttatttttgaatagttattagttatcgaaagttaaatattatttttgtaagatcgttaggattttatatttgttatttttatttttttattttttgatgtttatttttttatttattaaaaacggttttttattttttgaaaaaattatttataattttttaattgtagaattaagatgatgttgttttttttttgatattattgattaattgttttttattttttttgttattatgatattagttgtttttttataattttgattatttttagaaattatttttaattttttttttttcgttatcgttttttttataatataatgaattattatattttgttgattttatatatttttatgttttatttttttttttttatttttacggttattgttttgtaatattgtttttttgggtatttgggtaagggatataggttttgtgttttttttttttttttttagatggagttttgttttgtcgtttaggttggaatgtaatggtgcgatttcggtttattgtaaattttatttttcgggtttaatggattattttgttttagttttttgagtagttgggattataggtatttatcgttatgtttggttaatttttgtatttttgtagagacggggttttgttatgttggttaggttggttttgaatttttgattttaggtgattcgttttttttagttttttaaagtgttgggattataggcgtgagttattgcgtttgattttttttttttttaagattaaatattttattttatatagaattttaaaaatttattttttgtatatgaataagttttttagtggtgatttatgagattttgatgtagttattatttaagtagtgtatattgtatttaatgtgtagtatttttttttttttttgagacggagttttgttttgtcgtttaggttggagtgtagtggtatgatttaggtttattgtaatttttgtttttcgggtttacgttatttttttgttttagtttttcgggtagttgggattataggcgtttgttattacgttcggttatttttttgtattattttagtagagacggggttttatcgtgttatttaggatggtttcgattttttgatttcgtgattcgttcgtttcggttttttaaagtgttgggattacgggcgtgagttatcgcgttcggtttttattgtattatttttatgtttttgtattataggtttttttttttttttttgtagacggagttttgttttgtcgtttaggttggagcgtagtggtatgatttcggtttattgtaatttttatttatcggggttaagtaatttttttgttttagttttttatcgggtttaagtgatttttttgttttagtttttcgagtagttgggattataggcgcgcgttattacgtttcgttaatttttgtattttttatagaggtatggttttattatgttggtcgggatggtttcgattttttgattcgtgattcgtttatttcggttttttaaagtgttgggattataggcgtgagttatcgtattttgtttaatttttgtatttttagtagaaatggggttttattattatggttaggttggttttaaatttttgatttcgtgatttgtttattttggttttttaaagtgttgggattataggcgtgagttatcgagtttggttataggtttattttttttgtcgttattgttgttgttttgagatagagttttgttttgtcgtttaggttggagtgtagtggtgtgatttcggtttattgtaattttcgtttttcgggtttaagtgatttttttgttttagtttttcgagtagttgggattataggcgtgtattattatatttagttaatttttgtatttttaatagagacggggtttcgttatgttggttaggttggtttcgaatttttgattttaggtgatttttttgttttagttttttaaagtgttgggattataggcgtgagatatcgtgtttgtttggtttatatttttttttaattttttgtttatatatatttgtgatttattagattgcgaattttttgtgggtataaattgagttttatttattagaatacggatttgagtagggtggtaagtaagggatggattttttgagatagttaataatgaagttgtttttttattgcgtttttaattgtttaaatttagttggttttttaattttagtatatttgtagtagtaacggggattttttttttaaagttgtattaagttagggattttttatttatttcgtttaggttttagttttgttaggttttttttttgtttttttgtaatttttgtttagggaggcgggtgttttggaaggtttttgggagttttttttattaattttgtatttgtaattagggttattttattttagtgaagaaaggtgtttttcgtattagggttttttttttttaatttcgattggatagggtagtagagcgggtaaagtgtgagagtttttagaaggaaagagtagggttttaagcgtcgcgaagaatggtcgaggtcgacgtatagtagacgttggagtgtagtttttttagttaagtttgggtttttttttattttcgtttttttttttaagttcgatttattttagggcgggattatttattttagttaattttggaagtcgaattttggcggtttgtattatttttttttaataagaaaaaaaggaagtagtttggttttaatgattaattcgaggaggcggcgtttggttgttaggtagttttgtaggagttcgggttaattggaggcgtaggtatcgttcgattcgggcgtagcgcgtaggcggtggcgaagagacgtcgagcgggtcgagtgcggtcgagtaaagtcggagtcggagcggggtcgtaggagacgggtcgggttcggacgggtcgagatgttttataaattgaaaaaggagaaggtgagcgtggtttttttttttttatcgtcgttttggagtttgcgcggagttttgggaggggtcggagttaggttcgggatagttttagattgattttttcgtttagttttcgtaggatttttggggttagtttttcgttttcgcggttggtagtatttttagtttgtgtcgtagttaggatagtttttttattttgtttcggagagattttttttatatatatttttttttttttttttttttttttattttcggtttagggtaattttttttttttagatttgttttatttttaggttattgttttgttttttttgttttttttattatttttggtttcgattttttttcggtttgggtagttttttatttgaaattgtatttttttttagaattgttttttcgtttcgttttgagtagttttttgttttttttttttattcgtttgggatagtcgtttcgtagttttttacggttttttttttttttatgttaagtttttgatttagaatagcgttgtttttttttttttttatttaaatttggtttaggtttttttttttagttttttttttatatataaatttgtaagtaggattgagtttttttgttgatggaattttataacgttggtgttggaagggatttttgagcgtatgtagtgtaatttttaatggtatagatgaggagattgaggtttcgatagggtaagggatttgtttaaggttatatagtttgttggaggtttagttgtaatattaggttttttgatttaaaggttttttttgtattaaagtttttttaattgttatttaagtgtattttagattagttattttttttaatttgagtaggttttttatttttatttttaattttaggataatttttgtatttttttttttttttttttttttcgtattagtgttggatttttgttttttttaagttatattatttttaaattgggaatttgtttttattgttagattattgtttttttttagtttgtaggttagttatttttgaatatttatgtttttattatgatgttttgatataggttatttttttttttttttttttttttgagatggaattttgtttttgttgtttaggttggagtgtaatggcgcgatttcggtttattataatttttgttttttagttttaagcgatttttttgttttagttttttaagtagttggaattataggtatgcgttattatattcggttaattttgtatttttagtagagacggggtttttttatgttgattaggttggttttgaatttttgattttaggtgatttgattttttcggttttttaaagtgttgggattataggtgtgagttatcgtgtttggtttataggttagtttttaatgttgtttttttttattttttttatttatttcggtgttgtttttttttgttttttattcgtgtttttttttattttttgttttttgttgttgttgaggtttgatttagaggtgtggtttttttgaggtatagatttatatataggatgttaggatattagttttagttttttttagtttttttttttttggggttggttttttttggtgggggttggttttggtttggtgttttggttatttgttcgatgattttagaggtatattgtttttatttgttttttgattggttgggttattgggttgttatttttgatttttttaattaaatttttttttttggggttgttttgtatttgttaggtagttttgattttgagttgtttttttaattttttagggtttgaggttttaagtatagggttggtgatggtgtattagatagtgagttttttgggagtagtgagttggatagggttttgtgttttatttaggttttgtttttggggagtgggtatgcggaggtggtttgggtagtttagtcgtagataatgtatatagaaattagttataataggggttaagggaaatggaattcggggaaagttggtgaggtttttatttatttgtaatttttagtttgttggattagatattgttttatttatagaaagtaatagtttattagattgtgaagaagataaattgttagtgagatttgttaggattatgggtgtaaacgtttggttgggaaagggtgttggaagtaacggggtgtatggagttaggtataatttttatttttttataaggtttttttgtttttgatttttagttgtatttggttttttttaatggttggtaggttttaaggggtaggggggttgttagtgtgattgaggtttgtttggatggttgtgggtggaggatttttattgtttatttatgatttgtttttttttttttggttattttttatagttttttttttaaagtttttttgagtttttagttaggagtgaattttttttttttttttggatttgtagaatatttagtaggttatttatggtttttttgtgtttggttttggatgggaattaattgtggataagatttttttttttttttgagataataattaagttttattttggtttgataatttttttttatacggtaagtacgtgtttagtggataggtgttaagataattttttggagggattcgtattttttttttttttttatgtttttttttgggatttattttttttatttttttgagtagggtgtttttgtttttttcgattttttttttgtttataataatagtaataatattgattagtattacggtttttatgtgttttaatattgtgttgagggaagagggtattatgattgttattatttaatagatgaggaaattgaggtttagagaggttagttaatttgtttgtgattatatagttagtaagagttgggtttaaaatatagggttgagtttaaatatgtttttttaatttttgtgttatatagtatttgattattgagttgggttgaaatgtgtgtgttttatttgttttgtaggagttagggagtaagggtggtaggtttggtttttttatgtttatttatatttatatattaaggtagttggattttttttaggtttattttttgaaagatacgtttgaggtattatgttgagtgttgtagggtgggtggaggggtataaaaaagaataagtagtttatggtttaatagattggagatgtatgaagatgggttagttttgtttaaggggtttatgtttggggtgtgtgtagatattttaatgttgtgttttgtttgtattttgttttcggtttatttttttttattttatgtttttagttattgataagggttagtgtggttagttgggttagtatatagtaggagcgtgtttaggttaaagaaggaattttttttttttattgtatggagttgttttatattatatttttttttttttttatttttaagaagttttttttttattttagtttatatagagtttttttttttttgaaatttttttgtttttatagttataataattcgatttaatattttttattgaaggggtttggttgttattgaattgtataattttagagttggaagtgatttttaagattttttagtttttattaaaggtttgaattttttttgtaatatgttttataggaggttattaagtttttgtttgaatgtttttaggggttggggagttttcggttttattaggtggttagttttagtgtaattgttttatgataaaatttttttttgtttggagttttaggtggtttgtaattttagtttattgttttcgtgtttttggtttatatggataagttgtatttaaggtatttaagttgtatttttatttgtttaagatttattttgtttttttattttttatgattttttttttttattgttaattattttagtttttgtagttgttggttttgggatatgtttttgaatttatttttagtatgggttgtatttttttttaagaaatattaggatttgttatggttttttttaagtttgatgtttatgattgaattagattttttaggatagttttgttagtgttaagtagtttgtataggttttttaataagatggaaggttatatgagttgtatatggatgatttgtgttgagtttgtagttagatttaaatttttaagttttttttatattttttttattttgtttttgtgtagttgttttttttggttcgaagtataggaagagatgttgggtaggttagggttttgagttagttgttaggtttttaaaggagattttagattagtgtttattttttgtaatagtttagggttttatttttatttttgttttagtgtttgttaattgaggtgtttttggtattttgagtgggatagttttgtatttgttagtatttttgggttttattgattaaatgttgagtagtatttttttgtttgtgcgttatttgtgatatttaaaaattgttttttagtttttttaggtggttgtgaggggagagtggtgattttttgtattttagtatgaaagttttcggtatatttttgattattttagttagaaattagtgagtagttgttttttgatgttttttttttaagtttttttattttggttttgatttgagtaaaggtttttttaggtttaatttttgtattagtttgatgaggtgaaagatggagtatttttacgttgaattagtgtgtgtttggggtgattttttaattagattttaaattttttggaggggttgaatttttttttgcgtagatttttttatttattttagtttcgtataaggtagattttaattgattgatttaattggatagaggatatttgtaataaagatttaagggagttagataagatttttttttttttttggtatttgttaattttatttttattttttttttttagg

SEQ ID NO: 354 - DNA, 9923 bp, Artificial Sequence
  chemically treated genomic DNA (Homo sapiens)
tttgaaaggaaaagatgaaagtaaagttagtagatgttaggagaagggagaggttttatttggtttttttagatttttgttgtaaatattttttgtttagttgaattaattaattagaatttattttgtgcggagttggggtgggtggagggatttacgtagaaggagatttagtttttttaaagagtttagaatttggttaggaagttattttaaatatatattaatttagcgtgagaatgttttattttttattttattaggttggtgtagaggttgggtttgggagggtttttgtttaggttagaattagggtgaggaggtttaaagaaaaagtattagggaatagttgtttattggtttttggttaaagtggttaaaggtgtgtcggaggtttttatgttggagtgtagggagttattattttttttttatagttatttggaaagattgggaggtaatttttggatgttataaatagcgtatagataagagggtgttatttagtatttaattagtaaggtttaggaatgttaataggtatagaattgttttatttaaaatgttaagagtattttagttgataagtattaagatagggatgggggtaaaattttgaattgttataaagagtgagtattagtttgaagttttttttgggaatttggtagttggtttagagttttggtttgtttagtatttttttttatgtttcgagttaaaaaaagtaattgtatagggataggatagggaaaatgtgaaaaagatttggggatttaggtttgattgtaagtttaatataaattatttatgtgtagtttatgtgattttttattttgttaaaagatttgtgtagattgtttggtattgatagggttattttggaggatttggtttagttatgagtattaggtttgggaggggttatgataaattttagtgttttttagagggaaatgtaatttatattgggagtggatttaaaggtatgttttaagattaatagttgtaggaattgggatagttaataatggaagggaggagttatgagggatggagaagtaagatggattttaaataaatgaagatgtaatttggatgttttggatgtaatttgtttatatggattagaggtacgagagtaatgggttgaagttgtaagttatttgaagttttaaataaggaagaattttattatggagtaattgtattaaaattggttatttagtgaagtcgaaagttttttaatttttgagaatatttaagtaggggtttggtgattttttgtaaggtatgttgtaaaagaaatttaagtttttaatgaggattggaggattttggaaattatttttagttttgagattgtgtaatttaatagtagttaagtttttttagtgagaagtgttaaatcgagttattgtgattatgggggtaaaaggattttagggagaagagagttttgtgtgggttggagtagggggaaggttttttggaggtggggaggaagaaaggtgtggtgtagagtagttttatgtagtagggggaaggagttttttttttggtttgagtacgtttttgttgtatattaatttagttggttatattgatttttattagtggttgagagtatggggtggagagaaataggtcgggggtagggtgtaggtaggatataatattgaggtgtttgtatatattttagatatgaattttttgaataaagttgatttatttttatatatttttaatttattagattataagttgtttatttttttttgtatttttttatttattttatagtatttagtatgatgttttagacgtattttttaaagaatgagtttaagagagatttagttgttttagtgtgtgggtgtgagtgggtatggaggaattaggtttattatttttgttttttggtttttgtagaataggtgaagtatatatattttagtttagtttagtagttaaatgttgtgtagtatagaggttaaaagaatatgtttggatttagttttgtgttttgggtttaatttttattggttgtgtaattataggtaagttaattagtttttttgagttttagtttttttatttattagatgatgataattataatattttttttttttagtatagtgttaaggtatatgaaaatcgtagtgttggttaatgttattattattattatgaataagaaaaaaatcggagggggtaggggtattttatttaggaaaataaaagaggtaagttttagaggagaatatgaaggaagaggagagatgcgaatttttttaagagattattttagtatttatttattaagtacgtatttatcgtgtgaaaaggagttgttaaattaaaatgaaatttagttattattttaaaggggaagaaaagttttgtttataattaatttttatttaaggttaaatataaaaggattataagtggtttattaagtgttttgtaaatttagaaaagaaaggagagtttatttttgattgagggtttagaaaggttttagagaggaagttgtgaaagatggttaggagagaggggataggttatagatgagtaataaagattttttatttatagttatttagataaattttagttatattggtaatttttttgttttttagagtttgttaattattgaagaaggttaaatgtaattgaaaattaagagtagaaaaattttatagggaggtgagagttatgtttggttttatgtatttcgttatttttaatatttttttttaattaaacgtttatatttatggttttagtaaattttattggtaatttgttttttttataatttagtaggttattgttttttgtggatgggatagtatttagtttaatagattaaaaattataaatgggtggggattttattagtttttttcgaattttattttttttagtttttgttgtggttgatttttgtgtgtattgtttacgattgagttatttaaattattttcgtatgtttattttttaaggatagggtttgggtggggtataaaattttgtttagtttattatttttaggaggtttattatttagtatattattattaattttgtatttagaattttaggttttgaaaggttaaggggataatttagaattagagttgtttggtaaatatagaatagttttaggagaaaaagtttgattgaaaaggttagagatggtagtttagtaatttagttaattagagggtaaatgaaagtaatatatttttggggttatcgagtaggtggttagaatattaggttagagttaatttttattaaaaagggttagttttaggagaggagaagttgggggaggttggaattggtattttagtattttatgtgtgagtttgtattttaaaggaattatatttttgagttagattttagtaatagtaggaaatagagggtagaaaaaggtacggatgaggagtaggggaaggtagtatcgaggtagatgaggaaggtgaaagaaggtaatattaagaattggtttgtgggttaggtacggtggtttatatttgtaattttagtattttgggaggtcgagggggttagattatttgaggttaggagtttaagattagtttgattaatatggagaaatttcgtttttattaaaaatataaaattagtcggatgtggtggcgtatgtttgtaattttagttatttgggaggttgaggtaggagaatcgtttgaagttagaaggtagaggttgtggtgagtcgagatcgcgttattgtattttagtttgggtaataagagtaaaattttattttaaaaaaaaaaaaaaaaaaagaaatggtttgtgttaggatattatgataaagatatgggtgtttaggggtggttggtttgtaggttaagaaggaataataatttgatagtgaggataaatttttaatttgaagatggtgtagtttaggaaaggtagaaatttagtattggtgcgaaaagaaaaaaaaaaaggaaaaatgtaaaggttattttaggattaagaataagggtgaggagtttatttagattaggaaaggtgattggtttaggatgtatttgggtgatagttaggagggttttgatataaaagaggtttttaagttaggagatttgatattgtagttgggtttttagtaggttgtgtgattttggataagttttttgttttgtcggggttttagtttttttatttgtattattagggattgtattgtatgcgtttagaggttttttttagtattaacgttgtgaggttttattaatagaagggtttagttttgtttataagtttgtgtgtgaaggaagaattagagggaggggtttaggttagatttgggtggaggagagagaaagtagcgttgttttaggttaggggtttggtatggaaagagaaggggtcgtaggggattgcggggcggttgttttaggcgggtaggaagaggagataaggggttgtttagggcggggcgagggggtaattttggaggaaggtgtagttttagatgaggggttgtttaaatcgaagggggatcggggttaggggtgatgggggggatagaaaaagtaggatagtgatttgggaatggggtagatttggaagaaggaggttattttgggtcgggggtaagagaagggaagaagggagggaggtgtatgtggggggagttttttcggggtaaggtgggggagttgttttagttgcggtataagttgggggtgttgttagtcgcgggggcggagggttggttttaggagttttgcgggggttggacgggagggttagtttggggttgtttcgggtttggtttcggttttttttagagtttcgcgtaggttttaaggcggcggtgggggaaaaagggttacgtttattttttttttttttagtttatagggtatttcggttcgttcggattcggttcgttttttgcggtttcgtttcggtttcggttttgttcggtcgtattcggttcgttcggcgttttttcgttatcgtttgcgcgttgcgttcgggtcgagcggtgtttgcgtttttaattggttcgaatttttataaaattgtttgataattaggcgtcgttttttcggattggttattggagttaagttgtttttttttttttttattggaaagaaatagtataaatcgttagggttcggtttttagaattggttgaagtgggtggtttcgttttaaagtgggtcgagtttagagaaggaggcggggataaggggaaatttaagtttggttaggagggttgtattttagcgtttgttgtgcgtcggtttcggttatttttcgcggcgtttggagttttgttttttttttttaaaggtttttatattttgttcgttttgttattttgtttagtcggaattggaggaaggaagttttaatacggagggtatttttttttattggggtaaagtagttttaattgtagatgtaaaattgatggagggagtttttaaggattttttaagatattcgtttttttagataggggttgtagaggagtaaaggggaagtttggtagggttaggatttgggcgaaatgagtggagaatttttggtttggtgtaattttaggaagagggttttcgttgttattgtaagtgtattgggattggggaattagttagatttgagtagttgggaacgtagtggaaaagtaattttattgttgattgttttaggaaatttattttttatttgttattttgtttaagttcgtgttttaatgggtaagatttagtttatgtttataaagagttcgtagtttggtgaattatagatgtgtataaataaaggattaagagagaatgtaaattaggtaggtacggtgttttacgtttgtaattttaatattttgggaggttgaggtaggaggattatttgaggttagaggttcgagattagtttggttaatatggcgaaatttcgtttttattaaaaatataaaaattagttgggtgtggtggtgtacgtttgtaattttagttattcgggaggttgaggtaggagaattatttgaattcgggagacggaggttgtagtgagtcgagattatattattgtattttagtttgggcgatagagtaagattttgttttaaaatagtaataatgacgataaaaagaataaatttgtggttaggttcggtggtttacgtttgtagttttaatattttgggagattaaagtgggtagattacgaggttaggagtttgagattagtttgattatagtggtgaaattttatttttattaaaaatataaaaattagatagggtgcggtggtttacgtttgtaattttagtattttgggaggtcgaggtgggcggattacgagttaagagatcgaggttatttcggttaatatggtgaaattatgtttttatgaaaaatataaaaattagcggggcgtggtggcgcgcgtttgtagttttagttattcgggagattgaagtaggagaattatttgaattcggtaggaggttgaggtaggagaattatttgatttcggtaggtggaggttgtagtgagtcgagattatgttattgcgttttagtttgggcgatagagtaagatttcgtttataaaaaaaaaagaagaaatttgtgatgtaaaggtatgagaatgatataatggaggtcgggcgcggtggtttacgttcgtaattttagtattttaggaggtcgaggcgggcggattacgaggttaggagatcgagattattttggataatacgatgaaatttcgtttttattaaaataatataaaaaaatagtcgggcgtggtggtaggcgtttgtagttttagttattcgggaggttgaggtaggagaatggcgtgaattcgggaggtagaggttgtagtgagtttagattatgttattgtattttagtttgggcgatagagtaagatttcgttttaaaaaaaaaaaaaaatattatatattgggtatagtatatattgtttgggtgatggttgtattaaaattttataaattattattaaagaatttatttatgtataaaaaataaatttttaaaattttatataaaataaaatatttagttttaaaaaaaaaaaaggttaggcgtagtggtttacgtttgtaattttagtattttgggagattgaggagggcggattatttgaggttaggagtttaggattagtttggttaatatggtaaaatttcgtttttataaaaatataaaaattagttaggtatgacggtgggtgtttgtaattttagttatttaggaggttgaggtaggataatttattgaattcgggaggtggagtttgtagtgagtcgagatcgtattattgtattttagtttgggcgatagggtaagattttatttgaaaaaaaaaaaaaaaaatataaaatttgtgttttttatttaggtatttaggagagtaatgttataagatagtggtcgtggggatggagaagagaggatggagtatgaaaatgtgtagaattaataggatatggtgatttattgtattgtgggggggacggtaacggaaagggaagagttgaggatgatttttggaagtgattagagttgtaggaggataattggtgttataatggtaaaggaaataaaagataattggttagtagtgttagagaaagaatagtattattttgattttgtaattagaagattatgggtgatttttttagagagtggaagatcgtttttagtgagtggaagagtgagtattaagaggtgaggaagtgaagatggtaaatgtagggttttggcgattttatagaagtagtatttggttttcggtgattaatgattatttaagggtaatatatagtggattatatgttcgttgttatttgttgggagaaaagtttgggagaaaaggatatttatttgtgggtgggtatttgtgtttgtatgagtgttgatttaggtaagataattgatgtttttatttatttttaaggttttaaggagtattatagttttgaggtttagagtttgtttgttattgaggaaagtaggtatattttttttaggtttatgtattatttatttagtttttggtttttttgggatataggggattaagaaatatatagtagtattattaaatgggaatttttatttatgtgaatttaggtatttagaatattttttatttagttttttttttttttaattttatatattttaagagataaggttttgttttgttatttatttggagtgtagtggtataattatagttttaaatttttgggtttaagtgatttttttgttttagtttttttatagttgggattatagatataagttatggtttttggttagtatatttttgtatgttattttatttatttttttttattatttatttttttgagacggaattttattttgttatttaggttggagtgtagtggcgtagtttcggtttattgtaagttttgtttttcggttttacgttatttttttgttttagtttttcgagtagttgggattataggtatatattattatatttagttaatttttgtatttttagtagagacggggttttattatgttggttaggttggttttaaatttttggttttaagtagtttatttatttggttttttaaagtgttgggattatagttatgagttattgcgtttagttttttataatatgtaaatttaatagtttttatatatttgttttttaaatttttaggaatgtataatgtataaaatagaagattgttttaagaagaaaggagagatggagaaagttgagtagtagttgaaagagaatgtaaggtttagaaaatggagattggtattatttaatttatttattgtaagtgaaaataattgttaataattggaaatgtagtgggatatgatggtttatgtttgtagttttagtattttgggaggttgaggtttgaggatttttttagattaggagtttgagattagtttaggtaatatagagaaattttgtttttataaaaaataaaaaattagtttaggcgtagtggtttatgtttgtaattttagtattttgggaggcgtaagtaggtggtttatttgaagttaggagttcgagattagtttgattaatagggtgaaatttcgtttttattgaaaatataatattagttgggtgtggtggtatatatttgtaattttagttatttgggaggttggggtaggagattttttgaatttgggaagcggagattgtagtgagttgagatcgtgttattgtattttggtttgggtaataagatcgaaatttcgttttaaaaaaaaaattggttgggtatggtggcgtgtgtttgtggtttcggttatagttattcgggaggttgaggtgggagattatttgagtttgggacggtagaagttgtaatgaatggggatcgtgttattgtattttaatttgggtgatagagtaggattttgttgttataaaaaaggaaatgtggtttattattagttgagtgttttgtatagaatagtggatgtgaagagaaggatggaatttatataatagtatacgtaggaagtcgattgttggtgttatgttgatagaagttttgaatttttttttttttgtttgttttgttggttgtttcgttttagatataaagtgaatgggtttttttatttgtatggatttggtgggggtgggttgtagaaaataggcgtgagttattttattcggtttattgatttatattttgtaattaaaatattataagtttttataatgtagtggggtatataaaaggtttttatttatttaggtgaaaggtgaagtttgggtgtggtggtgtatgtttgtaattttagttatttgggaggttgaggtaggagaatt

SEQ ID NO: 355 - DNA, 5261 bp, Artificial Sequence
  chemically treated genomic DNA (Homo sapiens)
ttattatcgtttggttaatttttgtgttttttagtagaggtggagttttattatattggttaggttagtttttaatttttgattttatatggtttttttattttagttttttatagtgttgagatgataggcgtgagttattgcgtttagttaatgtttatttttttaatttatattattgagttttttgtttttttatttttttttttttttttttttgagatagtttcgtttttgttgtttaggatggagtgtaatggtacggtttttgtttattgtaatttttttttttcgggtttaagtgatttttttgttttagtttttatagtagttgggattataggcgtaagttattatattcggttaattttttatttttagtagagacgaggtttcgttatgttggttaggttggtttcgaatttttgattttaggtaattcgtttgttttagttttttaaagtgttgggatgataggcgtgattgcgtttggtttgtttttttattttaataggagatggaattagagagggttttttagttttttttgggttgtggaattttataaaaattttgaattgtttttaatatttttttggtaatgtagatatagaagttaagttgtagagtttaggttttaggtgaagaattgtgtttttgtagttgttgttttttatgaagttagaatgagcgtgttatgttattattttgagtttttttttaatgatttaggttggggtgtatagtaattatattagttttttggatttagagaatttttgtagtgatttaggtagaacggagttatttagaattttttaggagtataaaaatttggttttaggtcgggtgcggtggttgacgtttataattttattattttgggagattaaggtgggcggattatgaggttaggagtttgagattagtttggataatatagtgaaattttgtgtttattaaaaatataaaaattagtcgggtatagtggcgtatatttgtagttttaattatttgggaggcggaggtaggagaattgtttgaatttaggaggtagaggtaatggtgagtcgagattgtgttattgtattttagtttaggtaatagagttagatttcgttttaaaaaataaaaataaaatttggttttttttttttttgtttattttgtttttattgtttatatttaaaataaaattaattattattatttttttaaattttggattaatttgtttgtttagtttatttaattttgggaaataaatattgaagtaaagtaaataaaaattgaaggtcggtagaagatggtaaagggggtattttaaaagggaatatgtgtagagttttagagattggagagattgtttaaagattaatagttttagtcgggtacggtggtttataattgtaattttagtattttgggaggttaagttcggcggattacgaggttaggagtttaagattagtttagttaatgtggtgaaattttcgtttttattaataatataaaaattagttgggtatggtggcgcgcgtttgtagttttagttattcgggagattgaggtaagaagagtcgtttgaatttaggaggtggaggttgcgttgagttaagattgtgttattatattttattttgggtaatagagcgagatttcgttttaaaaaaaaaaaaataaaaaagattagagaagtagagaacgttatatattagtttgggggatttggatttttatttatttatttattttgagacgaagtttcgttttgtagtttaggtcggagggtagtggtacgatttgggtttattgtaatttttgtttttcgggtttaaatcgattattttgttttagtttttttagagtagttgggattataggtgtacgttattgtattcggttaattttttgtatttttagtagagacggggttttattatgttggttaggttggttttgaatttttaattttaggtaattcgtttgttttggttttttaaagtgttaagattataggcgtgagttattatgtttggtttggattttttaattttatgataatttgagttttcgaaagagtaattgatagaaaaaaaaattatatttgaggatataattttttgagtttaaatttttttttttttgagatagtattttattttgttgtttaagttggagtgcggtgttataatttcggtttattgtaattttcgttttttgggtttaagcgatttttttgttttagttttttaggtagttgggattataagcgtattattaaatttaattattattattttttattttttaggatagatagggttttattatgttggttaggttgattttgaatttttgattttaggtgatttatttgtttcggttgtttaaagtgttgggattataggtgtgagttattatatatagttaggtttaaattttttttttttttttttttgagatagagtttcgttttgttgtttaggttggagtttagtgacgtaattttggttcgttgtacgttttgttttttgggtttacgttatttttttgttttagttttttaagtagttgggattataggcgttcgttattacgtttagttatttttttgtatttttagtagagacggggttttattatgttagttaggatggtttcgattttttgatttcgtgattcgttcgttttagttttttaaagtgttgggattataggcgttagttatcgcgtttagtttaagttttttattttttttgtttatagattgggttttattttgttgtttagtttggttttgaatttttgggtttaagtgattcgtttcggttttttaaagtgttgggattatatgtttgagttattatatttagtttcggatttaaattttagtgtaatatttttaatttattgttatataagtaatgaataagttatttaatttttttgagttagttttttttttttaaaaaaggtataaaatttaatagaaagtaattaagaagttaggtacggtggtttaagttggtaattttagtatttttcgaggtcgaggagagtggattatttgaggttaggagttcgagattagtttgattaaaatggtgaaatttcgtttttattaaaaatgtaaaaattagttgggcgtggtgacgggtgtttgtaattttagttatttaggtggttgaggtaggagaattgtttgaatttaggaggcggaggttgcggtttgttaaaatcgttttattgtattttcgtttgggcgataagagtaaggaaggttttgttttaaaaaaataaataaatgaaaatataaaaattagttaggcgtcgtggtatatgtttgtaattttagttatttgggaggttgaggtaggagaatcgtttgaatttgggaggcggaggttgtagtgagtcgagattgtgttattgtattttagtcggggtgaaaaagtaagatttcgttttaaaaaaaaaaaaaaaaaaaaaaaaagaggtcgggtacggtggtatacgtttgtggtatagtattttgggaggttgaggtaggtggattatgaggttaggagatcgagattattttggttaatacggtgaaatttcgtttttattaaaaaatataaaaaaattagtcgggtttggtggcgggcgtttgtagttttagttatttaggaggtagaggtaagagaatggcgtgaattcgggaggcggagtttgtagtgagtcgagatggcgttattggattgtagtttgggcgatagagcgagagagtgagattttgttttaaaaagaaaaacggaagtaattaagaaatgttaagagtgttattttggaattagagaagttatgttgattgaggtataggtttggcgtgggaaaagtggattttaatttgttaatttttgaagttgtttacggtaaatatttttttgacggtataggaagagatttgaatttggttttttttatttattgaataagtattaataagtatttatatatgtttatcgtgttaggttttattttaattattggggttgtaatatttaaaaagataaagttggattttttaaggattgtggtggggaaggttgataaaataagtaataaaaatgtgtaatattaaaaaaaaagtgtaatgttaaaaaaaaaaagtgtaataaagttataaagtttagttttagttcggtttgtttttttagttgaaatgggggatggtcgggcgcggtggtttacgtttgtaattttagtattttgggaggttcgaggcgggaagatagtttgtgtttaggagttcgaggttatagtgatttatgatagttttatcgattttagtttgagcgatagagcgagattttgtttttaatttagaaaaaagaaagttgtggtcgggcgcggtggtttacgtttgtaattttagtattttgggaggtcgaagggtggtggtgggtgggggcgcggattatttgaggtagggagttagagattagtttgattaatatggagaaatttcgtttttattaaaaatataaaattagtttagcgtggtagcgtatgtttgtaattttagttatttaggaggttgaggtaggagaattgttggaattcgggaggcggaagttgcggtgagtcgagttcgtgttattgtatttcggtttgggtaatagtaaaatttcgttttaaaaaaagaaaagatagttgtttaaatatttttatgaaatgatatgggaggggattggtttagggtttttaatagtttttatatcgtttagcggtagagtttataaaattgttattggtcgttatcgggtttttttatttttttttcgattttaggttggagaagtggtgtaggggtcgttgcgaaaggagaggagcgtgtatgacgttatattcggcgcgcggcggaattggttttttttgttttcgcggcggggtcggaagtaggagcggcggcggcggcggcggcggcggtcgaaagcggagtgaaagagggaggtagggagtcggagagtcggaatcggagtcgtagcggcggtaatagtgcgagatttttttaagttatcgtttttagcgcgggatcgcggggttcgacgggagttagcgggggtgcggttaggtcgttggacgtcggggggttttggggtcgatgtgaggggaggcgggggtgggggagtcgggtcggttttagaatcgagttgttcgtttcgagtttcggacggatattgattcgcgggttcgttttggttttttttagg

SEQ ID NO: 356 - DNA, 5261 bp, Artificial Sequence
  chemically treated genomic DNA (Homo sapiens)
tttgggaaaggttaagacgagttcgcggattagtgttcgttcggggttcggagcggataattcgattttagagtcggttcggtttttttattttcgtttttttttatatcggttttaggatttttcggcgtttaacggtttggtcgtattttcgttaattttcgtcgaatttcgcggtttcgcgttaaggacggtgatttagaggagtttcgtattattatcgtcgttgcgatttcggtttcggtttttcggttttttgttttttttttttatttcgttttcgatcgtcgtcgtcgtcgtcgtcgtcgtttttattttcggtttcgtcgcggaagtaaaggaggttagtttcgtcgcgcgtcggatgtggcgttatatacgttttttttttttcgtagcgatttttgtattatttttttagtttgagatcgggaaggaggtggaggaattcggtggcggttagtggtagttttgtgggttttgtcgttgggcgatgtggaggttattagaaattttagattagtttttttttatattattttataaaaatgtttaaataattgttttttttttttttgagacggagttttgttgttgtttaggtcggggtgtaatggtacgaattcggtttatcgtaattttcgtttttcgggttttagtaatttttttgttttagttttttgagtagttgggattataggtatgcgttattacgttgggttaattttgtatttttaatagagacggggtttttttatgttggttaggttggtttttaattttttattttaggtgattcgcgtttttatttattattatttttcggttttttaaagtgttgggattataggcgtgagttatcgcgttcggttataatttttttttttttaaattagagatagggtttcgttttatcgtttaggttggagtcggtggggttattataggttattgtgatttcgaatttttgggtataagttattttttcgtttcgggttttttaaagtgttgggattataggcgtgagttatcgcgttcggttattttttattttagttagggaaataagtcgagttggggttaggttttgtaattttattatattttttttttttaatattatattttttttttaatgttatatatttttgttatttgttttgttagttttttttattatagtttttggaggatttaattttgtttttttaaatattgtagttttagtggttagaataaggtttggtacggtaggtatatatagatatttgttaatatttgtttaatggatgagggaagttaagtttagatttttttttgtgtcgttagagaaatatttgtcgtggataattttagaagttaatagattggagtttattttttttacgttaagtttgtgttttagttagtatgatttttttgattttaaaatggtatttttgatattttttagttgttttcgtttttttttttgagatagagttttattttttcgttttgtcgtttaggttgtagtttagtggcgttatttcggtttattgtaagtttcgtttttcgggtttacgttatttttttgtttttgttttttgaatagttgggattataggcgttcgttattaggttcggttaatttttttgtattttttagtggagacggggttttatcgtgttagttaggatggtttcgattttttgattttatgatttatttgttttagttttttaaagtgttgtattataggcgtgtattatcgtgttcggtttttttttttttttttttttttttttttgagacggagttttgtttttttatttcgattggagtgtagtggtataatttcggtttattgtaattttcgttttttaggtttaagcgatttttttgttttagttttttaagtagttgggattataggtatgtgttacgacgtttggttaatttttgtatttttatttatttatttttttaagatagagttttttttgtttttgtcgtttaggcgggagtgtagtggagcgattttggtaaatcgtaattttcgttttttgggtttaagtaatttttttgttttagttatttgagtagttgggattataagtattcgttattacgtttagttaatttttgtatttttaatagagacggggttttattattttggttaggttggtttcgaatttttgattttaggtgatttatttttttcggtttcggaaagtgttgggattattagtttgagttatcgtgtttggttttttagttgttttttattaagttttgtgttttttttaagaggaggaaattggtttagaggggttaaataatttgtttattgtttgtataatagtggattggggatgttatattgaaatttgaattcggggttaggtgtggtggtttaagtatgtaattttagtattttgggaggtcgaggcgaattatttaagtttaggagtttaagattaggttgggtaatagagtgagatttagtttataaataaaaagaataagaaatttgggttgggcgcggtggttgacgtttgtaattttagtattttgggaggttgaggcgggcggattacgagattaggagatcgagattattttggttaatatagtgaaatttcgtttttattaaaaatataaaaaaatagttgggcgtggtggcgggcgtttgtagttttagttatttgggaggttgaggtaggagaatggcgtgaatttaggaggtagagcgtgtagcgagttaagattgcgttattggattttagtttgggtaatagagcgagattttgttttaaaaaaaaaaaagaaagaaatttgaatttggttgtgtgtggtggtttatatttgtaattttagtattttgggtagtcgaggtaggtggattatttgaggttaggaatttaagattagtttgattaatatggtgaaattttgtttattttaaaaaataaaaaataataataattaggtttggtgatgcgtttgtagttttagttatttgggaggttgaggtaggagaatcgtttgaatttaggaggcgggggttgtagtgagtcgaaattgtgatatcgtattttagtttggataatagagtgaaatgttgttttaaaaaaaaagaaatttgaatttagaaagttgtgtttttaggtgtagtttttttttttattaattattttttcgggaatttagattattataaaattaagaggtttaggttaggtatggtggtttacgtttgtaattttagtattttgggaggttaaggtaggcggattatttgagattgggggtttaagattagtttggttaatatggtgaaatttcgtttttattaaaaatataaaaaattagtcgggtgtagtagcgtgtatttgtaattttagttattttggagaggttgaggtaggataatcggtttgaattcgggaggtagaggttgtagtgagtttagatcgtgttattgtttttcggtttgggttatagagcgagatttcgttttaaaataaataaataaataaaagtttaaattttttaaattggtatatgacgttttttgtttttttagttttttttatttttttttttttgagacggagtttcgttttgttgtttaggatggagtgtggtggtataattttggtttagcgtaatttttattttttagatttaagcgattttttttgttttagtttttcgagtagttgggattataggcgcgcgttattatgtttagttaatttttgtattattagtggagacgggggttttattatattggttaggttggttttgaatttttgatttcgtgattcgtcggatttagttttttaaagtgttaggattatagttgtgagttatcgtgttcggttgaaattattgatttttaaataatttttttagtttttgagattttgtatatgtttttttttggaatgttttttttgttattttttatcgatttttaatttttatttgttttattttagtgtttgttttttagagttgaatgagttaggtagataaattaatttaaagtttagagggataatagtgattggttttgttttagatgtaagtaataaaagtaaaataagtagaaaagggaaggattaagttttatttttattttttgggacggagtttggttttgttgtttaggttggagtgtagtggtataatttcggtttattattatttttgttttttgggtttaagtaatttttttgttttcgttttttaagtagttgaaattataggtgtgcgttattatgttcggttaatttttgtatttttagtagatataaggttttattatgttgtttaggttggttttaaatttttgattttatgattcgtttattttggttttttaaaatgatgggattataggcgttagttatcgtattcggtttaggattaagtttttatatttttagaaggttttaggtaatttcgttttatttgaattattgtagagattttttaggtttagagagttgatgtagttattgtatattttagtttgggttattggggaaaggtttaaagtaatggtatggtacgtttattttagttttatggaaagtagtagttatagagatatagttttttatttggagtttgagttttatagtttaatttttgtatttgtattattaagggggtattggaaataatttaaggtttttatgggattttatagtttaaaggagattaagaagttttttttaattttattttttgttaaaatgggaaaataggttaggcgtagttacgtttattattttagtattttgggaggttgaggtaggcggattatttgaggttaggagttcgagattagtttggttaatatggcgaaatttcgtttttattaaaaataaaaaattagtcgggtgtggtggtttgcgtttgtaattttagttattgtggaggttgaggtaggagaattatttgaattcgggagggggaggttgtagtgagtagagatcgtgttattgtattttattttgggtaataagagcgaaattgttttaaaaagaaaaaaaaaaaaagatgggaaaatagaaaatttaatagtgtagattaaggagataagtattggttgggcgtagtggtttacgtttattattttagtattatgggaggttgaggtggaggaattatgtgaggttaggagttggagattagtttggttaatgtgatgaaattttatttttattaaaaaatataaagattagttaggcgatagtgg

SEQ ID NO: 357 - DNA, 7341 bp, Artificial Sequence
  chemically treated genomic DNA (Homo sapiens)
atatttaaaaaaaggatttttatttaaatgtttatgttattgattaatttaatatttattgttttttagttttgattttgggaagtatttttgtttttgttttgatatttttattgtattgttgattttttgggtataagtttatttagaattaatttttaatttatttggttgagagttttttaggttttgttttaggggttatttagaagtaaggatattttttttaggaggaatattttgaaaatttagtggttaggttagagtgtttattattttttagatttgtggtttgggaagatttagttatagtagtaaatttacgtgattgggtttaggagtttggttgtttgtttaggttttgtattattaagttttgttataattttttcgatttaggttgtttgagggttaattgtatgtaatttgtaataagttatataggaaattgttaatttatttagttatgttttttttttgtaaaaatatagaaattgttagtatttttttcgggttttgtgttttgtttttcgaataagttataaattttttataggtgagagtagtataggaggagcgatttttttttttggttgtttttttaggagaaaacgttaatggtattttgatgttatataggtttttgttatttatagaaaaaaaaaaaaagatttttttggttattagtaatattagtttggttttattggagagtattagtttggttggattgttgaaaatagttattgataattttatagtttggaatattttgatttttgtttgtagatttaatgagtgttttatagttaatttttatgagagtatttgttgagggaatatatggtattatttatagtttttgttttttaaaagttatttttttattgttttaatttgttttaatcgaagtaataaatattataataaagtatataatatagatgatttttgatgaaaagtaataattttttgttttttttatttttatttttcgttattttttaggggtagtagttttttttgggattttttttttaatattttttggcgattttttttatgttttttgatgaattaggggttaaaagatttttaatttaaggtagtatttattgatttattatgagggatatttatttttttttattttgtgtttttttttaatatttgttatttatattttattttgtaattgtaaataatatatttagtgagtttttttattttattaattatatatcgtattttttaattttttatattattttatttttgtttttgttttttttttttattttatattagatatatttaaaaaatatcgaataatttttatttttattttgttagggttgtttatatttatattttattttgtagttataataaaattgttttttttttgtttatagattggttttaaaattagaaaattgatatatagagtttatagtattgtgattatataaatattgtatattgtttggttaatagtgagttagggttatatttttttttttgggtttagagttataattgttgggttatgtaaagaaaaatgttttttaaattaaagttaaatggagttttttttttgttttttaagtttgtttaaatttatgttatattttaggttgttttatgttaggaggtttttgttttttagaaattgttatgtggggaagaaattttagagaatatttaggcgaagggtagaggttttgatataagttttgcgtttttgattattggttataatgttgggtaagttatgatattgagtttttggttttttatttgtgggtgggaaagatgtttagtttattttataaggttagtaagaggattagtttggatagtataagagaaagaaaggttaagagagggtaaagttttttgggataagtaaataggagtattaataggatttttatttttgagattttgtttgtttttatggggttttgatgaggtttgtttgtatagatagatttatcgtaagattttggaaagaattttttttttgtttttagtttagttattagaatattaattgataataaatgtagataggaaagttttatttgtagagaatatttataaatatagtttggttttatttaatggttgtaaagatttgtttagtattagagttatattttgtttaagggtaagtttattttagcgtgatttaggcgtttttgaagtgatggttaaattaatattttgtgttttattgggaaaaagtttatttttggttggggtagggagtgggtgaggatattatagggtgtggaaatttttaagtattagtattagcgtttttgttgtagtttggatagtattagcgtgtggtatattttatgtttttgttaggatagagcggtttttttatgtttagtttttggttgagtgtgtggatatatttataaaattttttaatacggatttagggaagtagaaaagttttgattatagttattgtatttagaatgtttagtcgtttgttattatataggaggtttttagagatttgtttgtttttgttttttttatttttagttttgagtatggttgttgtttttttttatttttttatttttgttatttttagataaggagattgtttgtttttaatgaaggtagtagagtagtaggtttttttttggtattaatcgatggttttttttttcgtagtgagtattagaagtaggaagtttgttgtaggtatagtttagatagtagtatttagaatttataggtaggaagagatttaaatagtgtgtttttaggtttatttattgtgaggatagaagttataatggtttagagaattggtagtgattgagtttttgttatgagtagttttagaggtgagaagagggttttttttttttttgaggggagtgattttgtgtgtgataggatataaatataaaaagggttttttttttttaaagaggaatttttatttaagtttagggattttttttatcgtatatcgttatgagatttgtttttttttttaatattatattttaatatgtatatatataagtataggtgtaaagttagtaggtatcgttgattgtgatgtttatattgtgatgattgtattatatatgttattttatttatttattaaaaagaattttgttaggtgaggtttttggttatttattttgtatatttgagtattaagattattttgttttatttttggtggtatttggatttgaacgtaggtttgattggagtaatttgttttatatatattgttttgagttatttaattattgtagaaaattagtttttttttgtgtttttaagttatttttagtaattatggtttaattataaaagagaaaaagagatatagagatttattttttaatgataaatttatttttatatataagttttgattatttgattttattaaaggaataaggaatagttgttaaagtataataatagaaattttcgatatttttatttatattatatatagaaattaatttgagatggattatcgataaaatgtgaaagttaaacgtagaaagtttttaggaaaaaacgaaggagaaaagtttttcgggttacgtttaagaaggggtagaagggaatttgttggtgggatgggggaatgttttttattttgatttgggtgatggtaatttgggtatatattttttaaaatttatggaattataaagatttttgtatttttattatatataaattttattttaataatgaattgttagtataataaatagtatttgtttttttttttataaaattattaattatttatttaaatgtatattgagtgtttattttattttaagtgttgggtttaaattaaaaagtaagtagatatggttagaatattaatttagggagttttttaaaaagttggggtaataatttaagtgtgttttatttgatgaatggttaaagtaaatgtggtatatatatataaaggaagagtatttatttttaaaaaagaaggaaattttgttatttgtaataatatggatgaatttggaggatattatgttaaatgaaatacgttagacgtaaaaagttaaatattgtatgaatttatttgtaaaatttaagaaagttgaatttataaaagtagagattagaatgatagttattggtggaaagaagaggaagtgaggaggtgttggttaaaatgtatgttagatgaggaagttttggagatttgaggtatagtgtggtgattatagttaataattacgtattgtgtatttgagatttgttagaagagttgattttaagggtttttattatataaaagatataattacgtgaggtgatagatatgttaattggtttgatgtggtaattattttataatgtattattttaaatatatataatttttatttgttaagtatattttaataaagttggggaaaaattttaaaaatttttaaaagttgaggagatatatattaataataaatgttaaaaagaagttaataggttaggcgcgggtggtttacgtttgtaattttagtattttggtaggttaaggtgggtggattataaggttaggagtttagattagtttggggtgaaattatatttttattaaaaatataaaaaattagttgggtgtggtggtatatatttgtaattttagttattcgggaggttgaggtaggagaatcgttttaattggggaaggaaaggttttagtgagtcgagattatgttattgtattttagtttggataatagagcgagatttcgtttcgaaaaaaaaaaaaaaaagaagttaataattatatgattatgaaatatataaatgtaaaaaaatacgttattaaaataatatttaagataataataatagtaaattaaggagatttttttatagatggggaaatttcgtttaaaatatcgttagttcggattagttcgaacggtttaggacgttgggtatgggttttttcgggcgggtgatgttggtgaggtattaggagatcggcggttattacgttatgaagatttttaataagtagaaggtggtgaagatgaagtaggtcgagtatatattgaacgagaagcgtattttgtaggcgatcgatttttcgtttttcgttaagttttagtttttttttaaggataatttttatttgtatttggtgatggagtacgtgtcgggtggggagatgttttttcgtttatagcgcgtcggaaggtttagcgagttttatgtttgtttttatgtcgtttaggtcgttttggtcgtttagtatttatattcgttcgattttatttatcgcgatttgaagttcgagaatttttttatcgattagtagggttatttgtaggtgacggatttcggtttcgttaagcgcgtgaagggtcgtatttggattttgtgcgggattttagagtatttggttttcgagattattttgagtaaaggttataataaggtcgtggattggtgggttttaggggtgtttatttatgagatggtcgtgggttttttatttttttacgtcgattagtttatttagatttacgagaagatcgtttttgggagggtgcggtttttttttaaatttagttttgattttaagtatttgttgcggagtttgttgtaggtggattttattaagcgtttcggaaattttaggaacggggttggcgatattaagaattataagtggttcgttataattagttggatcgttatttatgagaagaaggtggaagttttttttatttcgaagtatataggttttggggatgttagtaattttgacgattacgaggaggaagagtttcggatttttattaatgagaagtgtgttaaggagttttttgagttttaggggtgtgtttgtgtttttgtgggtttttttttttttttgtttttggtggtttgggggatgggagggttggattgaatagttagagggttttagagttttttgtatttaattttatttttattttattttttagggttgggggagtaggaagtttagatatttggaggaatagaaatattagttgtttttttatttttttttatgtttttttggtttttttgtgtttttttttttttttttttatagggttttttttgttttagtttttttttgtttgttttaaacgagttttttagttttatttaggttaggttttgttgttgtattaagggatacggtgtggaaagaggggtttaaatttaattttagttttgaataggtattatttattaagagaggatgaatgaaaagtatatttattttttggcgtaattttgtttgggaaggagagaggtttagtgttatgtttagtgggttgtttgttagaataaaaaattaaaataaaaaataattaaaattttatttaagttttattagtgttttttttttttttttttttatttttattttttttattttttttattttatcgtgtttttttattttattttaataaatttaggaagtcgattgattttggaaggaggttttggggtttgaattttttttatgaattgttgattttttttttttttttttttaggggtattttttattatttttgtaaaggttttagtttttttaggaagttttattttttttttttttagtagatttttttttatttttgggttttgggagttagaaaagtagttgttttattttttgttaaagaggagttgttttttaaaaagatagagtgggagttttaagtttaagtttttttttatagtagtattttttcgaaattttttaattttatttttagttagattgtgatgtttagtttttttttatgggaaggtagttttgtaaaaggatatggaagaggtttagtttttttatttttattttatcgtttagggtttaaggttagggttgttggggaggggttgtttgttttatttatttagtagtttttgtttttttttattttgggtgtttttttttagtttagttgttagttattttttatttttttttttttgttatttcgtgttgtttttaatttttttttttttttgatatgaagttttattttgttatttaggttggagtgtagtggtataattttagtttattgtaattttcgtttttagggtttaagcgatttttttgttttattttattcgagtagttgggattataggggtttattattattttcggttaattattgtatttttagtagagacgaggttttgttatattggttaggttggttttgaatttttgattttaggtgatttagttgttttggttttttaaagtgttgggattataggagtgagttatcg

SEQ ID NO: 358 - DNA, 7341 bp, Artificial Sequence
  chemically treated genomic DNA (Homo sapiens)
cggtggtttatttttataattttagtattttgggaggttaaggtagttggattatttgaggttaggagtttaaggttagtttggttaatgtggtaaaatttcgtttttattaaaaatataataattagtcggggatggtagtgggtttttgtaattttagttattcgggtagggtgaggtaggagagtcgtttgaattttggaggcggaggttgtagtgagttgagattgtattattgtattttagtttgggtgatagagtgagattttatgttaaaaaaaaaaaaaaattgaaaatagtacggggtggtaggggagaagaggtgaaggatggttgatagttaagttggagaggggtatttaggatgggagaaggtagaagttgttgggtgaataaaataggtagtttttttttagtaattttagttttgaattttgggcgatgaggtgggggtggaggggttgggttttttttatgtttttttgtaggattgtttttttataaggagaggttgggtattataatttggttgagaataaaattaaggagtttcggggaaatgttgttgtgaagaaagatttgggtttggaatttttattttgtttttttgggggataatttttttttggtagggagtagggtagttgtttttttggtttttaaagtttaagggtgaagaaaagtttgttggggaagaagagagtggagttttttaaaagaattgagatttttgtaagagtgatagaggatgtttttggggaggggggagggggaaattagtagtttatgggggaagtttaaattttagagtttttttttaaagttagtcggttttttggatttgttaaaatggaatggggagatacggtaaggtgggaagggtgggaggggtggaagtagaggaaggaggaaaggggatattggtggaatttaaataagattttaattgttttttgttttaattttttattttagtaaatagtttattgaatatggtattaaattttttttttttttaggtaggattacgttaaagggtaggtgtgttttttatttatttttttttagtaagtggtgtttgtttagggttggagttaagtttgagtttttttttttatatcgtgttttttgatataatagtaagatttggtttgaatagagttgagaaattcgtttaaaataggtagaagggggttggggtaagggggattttgtgggaggagaaagagagaagtatagagggattaggaaggtatgggggggggtgagggagtagttggtgtttttgtttttttaaatatttgggttttttgtttttttaattttggagggtggggtgaggatgaaattagatataaggaattttggggttttttggttgtttaatttaatttttttattttttaaattattaaaaataaaaaggaaagaaaatttataggggtataagtatatttttaaaatttagaaaattttttggtatattttttattgatggagattcggagtttttttttttcgtagtcgttaaagttattggtatttttagggtttgtgtatttcgggatgaagggagtttttattttttttttatagatggcgatttagttggttgtggcgaattatttgtggtttttgatgtcgttaatttcgtttttgaggttttcgaagcgtttggtgaggtttatttgtagtaggtttcgtagtagatgtttgaggttagagttgagtttggagggaaatcgtatttttttagagacgattttttcgtagatttggatgggttggtcggcgtagaagggtgggaagtttacggttattttatagatgagtatttttagggtttattagtttacggttttgttgtagtttttgtttaggatgatttcgggggttaggtattttggggtttcgtataaggtttaagtgcggttttttacgcgtttggcgaaatcgaagttcgttatttgtaggtagttttgttggtcgatgaggagattttcgggttttaggtcgcggtggatgaggtcgagcgagtgtaggtattggacggttaggacgatttgggcggtatagaaataggtatggggttcgttaaatttttcgacgcgttgtaggcgggagaatatttttttattcggtacgtattttattattaggtataggtaggagttgtttttaaaggagaattggagtttgacgaggaacggaaagtcgatcgtttgtaggatgcgtttttcgtttagtatgtgttcgatttgttttatttttattattttttgtttgttgaggatttttatggcgtagtggtcgtcggttttttggtgttttattagtattattcgttcgaaggagtttatgtttagcgttttgagtcgttcgaattgattcgagttggcggtgttttgagcggggtttttttatttgtagaggaatttttttggtttgttgttgttgttgttttggatgttattttggtggcgtatttttttgtatttatatattttataattatataattattggttttttttttttttttttttcgagacggagtttcgttttgttgtttaggttggggtatagtggtatggtttcggtttattggaatttttttttttttagttgaagcgatttttttgttttagtttttcgagtagttgggattataggtgtgtattattatatttagttaattttttgtatttttagtagagatgtggttttattttaggttggtttgaatttttgattttgtgatttatttattttggtttgttaaagtgttgggattataggcgtgagttattcgcgtttggtttattggtttttttttaatatttattattaatatatatttttttaatttttgggggtttttagggtttttttttagttttattgaggtatatttaataaataaaaattatatatatttaaggtgatatattgtaaaatgattattatattaagttaattaatatatttattattttacgtggttatattttttgtgtggtgagaatttttaagattaatttttttagtaaattttaagtatataatacgtgattattaattatggttattatattgtgttttagatttttagaatttttttatttggtatatattttggttaatatttttttatttttttttttttttattagtaattattattttagtttttgtttttatgagtttagtttttttagattttataaatgagtttatgtagtgtttggttttttgcgtttggcgtattttatttagtataatgttttttaggtttatttatgttattgtaaatggtagaattttttttttttttaaggatgaatattttttttttgtatatgtatattatatttgttttaattatttattagataaggtatatttaggttgttgttttaattttttgggaagttttttaagttggtgttttgattatgtttgtttattttttggtttaagtttagtatttggaatgaagtaggtatttagtatatatttgaatggatgattggtagttttgtagggagaaaagtagatattgtttattatgttgatagtttattattaaagtaaaatttatatatagtaaaaatgtagaaatttttgtagttttataaattttgaaaaatatgtatttaagttattattatttagattaagataaagaatatttttttattttattagtaagtttttttttgtttttttttagacgtgattcgaagggtttttttttttcgtttttttttggaagttttttacgtttaatttttatattttgtcggtgatttattttaaattaatttttgtatatgatatgagtaggggtgtcgaaggtttttgttgttgtgttttaataattattttttgtttttttgatgaaattaaataattaagatttgtatatagaaatagatttgttattgggaaatggatttttgtattttttttttttttttataattgaattatggttgttggggataatttagaaatataggaaagggttaattttttgtagtgattggatggtttaaggtaatatgtgtaggataggttattttagttagatttacgtttaaatttaaatgttattagaggtgagataagatagttttaatatttaaatgtataaaataaatagttagagattttatttaatagggttttttttaatgagtaaatgaaataatatgtgtaatatagttattatagtataaatattatagttaacgatgtttgttagttttatatttgtgtttgtgtgtgtatatgttggggtatgatattggaaagaaaaataaattttatagcgatatacggtgaaaaaggtttttgaatttggatgagggtttttttttaaaaaggaggaattttttttatatttatattttattatatatagagttattttttttaaagggagaggaggttttttttttatttttgaggttgtttatggtaggagtttagttattgttagttttttgagttattgtggtttttgtttttataatgaataaatttggaaatatattgtttgagtttttttttgtttatgggttttaagtgttgttgtttgagttgtgtttgtagtaggttttttgtttttggtgtttattgcggggaggggagttatcggttgatattaggagagagtttgttgttttgttgtttttattagaaataggtagtttttttgtttaaaaatagtaaaagtgggagagtggggaagagtagtagttatgtttagggttgaaagtgagaaaggtagaaataagtagatttttgaaagttttttgtatggtggtaggcggttaagtattttgggtgtagtgattgtggttaaagtttttttatttttttgggttcgtgttggggggttttgtagatgtgtttatatatttagttaagggttgagtatgaaggagtcgttttgttttggtaggagtatgagatgtgttatacgttgatattgtttaggttgtagtaggagcgttagtgttagtgtttgagaatttttatattttgtagtatttttatttattttttgttttaattaaaggtgagtttttttttagtggggtataaggtgttggtttgattattattttagaagcgtttgggttacgttggaatgggtttgtttttaagtagagtgtggttttggtattaaataagtttttgtagttattaagtgagattaggttgtatttgtgggtgttttttgtaggtagagtttttttgtttatatttgttattagttaatgttttggtagttaaattaagagtagaaaaggaattttttttaaggttttacgataaatttgtttatgtaagtagattttattaaagttttatgaaaataggtagagttttagaggtaagagttttgttgatatttttgtttgtttattttaaagagttttatttttttttggttttttttttttttgtattatttaaattgatttttttgttggttttgtgagatgggttgggtattttttttatttatagatgaggaattaggagtttagtgttataatttgtttagtattgtaattagtaattagagacgtagagtttgtattaaggtttttgtttttcgtttggatattttttgaggttttttttttatatgatagtttttgaagggtaaaaattttttaatatgaagtagtttaaaatgtggtatgaatttaagtaaatttagggggtaaaaaaaagattttatttaattttgatttgggaaatatttttttttgtatgatttagtaattatgattttgaatttagagagggaaatataattttaatttattgttggttaggtagtatataatatttatatagttataatattataaattttatgtgttaattttttaattttagagttaatttgtggataaagagggagtaattttgttatagttgtaagataggatataaatatgaatagttttgataaagtagagataaaagttgttcggtgttttttaagtgtgtttaatataaagtgagaggggaaagtagggataaagatgaaataatgtggggagttaaaggatacggtgtgtggttgatggaataaaaaagtttattaggtatgttatttatagttataaaataaaatataaatagtaaatgttggaagaagatatagggtagaagagggtaaatgttttttatagtgaattaatggatgttattttaggttaagaattttttaatttttgatttattaaaagatatgaagggaatcgttagaaaatattaaaagagaaattttaaaaagggttgttgtttttagggaatggcggagggtgggggtggggagggtaggaggttgttgttttttattagaagttatttgtgttgtgtgttttattatgatgtttattatttcgattaaaataaattgaggtagtgagagaatgatttttaaaagataaaaattgtggatagtattatatgtttttttaataaatgtttttatgagaattagttataaaatatttattaggtttgtaaatagaaattagagtgttttaggttataaaattattaatgattgtttttagtagtttagttaggttaatgttttttaatgaagttaaattaatgttgttgataattaaaagaatttttttttttttttttgtaaatgatagaggtttgtgtggtattagggtgttattaacgtttttttttagagagatagttaggaagaaaaatcgttttttttgtattgtttttatttgtgagaagtttatgatttgttcggagagtagagtatagagttcgggaagagtattggtagtttttgtgtttttataagggaagaatatagttgagtagattaatagttttttgtgtggtttgttgtaaattatatgtaattagtttttagatagtttgaatcgagagaattgtggtaaaatttgatggtgtagaatttaggtaggtagttagatttttaaatttagttacgtaaatttgttgttgtaattggatttttttaagttataagtttgagaaatggtgggtattttgatttgattattagatttttaggatattttttttaagagaggtatttttgtttttaagtgatttttaaaatagaatttaggaaatttttagttagataaattagaaattgattttaaataggtttgtgtttaggaaattaataatgtagtaaaaatattaggataaaagtaagaatattttttaaagttagaattgaggagtaatgaatattaaattgattaatggtatagatatttaaatgaaaattttttttttaaatgt

SEQ ID NO: 359 - DNA, 10647 bp, Artificial Sequence
  chemically treated genomic DNA (Homo sapiens)
gtgagtgtttgtgttttaaaaagttttggattatttaaattgatgggttgaattttttttttttatgtatattttttttttttttaaattggattaaattagaagagttttattgttatttagtttatgtattggagttttagttaatattttgttaaagaaaaaagtaaagatttttgttaaataaaaaaagaattagaaacgtttgaaaattattgttttgggatggtaagaatttggttggtgttttaaggtggtaaaaggtattttgttaggtagtcgttatttttttgtattgagttatttgtatagagtttaatgttatgttagagaaggggatagttcgaagaaaggatattatttttaggttgtgagtttatagttagttttaatttaaatttagtttagcgtggtaggtatagtttttatttttagggtttttagtatgtgtaggaggtaggatttagatatttaagtaaattattagtttaaattttaggtttgggttgtttgcggaaaattttttagaggagtatggttttgagaatggtttggtaggagagtggtaggaagtgggagatgggagaataggtttagtgtaggggaattggtgttttttatttttttttatattttattttttattttgggttttttgtgttatttagggtgttagaagggtttttgtagttagttgtttttttattagagttgagatttagttgtttttattttttttttaaggttgtatttttagtgtttgttagtagtatacgtttttaattggtgtgttgtatattttaggaggtggtagaggaggtgggtggtatgtatttggtttgagggagagttgttttgttatggattatattattttttaggttttatattttgaatagtattagtatgtttaaggtatattagagtatttttataggcgagattaatattttttatagtaagtagtttgtgtattttaagttattttagtatcggcggttgcgtatcgaatggaagaataacgtgtatttggttcgttttcgtatttagggtttggggttttatgtagttaaggatttagaaaagtatataatggttatcgagtatattggtattattattcggaacgaggtggttaatcggcgggagaaaatttacgaagagtaggtatgagttggtagaggggttattgtggtgtatagtttgtatttaattaaggagtaagggtaggattggttataggagagtaggaggaaagttgtggtggggagaagggaaaggtaggagaaatgaagtatatgtaataaaagtttttattgtttgagttttttatttgattttatagttattattgttattttttgatatttttgtttttttttttgtaatttttgtttttttagaatcgaggtatttatatgtttcgaataaataatgaatatgtgattgatgttacgttgatcggcggttttgttaggtgagagatgacgaggaaggagggatttagtggtttttgagagtggtattttgggggatagacgaataaggaattaaaattgttttaagttagttgtttgatatttttgattttgttttattgtttaggtatattaattatttttgtgtttttaattgtgtggtcgaagtcgtgatatttgataaagaggataaaattattattatttttagtcggcgaatttttaaaggagaggaggtgagaggaagtattttgattgagtgataaagtagttttttttttttttattttttttttgttattttttaaatgtggatttttaggttgggtattttagattatattttttttggttttttttttttttgtgggggattagtattgattttgtttttttttttttttagttaatttatgattattagtttgattttgaggacgattagtataagattttttgttattgtggagtttggaattgtcggaaatggatgaattaagaagttttgaggttattaggtaggggagtttttttatttataattttttttttgaaagggatgagggggaagagaggtagtagttagagttaggatttagggttggggttgtcggttgattcggagtttttggagtaggaggttggggtagagggttttaggttaagtttattttgggtattagggataatttttttttttattatcggtttttaggttggtatttttgtttttagttttaggaggggttagatagaagtagttatcgggtattttaggtttgagggggatatgggtcgggaattatttagaagtatttgggaggtagtagggtgggggaagaggatgtgtggtcgggttttatagttttgttgtttttattgattttttcggtttaatttacggttgtaaagagatttgattaagtttgataattttaaaggtcgggttttatatttggttttgtttgtcgggttttgtttttatttttatttttattttttttttttttgatttgtttttgtttttttttttttttttgtgtttttgtttttttatgggttgtgtttttttgttttttattttgataaatgtaatatgaacgggaaagaggcgtttagttgtttaggagggtaagttgggtaagtcgggtaaggagatttcgtatttatatttattttatttaagtgttggattttttgttgttttgaaatgtgagattttttttaagttttttattgttttaatttttttttttattttattgtttttttttgagtgggtggaaggggggtaggaggaggaagaaaaataataataaaaaatttatttttgtttttaattatgggtatgggatggtggttgaggtaaatgatgatgaagattggggatgattggtttttagttgttttaggatttttttttttatttggatatgggggtaggagggagttaaatttaggattaggatattttttttttgtttttttaattttattatgagtttgtttgttttttagtttttggacgggttgggtggggggtagggtgagggttatttttgagtggtatgtttatatttagtgaggtagggtgtggttcggagtttttatttttttttagttattaaattgttgttggtttggtgggaaggggtggtgatgtgggggtgggggagtttagtgttagcgcggggagggtggggggtatttatttatttatatatgggattgtatatagttttgtggggtatgggggagtcggttggaggtgagaatttttttttttttttttatttttcggggagagtaaatgtaaaattattaatttttgtgttttatatattttatataaatatatttattttttttttataaaattagtttataaatggtaggggggtgtggggcggatatatggagttttttttgtgggggggttttttttattattcgatttatcgtttttttttttattttttattttattttttattttttggttgtgattgttgtaagatgggggtatagaggttgggtaatttttattttttgttgtatagttggattatgttataacgtataaaagagagttgattttagggggagttagagggtgatgggttttttgttttttttttttttttttttttgtttaagtttgtgttgtagttgaatttttttttgggggtgggagtaggtaaggggtgggtgaggttttaaatttttttttggtagggaatcgtggggatgaagatgaagtttatatgtagtttttttttaggggttgtgggtaaagggtattttgtaattaatatttttaagaattagatgtttggagtgtaggggtgggtttggtggtggtggacgggcgggtttgttggagggggagtttggtcgttgttgtgattttaggtttgtttttgttttgttttgaatttggggggttgtggattgttgggggtagggagattttttttttttaaagttgtttttttaattgttttaagttgtaaatgtttaagagaataatagtttttatttttataggaatcgttgtaattaaattagatagtaggaagattgggttgttgtttttaaagttatagtttttggatgtttttttttcgagagtagaaggtttaggttatagggagggggagattggttttcgtgagttaggttgtgtttggggtttgggttttgggattgggaaaaggggatggggtagattttgtaagtatatgttaggtattcgatagttttgtagaatttagtgaagaaattttatatagtttttaatttttatataaattataatttagatttaagttataaggttggaattttggttggttttttttttaagtattttgtttgtataattgtattagaattttttattttatttttcgttttcgtgtttgtattttgggttggtttatattcgtatatatttagtttttagtttttttttttatagttttttttttttatttttaggattttttttttttttaaaaaataaatcgttgataagtgtgaatttcgtgaagattttattttgtgttgtgtgtattttgtatagtaaggttggtttttcgtaataacggatgaaatggtttttttttttaaagcgttttttttttttttatttttagcgtttttgtttttggtatgttttgtattagcgattattttgaattgtatatatttatgttgcgagaggtaaagggtaagttttggattttgttttttttaagtttgtttttaaacgataaataaaaaaagaatattttaaatataagcggtttcgttttatgattttcgtcgttagtcggattcgtgcggttcgcgaggattcgggggagggcggttatcgaggttcgttatcgtcggaagggtgggttttttgtttttcgttttagtttggcgattgttatgacgtgggcggaagtggcgtcgtcgtatcggatgtggggcggggtttgttttaagagagttttttaaagcgaggaaattaagtcgggcgttttttgtaatggagacggtgaggagtgtaggagggcggtcgggggcgttgtggagtttaagatatttttttaatttttaggagatcgggagggtcgggtaggggttggcgttggtgtttagtaaataaaaagtagtcgggtgtttgttttatttcgtgattttgttttttcgttttttcgttgggcgtattttttggaattgggtcgcgttttcgtcgttttttcgtacgcggtatttttagtttaagtaggtagtgatttttggttttttttttggggtttacgtatgtcgtggtaatttcgggtttttttttttattggtattttaagtttttttagaggtttgagagcgtagggttgtgagtcggttttgttgggtgaggtacggggcgtttagagggattttcgtttgtaggtagtttttggatttcgatggtttttttgtgatttttgtaattttcggtaggaggatatttgaagatttttatattgcgtttagtgaagttatatttttttaataagatcgagaattgaggtttgtttgaaagaggaaattttgtagtgttagaggtcgatgtgtttttggataattttaggttatggttcgttttgcgattttaagtaggggttttggtatagtttatttttggcgagtaggtattgattaattgtggtagggttttgttatttttttatagatgttgcgggttgtttgttatatgtttgtatttatttttatttttaggagtttttttttagcgttttgtaattttttttatatatttttttttttatagtttttaattatgtgtttttttttaggtagagtaattttttttattttggtttttattatttgttattgtagttacgaaaggattgtaggtttattttgttttggattatatgtttagagtaattttttgttatatcgtttttttgtttatagagaggttgttttttttaggtttttaaaaagaaaatcgattaaagtattaaaatgattcgtagttggttttttaggtaagggagttaattttgattaattaggataattttaaataaaaataaggagtttaattttattaaatttaaaatgatatgttatattttatttatttgtaaatgtattatggtttataaagtatttttatatagattttttaatttagtttttatattttatgtattggattaggttttggggtagaagttaaaaagaggaaaaagaaaatttagttaggtgtggtggtttacgtttgtaatgttagtattttgggaggttaaggtaagtggattgtttgagtttaggagtttagtattagtttgggtaatatgatgaaagtttgtttcgatagaaataaaaatataaaaattatttaggcgtggtggtggtggtgtgtgtttgtagttttagttattcgggaggtttaggtgggaggatcgtttgatttaaagaggtggaggttggagtgagttgagattatgttattgtattttagtttgagtgatatagtgagattttgtttttaaaaaaaaagaaaagaaagaaaatttttgttttgaaaatgtttagtttaattggagtgatggtgagggtaagttagtaatagttgttatttaaaggtagattataataaatgttgttattaatatgaaaatagaggattgtgatagaatagttgagagaaaaattattttggatttaggagagggtattgtaaattgagagaatagtgtgagtaagggtattgaaattggggtatgtagagaattgggggtgagttagcggtatgatgttgttggttttggattttggttatagtgggagaaaagattggaaaagtaggttaagattaggttgaaggtattatatattatgttaaatttgaattttgttttgtaataggggattttatggaagatttatgagtaagttagtgaatgttttttaggaatgtttatagtagttttttgtatatggattgagttatttcgaaaagtaaagttttttgttaatggggatgaaagttttttttaaatttgagatgttttggtgaataaatttggtgaaagtatgaaagataaattgaagaatagatagatttgggttaaggattttagtttaaataacgttgtagaggtgagaggtaaaagtttaaattaaggttgtgatattggtaatgagagagatggatttgagatatttttaatatattagtttagttgataagtgttaagaagatagttgtgtaaaataaaaaaataagatgggaattatagcgagaataataggattggagggataaatgttttgtttcgtatttaagtatttgaggagtttttgtgatatttatggttgttaaataaataattggaaatgtagattagaagtttggaagaaattgcgagtttatttgttagatgtagattgtgtttttgtaatattttgtatttgcgtggtatagtggtatttttttaggttttttatgttattaaaagtagaaaggaggttaggagtagtggtttttgtttgtaattttagaattttgggaggttaaggtggtcggatcgtttgagtttaggagtttaagattagtttggttaatatagcgagattttatttttataaaaaaatataaaaagtagttgggtttggtggtatgtttttgtagttttagtagttcgggaggtagaagtcggagaagttggggaagttgaagatgtagtgatttgtgattatgtcgttgtattttagtttgaatgatagagtgatattttgttttaaaaaaaaaaaaaaaggtagaaaggagtagatgtaattatataatttttttttgatatggtgaaataggtagaaagttaaaagttacggttaggttcggtggcgtatatttgtaattttagtattttgggaggtcgaggcgggtggattacgaggttaggagtttaagattagtttggttaatatagtgaaatttcgtttttattaaaaatataaaaaaaaatttagttgggcgtggtggtaggtatttgtagttttagttatttgggaggttgaggtaggagaatcgtttgaatttcggaggcggagattatagtgagttaagatcgtattattgtattttagtttgggagatatagcgagattttgtttattcgtttaaaaaaaaagttatatatgtagttgtgtttgatttttttatgttggtatttgtatttttagttagttttatgttttttttttttttttgtaatttagttttgggtatatttgtttatattagtgtgtattattttttgagaattaaaaaataaaataattgtgaattatatgtaaaattttgtgtttggtggtatgggagatataaagtataagatagttttaggtttttaggaatttataatttgtttggatagataatgaataaaataattgtagtatagtatagtatatattatatgatgggtaaattttatagaagtagttgtttttgtgtttttgtgtagatttttgtgagattttgatatattatgtgtttatttttattatagtttttttttttatttataagtgatgaggttgttgttttgatagttttgttaaaatggtaggttaagttgatagttttatgtagtttagtgggaagagggagattattttttttattttttgtatttttttttagtttattaagggagaaaagtttagggttgttttaaatttttttggtttaggaagtttgttagttaattttttaggttgaagtttttaatgttatgttattatagaagttatggggatgaagtatggttttattttggagatattatttagagaaaatggagttaagattgttgatgttagtagatgaaaattgttgtgattttttttgggtttttaaataataatggtatttttaaatgtttttatttgagggagtatagaaatggttttaagttttgtttagttaaagtattttttaattttagattattttgggaagggaaatttggaaaattagtattttttggttatagtagtttttgatttataagggtgttgagtggatttaagtttttagttttagtatattcgtgttttttatttattttttagttatttaggttttgattggttgatagttagttattgggattttttttagttgtggttttttttttgttatggagttagataatggtggaattagtgtttgtggttttagtgtttataattatgtttagtgagtgtttgtgtttggggaagataatgttgtttttttggtttttatgttttaataaagtagatttgtgagaattttgtaggggttagttttaagtttagatttttagttttagtttttaggatttagtgttttattaggtagtatagtgtataagaatatgagttttgtagataatgttcgtttagtttagaagtggatagaagtatttttggaaggtataatattgtagtagtattggtttttttttttttgtgattttagagaggtagaattttattagaatggagtaaatatatttaaaaattttataaaaatggtcgggcgtggtggtttatgtttgtaattttagtattttgtgaggttgaggcgggtagattagttgaggttaggagtttgagattagtttggttaatatggtaaaattttatttttgttataaatatgaaaattaggtgggtgtggtggtgtacgtttgtaattttagtttttaggaggttgaggtacgggaattgtttgaatttaggaggaggtagttgtagtgagttaagattacgttattgtattttagtttgggtaatagagtaagattttgttttaaaataaaataaataaaaaaatttataaaaatgaatattgttaagataaatttaattaaattttttattagttataagaaattattttgttaggtatacgtagttttttaaaaatttgtttttttaagtatgttatttattaaaattttgatgtaaataaaagtaaattataagttttggaattagaagataggtgtttgaatgtttattttattttttattagttatgtgattttgggtaagttgtttaatgttttttgatttttagagataatttgtgaaaataaggttaataatagtatttattttagggttgttatgaagattaaatgagattatatttttgaagagttttataaggttgggtgtagtaattcgtgtttgtaatcgtagtgttttgagaggttaaggagggtaattatttgagtttaggagtttaagattagtttgggtaatatggtaaaattttatttttattaaaaatataaaaattagttgggtatagtggtttgtatttgtagttttagttatttaggaggttgaggtgagagaggattatttgatttcgaggaggttaaggttgaagtgagttgtgattatattattgtattgtagtttgggtgatagagcgagattttgttttaaaaataaaaaaaaaagggtttggcgggggtagtggttttatagtgttttaaagaaagttattatttgtttattagttttttttttaatgttgttaggttaaaatggatggaattaggttaagttgaatttgtttttttatttttttagg

SEQ ID NO: 360 - DNA, 10647 bp, Artificial Sequence
  chemically treated genomic DNA (Homo sapiens)
tttggagagataagaaaatagatttagtttaatttggttttatttattttagtttagtaatattaggggaagggttggtgaataaataatgattttttttaaagtattataaagttattgttttcgttaaatttttttttttttgtttttgagataaggtttcgttttgttatttaggttgtagtgtagtggtgtgattatagtttattttagttttgattttttcggggttaggtgatttttttttattttagttttttgagtagttgggattataggtgtaagttattatatttagttaatttttgtatttttagtagagatggagttttgttatgttgtttaggttggttttgaatttttgggtttaagtgattgttttttttggttttttaaagtattacgattataggtacgagttattgtatttagttttataaggttttttagaaatatgattttatttaatttttataataattttgaggtaaatattattattagttttatttttatagattgtttttgagggttaagagatattaagtaatttgtttaaggttatatggttgataaggggtggagtaggtatttaaatatttattttttggttttagagtttgtggtttgtttttgtttatattaaaattttaataaataatatatttgaaaaaataaatttttaaaaaattacgtatatttaataaaataattttttataattgatgaagagtttggttgggtttattttggtagtgtttatttttgtaaatttttttgtttgttttgttttgaggtagagttttgttttgttgtttaggttggagtgtagtggcgtgattttggtttattgtaattgtttttttttgggtttaagtaattttcgtgttttagttttttgagagttggaattataggcgtgtattattatatttatttaatttttatatttataatagagatggggttttattatgttggttaggttggttttaaatttttgattttaattgatttgttcgttttagttttataaagtgttgggattataggtatgagttattacgttcggttatttttataaaatttttgaatgtatttattttattttgatgaaattttatttttttggaattatagaagagaagaaattaatattgttataatattgtgttttttagaaatgtttttatttatttttgagttgaacgagtattatttgtaaagtttatgtttttgtatattatattgtttaatgaaatattaggttttaaaagttaagattaaagatttgagtttagggttaatttttataagatttttatagatttattttattaaaatatggaagttagagagatagtattgttttttttaaatatagatatttattaggtatagttgtaggtattagaattatagatattggttttattattgtttagttttatggtagagagagagttataattggggaggattttagtagttgattgttagttagttaaaatttgaatgattgagaggtggataaggaatacgaatgtattgaaattgggaatttgagtttatttagtatttttgtgagttaaaggttgttatagttaggggatgttggttttttaagtttttttttttaagatagtttgagattagagagtgttttgattagataaaatttagaattatttttgtgtttttttaagtgggaatatttggaaatgttattgttatttaggaatttagaagggattataataatttttatttgttagtattaatagttttggttttattttttttgggtgatatttttaaaataaaattatattttatttttatagtttttgtagtaatatgatattaaaaattttaatttgggaggttggttgataaattttttaaattagggaagtttaagatagttttaaattttttttttttaatgggttaggggagagtgtagggagtaagggggataatttttttttttttattggattgtataagattgttagtttggtttgttattttggtaagattattagaataatagttttattatttataagtgggagagagggttgtgataaagatagatatatgatatattagagttttataaagatttatataaaggtataaaaatagttatttttgtagaatttatttattatatgatatatattgtattgtgttatagttattttgtttattatttatttaaatagattataaatttttggaaatttagaattattttatattttgtattttttatattattaagtatagggttttgtatataatttatagttgttttgttttttaatttttaaagaatgatgtatattgatatgaatagatatgtttaagattaagttatagagggaggaaagaaatatagagttaattagagatatagatattaatataagagagttaaatataattgtatatgtgattttttttttgggcgggtgggtagagtttcgttgtgttttttaggttggagtgtagtgatgcgattttggtttattgtaattttcgttttcggggtttaagcgatttttttgttttagttttttaagtagttgggattatagatgtttgttattacgtttagttaagtttttttttgtatttttagtagagacggggttttattatgttggttaggttggttttaaatttttgatttcgtgatttattcgtttcggttttttaaagtgttgggattataggtatgcgttatcgagtttggtcgtgatttttaattttttgtttgttttattatattagagggggattatgtaattatatttatttttttttatttttttttttttttttgagatagggtgttattttgttatttaggttggagtgtagcggtatgattatagattattgtatttttaatttttttagttttttcgatttttgtttttcgggttgttgggattataggaatatattattaggtttagttattttttgtatttttttgtagagatggggtttcgttatgttgattaggttagttttgagtttttgggtttaagcgattcggttattttggttttttaaaattttgggattataggtaagagttattgtttttggttttttttttatttttaataatataagggatttgagaaagtattattgtattacgtaagtataaaatattatagagatatagtttatatttgataaatagattcgtaattttttttaaatttttgatttatatttttaattatttgtttgataattatagatgttatagagattttttaaatgtttgaatacgaaataaaatatttgtttttttaattttattattttcgttgtggtttttattttgtttttttgttttgtatagttgtttttttaatatttattagttaagttggtatgttagaaatgttttagatttattttttttattgttaatattatagttttaatttaggtttttattttttatttttgtaacgttgtttaaattggggtttttggtttaaatttatttgttttttaatttattttttatgtttttattaagtttgtttattaaagtattttagatttggaagggatttttatttttattaataagaaattttatttttcgaagtagtttagtttatgtatagaaagttgttatgaatatttttaaaggatatttattgatttgtttataaattttttatggggttttttattataaaataaagtttaaatttagtatggtgtgtaatatttttaatttgattttagtttgtttttttagtttttttttttattgtgattaaaatttaaagttagtaatattatgtcgttggtttatttttagttttttatatattttaattttagtgtttttgtttatattgtttttttaatttgtagtgtttttttttaggtttaaagtaattttttttttagttattttgttatagttttttgtttttatattgatgatagtatttattatagtttatttttaaataatagttgttgttggtttgtttttattattattttagttaggttgaatatttttaaagtaggagtttttttttttttttttttttttggagataggattttattgtgttatttagattggagtgtagtggtatgattttagtttattttagtttttatttttttggattaagcgatttttttatttgagtttttcgagtagttgggattataggtatatattattattattacgtttgggtaatttttgtatttttgtttttgtcgagataggtttttattatgttgtttaggttgatgttgaatttttgagtttaagtaatttatttgttttggttttttaaagtattggtattataggcgtgagttattatatttggttgagtttttttttttttttttttaatttttattttagagtttaatttagtatataaagtgtaaaggttaaattagaaaatttatataaaaatgttttgtaaattataatatatttataagtaagtagaatatgatatgttattttaaatttaatggaattagattttttatttttgtttaagattattttgattagttagaattggtttttttgtttgggagattaattgcgaattattttagtattttggtcggttttttttttgaaaatttgaaagaaataatttttttgtgagtagagaaacggtgtggtaaagaattattttgggtatgtaatttaaagtaaagtgaatttgtagttttttcgtaattatagtagtagatgataaaaattaagatggaaagagttattttgtttgaaagaagatatatggttaaaaattgtggagagggaagtgtatgggaggggttatagagcgttagaaaaagatttttgagagtgagggtgggtgtaaatatgtagtaggtaattcgtagtatttgtgggagggtgatagggttttgttataattggttaatgtttgttcgttaagaatgagttatgttaaaatttttgtttagagtcgtagagcgggttatgatttaaaattgtttagggatatatcggtttttaatattgtaagatttttttttttaagtaaattttaattttcggttttattaagggaatgtgattttattggacgtagtataaagatttttagatgtttttttgtcggggattgtagggattatagaaagattatcgaggtttaggagttatttgtaagcggagatttttttggacgtttcgtgttttatttagtaaagtcggtttataattttgcgtttttaaatttttaaaagggtttgaggtgttaataggaaaggaggttcgagattgttacggtatacgtgggttttaaggagggagttaggagttattgtttgtttgggttaagggtatcgcgtacggaaaggcggcggggacgcggtttagttttaggagatgcgtttaacgaagaagcggaggaatagggttacgggatagggtagatattcggttgttttttgtttgttagatattagcgttagtttttgttcggttttttcggttttttaagggttgggggggtgttttaggttttatagcgttttcgatcgtttttttgtattttttatcgtttttattgtaagaggcgttcggtttggttttttcgttttaggaaatttttttggggtaggtttcgttttatattcggtgcggcgacgttattttcgtttacgttatggtagtcgttagattggggcggaaggtaaggaatttattttttcggcggtggcgggtttcggtaatcgttttttttcgggttttcgcggatcgtacggattcggttgacggcgagggttatgggacggagtcgtttgtatttaaaatgttttttttttatttgtcgtttaaaaataaatttggaagaagtaaaatttaaaatttgttttttgtttttcgtaatataaatatgtatagtttagaatgatcgttgatataaaatatgttaaggataggggcgttgagggtggagggagagagggcgttttaaaaaagggaattattttattcgttgttacgaaggattaattttgttgtataggatatatataatataaaataaagtttttacgggatttatatttgttagcgatttattttttaaaaagggggagggttttggaggtgaggggagaagattgtaaaggggaaaattgaaaattgagtatgtgcgagtgtaaattaatttaaaatataaatacgggggcggggggtggggtgggggattttgatgtaattatataggtagggtatttaaaaaaaaaattaattaaaattttaattttgtagtttgggtttgagttatagtttatataaaaattaaaaattgtataaggtttttttattaaattttataggattatcggatatttagtatatgtttataaagtttgttttattttttttttttaattttagggtttaagttttaaatatagtttgatttacgggagttaatttttttttttttgtagtttagattttttgttttcggaaaaggaatatttaagggttgtggttttgagggtagtagtttagtttttttattgtttgatttaattatagcggtttttgtgggagtgggggttgttatttttttaaatatttgtagtttgaaatagttgaggaagtagttttaaaaaaaaaaaatttttttatttttaataatttataattttttaaatttaaaataaaataaaaataaatttaaaattataatagcgattaagttttttttttagtaggttcgttcgtttattattattaagtttatttttatattttagatatttgatttttgaaaatattaattataaaatgttttttgtttatagtttttagaagagaattgtatataagttttatttttatttttacggttttttattagagaggggtttggggttttatttattttttatttatttttatttttaggaagaggtttaattgtagtataagtttgggtagaaaggggaaggaaagggaggtaaggaatttattattttttggttttttttggggttagtttttttttgtgcgttataatatagtttaattatataatagggggtgggaattgtttagtttttatatttttattttatagtagttatagttagggggtggggagtggggtggggggtgaggaaaagggcggtaggtcgggtaatggagggggtttttttataaggggagttttatgtgttcgttttatatttttttattatttataaattggttttgtaaaaagaaaatagatatatttatatagaatatataaagtataaaaattagtagttttatatttgtttttttcggggggtggggggagaggggagggtttttatttttagtcggtttttttatgttttataagattatgtataattttatgtataaatagataaatattttttatttttttcgcgttgatattaagtttttttatttttatattattatttttttttattagattagtagtagtttggtgattgagggaaagtgggagtttcgggttatattttgttttattaggtatgggtatgttatttagggatagtttttattttattttttatttaattcgtttaggggttggagggtaaataggtttatgatgaggttgggaaaataggagggagatattttggttttaggtttagtttttttttgtttttatgtttagatggagaaggaagttttagagtaattaggggttagttatttttaatttttattattatttgttttaattattattttatgtttataattaaaaataaagatggattttttgttgttgtttttttttttttttttattttttttttatttatttagaagagggtagtgaggtgggggagagggttggggtagtagggggtttggagagggttttatattttaaaatagtaaaaaatttaatatttaaatgaggtaggtgtgggtgcggggtttttttgttcggtttgtttagtttgtttttttaggtagttgggcgtttttttttcgtttatgttgtatttgttagagtggaaaataaggaaatataatttatagagagatagaaatatagaggaaaagagggaaatagagatagattaagagggagggggatgggggtgagggtgggggtaggattcggtaggtagggttaggtgtgggattcggtttttgggattgttaagtttagttaagtttttttgtagtcgtgagttgggtcggagaggttagtgggagtagtagggttgtgaggttcggttatatattttttttttttattttgttgttttttagatgtttttgggtagttttcggtttatattttttttaaatttgagatgttcgatggttgtttttgtttggttttttttggagttgggggtagagatgttagtttgagggtcggtggtggggaagaggattgtttttggtgtttagggtgggtttggtttagggttttttgttttagttttttgttttaggggtttcgggttagtcggtagttttaattttgggttttggttttggttgttatttttttttttttttattttttttagggaagaggttgtgggtagggggatttttttgtttggtagttttaaagttttttagtttatttattttcgataattttaggttttatagtggtaggggattttgtgttgatcgtttttaaaattaaattgatagttataggttagttgaaaagagaagagggtagaattaatgttagttttttataggaagaggggaggttagagaagatatgatttgaggtgtttagtttaggaatttatatttagggaatggtagagaaggggtgaaaggaggaggagttgttttgttatttagttaggatatttttttttatttttttttttttggggattcgtcggttggagatgatgatgattttgttttttttgttaaatgttacgatttcggttatatagttaggggtataggaatggttaatgtatttgggtagtgggatagagttagggatgttaggtaattaatttgggataattttgattttttgttcgtttattttttagagtgttatttttagggattattaaattttttttttttcgttattttttatttggtagggtcgtcggttaacgtagtattaattatatgtttattgtttattcggaatatgtagatgtttcgattttagaaaggtagaggttgtagaagaagggataagagtattagagagtggtagtggtggttgtgggattaggtaggagatttaggtagtgggggtttttgttgtatgtattttattttttttgttttttttttttttttattatagttttttttttgtttttttgtgattaattttgtttttgttttttggttgagtgtagattatgtattataatggtttttttgttagtttatatttgtttttcgtagattttttttcgtcggttggttatttcgtttcgaatgatggtgttaatgtattcgataattattgtgtgtttttttaggtttttggttgtatagagttttaggttttggatacgggagcgagttaggtatacgttgtttttttattcggtgcgtagtcgtcggtattgagatgatttggagtgtataaattgtttgttgtagggggtgttggtttcgtttgtgaaggtgttttgatatgttttagatatgttggtgttgtttagggtatggggtttgggaggtgatataatttatgataagatagtttttttttagattaagtatatattatttattttttttgttattttttgggatgtgtaatatattagttaggggcgtgtgttgttggtaagtattggaagtgtagttttgggaaaggagtagaggtaattgggttttagttttggtgaggaagtaattagttatagggatttttttgatattttgggtggtatagagagtttagggtgaggggtggggtgtggagggagatggggggtattaatttttttatattgagtttgtttttttattttttattttttattatttttttgttaaattatttttaaggttatgtttttttgggaagtttttcgtaagtagtttaggtttagaatttaagttgatggtttgtttgaatgtttgaattttattttttgtatatattggaagttttgaaaatggggattgtgtttattacgttgggttagatttgaattaaaattggttgtgaatttatagtttaaaggtggtatttttttttcggattgtttttttttttgatataatattgggttttgtgtagatggtttagtgtaggggaatgacggttgtttggtaggatgttttttattattttagggtattagttaaatttttgttattttagagtagtggtttttaaacgtttttggttttttttttatttagtagaaatttttgtttttttttttaataaaatgttgattggaattttaatatataaattagatgataatggagtttttttggtttaatttaatttggggaaggaagagatatgtatgggaaggaaaagtttaatttattagtttaagtgatttaggattttttggaatataggtatttat

SEQ ID NO: 361 - DNA, 12584 bp, Artificial Sequence
  chemically treated genomic DNA (Homo sapiens)
tttagttaattttttttgtatttttagtatagatggggttttattatgttggttaggttggttttaaatttttgattttaggtgatttatttatttcggttttttaaagtgttgggattataggtttgagttattatatttggttacgtttttttttttagtaaataaagtgtggttggacgtggtggtttataattgtaattttagtagtttgggaggtcgaggcgggaggattatttgaggttaggagtttaagattattttgggtaatatagtgagattttatttttgtaaaaaaaaaaaaaaaaaaaaaaaaaaaagaattagttgggtatggtagtgtatgtttgtagttttagttatttaaggggttgaggtgggaggatgatttgaatttgggaggttgaggttgcgttgtagtgagttgtgattttatttattgtattttagtttgggtgatagaatgagattttgtttttaaaaaaaaaaaaaaggtttgaattgtaattttatttttagtgttattaaattttttagtgggtttttgtaaatatttattgagtaaatgaatgtttgaagggtggagcgagaatttggttggtttttttagttttatttggggaggtagtttgggattttataggttggggagggagggtttatttttgtgtaaggtggttttagataatttaatttttcggtttttatgaaattttattttgttttgttttttttatttgtagaatgggtgggttggagaattagagggagttatttcgttttttagggaaagggttatagatattttggtttgatgattggggtaagggattttttagtttatttatttgtaaaattggagtaaaagaattagtttgggttaagtttgatggtttatgtttgtaattttagtattttaggaggttaatgtagaagaattgtttgagtttaggagtttaagattagattgggtaatattacgagatttagtatttatatatatataaaaaaattttttgaaaaaattagttagatatggtggtgtatatttgtggttttagttatttgggaggttgaggtaggaggatcgtttaaatttgtaaggtggaagttgtagtgagttgcgatggcgttattgtattttagtttgagtgatagagtgagattttgtttttaaataaataaatattaggttgggcgcggtggtttatatttgtaattttagtattttgggaggttaaggtgggtagattatttgaggttaggagttcgagattagtttgtttaatgtagagaaattttatgtttgttaaaaatataaaattagtcgggtgtggtggtatatgtttgtaattttagttatttaggaggttaaggttgggaattgtttgaattagggaggtagaggttgcgtttagttgagatcgtgttattatattttagtttgggtaacgagagcgaaattttgtttaaataaataaataaataaataaataaataaatatgaaagaattagtttgtagagtttttttttgttttttttttttttttttttttgagagggagtttcgttttgttttttaggttggagtttcgttttgttttttaggttggagtgtagtggcgtgattttagtttattgtaatttttgttttttaggtttacgttatttttttgttttagtttttcgagtagttgggattataggcgttcgttattacgttcggttaattttttgtatttttagtagagatggggttttatcgtgttagataggatggtttcgattttttgatttcgtgatttgttcgtttgggttttttaaagtgttggggtgataggcgtgagttattatgtttggttatgagtttttttttttttttttttttttttttttttttttttttttttttttttttttttttttttttttttttttttttttttttttttttttttttttgatagttttgttttattatttaggggggtgtgtaggggtgcgattttggtttattgtaattttcgttttttaggtttaaattatttttttgttttagttttttaagtagttgaatatatagatgttcgttagtatatttggttaattttttaatttttagtagagatggggttttattatgttggttaggttggtttcgaatttttggttttaagtgatttattttttttgattttttaaattgttgggattataggtgggagttattgcgtttagttatagagtttttttttttatttaattaataagtatttgagaaatagttagaaggtttatgtggttggaaggagtgagtaagggggagagatgggaggaagtaagaattgatggtgtagagtttcgtgggttgtggggaggatttgagttttttttttgagtgagttgggagttatggagggttttagatagaggaggggtatattttattttatgtgtttattgtttttttgggttgttgtgggaatagattgtgggggcgagggtaaaattaggagattaggagagaggtgattattggttaaggtgagtgatggtagggattggatgcgataaagtggaaaggtgaaatgtgggtgaattttgggtttgtgtgtgtgttgttgttgttttttttttttttttttttttttttttgagagggagtttcgttttgtcgtttaggttggagtgtagtggcgcgatttcggtatattgtaagtttcgttttttgggtttatgttatttttttgttttagtttttttagtagttgggattataggcgttcgtcgtttttattatgttagttaggatggttttaattttttgatttcgtgattcgtttgtttttgttttttaaagtgttgggattataggcgtgagttattatatttggtttttttttttttttttttttagatggaattttgttttgtcgtttaggttggagtgtaatggtacgatttcggtttattgtaattttcgttttttgggtttaagttatttttttgttttagttattcgagtagttgggattataggtatgcgttattacgtttagttaattttatattttttagtagagatgggttttattatattggttaggttggtttcgaatttttgatttttagtgatttatttattatttattttggttttttaaagggttgggattataggggtgagttattgtatttagtcgtttttttttttttttttttttttagatagggtttcgttttgttatttaggttggagtgtaggggtattatgatttttttttatagtgatgtattttcggttttttgagtttaagcgattttttcgttttagttttttggtagttgggattataggcgtgcgttattatgttcggttggatgggttttggattagtataatttttttttttttttttttttgttgttagtattttttaaagagttgtttagaggaaaaaataagagagaaaatatcgcgttttggtttttgggacgattgaaattacgtagagttacgggtaattaaggtattcgtagtttacggcgttttttcgggttttaaagggcgttaatgtgtaggtatcgtcgttagggagcgttttttgtcggagtttcggagattaaggtttggttttttcgtttggttttcgaaggagtgagggttcgacggcggttacgaataaagttgtacgttttgtagatttcggagattttttagaaatttcgtagaggtttttatttttcgtttgggtacgagtttgtatttatggagcgttatttgtatgtagtagtttcgaaaaagaaggcgatgtttattttatagcggggaaaattgagatttagaggttataggggtttttaggatgaatagtaagttgggatttaaattttttttaataataataacgataatagaggttgggcgcggtggtttaggtttgtgtaattttagtattttaggagatcgaggcgggcggattatttgagattaggagttcgaggttagtttggttaatatgatgaaatttcgtttttattaaaaatataaaaattagtcgggtatggtggtgggtatttgtaattttagttatttaggaggttgaggtagaagaattatttgaattcgggaggcggaggttgtagtgagtcgagatcgcgttattgtattttagtatgggtaatagagcgaaatttcgtttaaaaatagtaaaataataaataaataattacgataatattaaaagtgatagtagttaatatttatggagcgtttagtgtgtttttagtttttggtttgtattgttttattgaattttattaatatcgaggaggtgagcgtattatttttattttatagatgaggtgtttggaagggtttgttttttttaaggcgtaaagcgttaggatttgaatgtagattcgtttagagtttgtttttaggtaacggggaaatttttatgtttttgaataggggattatagatgtaggcgtttcgagtttgtaaatgtatcggggtagggtggggtggggggttattttgtttgttttttttaggggtttcgggaggtttaaaggttttcgtcgttttcggtttgaacgcgtggaatcgtttttttcgggttttcgcgcgttttaatgggggatttttcggtagcgtgcggtcgtttcgggattcggaaagaggaaaggtggggagtcgatggggatgtttcgggttcgggagatcgagggggcggacgggcgggatttcgtagtttcgggggtttttgggaattcgtttgcggggacgcggcgtgtttggtttaggcgaggcgggatgtcgagtaggtcggagcgggtcgcgcgtcggggagggttgcgtcgcgttcgtttttttttcgttacgttcggggttgtacgcgcgtttttttggtcgttttttttttcgcgcggggatttttggcgggcggtaggaggatatggttagcgacgtcgtgtaggtaggcgtatttgcgtttggagtttcggggcgatcggacggcgtcggcggatttcgttcgcgcgttgtcgggggagtttttttagttttcggaacgggattcgggtgacgatggtaagggcgggggttttcggagcgttcggcgttttttttttgggtcgggattgtggagttagcgaggtttttttttcggtaggtggcgatgtggattgggttggtttgggggcgatttcggaggtaatttttgttatatttttaaattcggttttttttggagaattagaaggggcgcggcggaggttttatttcgggtgtttgtggttggttgggcgttttagtgtttttcgttcgtttttaaatttatttttttttttagggttgggtattcggtaggtgtcgttttatttggggtacgtgtttggcgtagtgttttgggaggggaggaggttgttgggttcggttcgtgtttttttttcgtataataaagttttagttattttcgtttttagatagttttatgatgttttagacgttatttagattggtatttgttggcggaagtattcgagttattgtattaggtcgggggaatggggatttttatttttatttttgggttgttaggtggaatttttttttgggtggggagtgttttagttaataggttagggatgtttttatatatagaattttatttttttgtatggtggttgggtatggttgggttatttttattttgttaatatatatacgtgattggtattagtttttcgtttagttagattttttttgtgttatttggtggggattattgatttggatttatttttttcgtttgtgataagtacggttagggtgattgttaattttttttggtttaagtgatttaaatttgagaaatgtttgtgttttagtgtttttattagtattttattatttagtttattgttttgtggttgttgtgtaattgggttttcgtttttttttgtatttgttttcggtttttttgtgttttttcggtaattttcggtttttttcgtttttttagttttgttgatggtttgtcggttttgtcgaggagttgggcgtatttggtgttgtcgattatataaggttagattttaaggtcgggatgggtcggggtttttgtttttattttcggtttagggagggttgtgtaggaattttcgggtgtatgtatgcgtttggcgtattttatatatgatttagataggttgtgatttttgtaacgaggttggatttacgttttggttttttttttttattttttttttagtttttttttcgtttttggttattttttttttatggttgtttgggtttgttgttttgtttttttgtttgttttaacgtgtgtttgtttgttttgtgttttgtaaacggatgttttgtttagatttcggaaacgtttaaggtattgaaattttcggatgtgggagtttaggtttttggttgttttggtaagatggggattatgggaggtaggttttttgggtttgaggttttcgttttatggtgggtagcggaggagtaggggttttttataggataggttaggttagggttttgagttttgggtttgttttgttggtttttaggtgatttttgtgttttgggtagaagtgagttatttaggggaggagaatttaggagtttagtttttttttttttgtgtattatagattttagttgttggaggtggggttgagggaggttattttttttttttgtttggatttttttagttgagttggtttcgtttttggttgtgttttttttttgtttgttggggatggggtggggttttttgagcgagggtggtatttggtgagtttgggtttaaattttagcgttgatattttttcgttgtgtgttttgggtttagtgttttcgtttttttgagtttcggttttgatttaggaaaaatgggattaagagggtgtttatgggagagagagagatcgagattttgttagtatttggtaggtagggttgttgtgaagtcgttattggtaagcgttttggttagtagtttagggtgtgaatttgtgtttttattgattgatttattgatttatatttatttattttagaggagagagttttgttttgttatttaggttggagtatagtggtgcgattttatgttatcgtagtttcgatttttaattttcggggtttaagtgatttttttgttttagttttttaagtagttgggataaaaggtatagattaatatgtttggttaatttttttttatttttgtagagatagggtttcgttttgttatttaggttggaatgtagtgacgagatttttgtttattgtagttttaaatatttgatttataggattataggtatgtattattatatttggttaatttttttttttttatttttttaaattgagattggggttttattttgttatttaggttggagtgtagcggtatgatttttgttttttagatttaagtcgtttttttattttagttttttgagtagttgggattataggtgtatattattacgtttggttaatttttgtatttttagtagagttagggtttcgttatgttgtttaggttggttttgaaattttgagtttaaagtaatttgttcgtttaggttttttaaagtgttgggattataggtgtgagttattgtttttagttttttttttttttttttttttttttttttgtgatggagtttcgttttgtcgtttaggttagagtgtagtggtttgatttcggtttattgtaaattttgttttttgggtttacgttatttttttgttttagttttttaagtagttgggattataaacgttcgttattatgttcggttgatttttttgtgtttttagtagagatagggttttattttgttagttaggatggtttagattttttgatttcgtgatttgtttgtttcggttttttaaagtggtgggattataggtatgagttatcgcgtttggttttttttttttttttttgagataaagtttggttttgttggttaggttggagtgtgatggtgtgatttcggtttattggaatttttgttttttgggtttaagttagttttttattttaggtttttaagtagttgagattgtaggtatatgttattatatttggttaatttttatattttttgtagagatggggttttatcgttattgtttaggttggtttcgaatttttgagtttaagtagtttttcggttttggttttttaaagtgttaggattataggtagagagagttattatatttggttaatatttttttattttttgtagagatttttgtaggttttgttgtgttgtttagatttatttttaatttttgattttaagtattgtttttgttttagttttttaaagcgttgggattatagacgtgaattattatatttggttaaatttatgatttttaatcgtaggttttttagttttagtattattgatatttagggttgggttattttttgtagtagaggttgttttgtgtattgtagggcgttgagtggtatttttggttttattttgatagaagttatttttttatttatagttaggataattaaaaatgttttcggatgttgtcgtatgttttcgggtatggggagaaaatttttttttaatggaaaattgttattggttaggtatagtgttttatatttgtaattttagaattttgggaggtcgaggttggttgattgtttgaagttaggagtttgagattagtttggttaatatgtgaaatttcgtttttattaaaaatataaaatattagttaggcgtagtggtacgtgtttgtagttttaattatttaggaggttgaggtaggggaattgtttgaattcggaaggtggagattgtagtgagtcgagattgtattattgtattttagtttaggcgaaagagtaagattttgttttaaattaacgaataaaatatattattgtgatttttttgagttttagtttttttatttgtgaagtggggagtttttggtagttgtttaagatttgtagtgagggttgggaagatggtgggagtgatatatttggtttgtggtatttttttttgggggtagttgcgtttgagattagttacgagttaaggataatattttttgtttgtgaaatggatgtttttagttgaaggagataattttagggggttattttttagttagtatttggaatttgggtgtttttgttttaaattaaggttttggttacggggtagtgatttatatttgtaattttagtatttttggaggtcgaggtaggaggattatttgaggttaagagttcgagattagtttgggtaatatagtgagattttatgtttatgaaaaatataaaaattagttaggtgtggtggcgtatgtttgtagttttagttgttcgggaggttgagttgggaggattgtttgagtttaggaggtagatattgtagggagttatgattatattattgtattttagtttgggtaatagagtaagattttgttttaaaaaaaagaaaaaaagttatatgagatatttaattttattgtaaaatagttttgtgttagacgtttttgtttaattataggtttgggtaagtgttttgagtatatttaaggtaggttagggtgagttatgatgtttggtaggtaagatatattaaatgtatttttgatttatgatatttgtaatttatgatgagtttattaggaagtaatgttattataagttgtttttgaatgttattgtgtgtttagtaagtggttttgtaggttgttgatttggggtattttttttttttttttttttttttgagatagagttttattttgtcgtttaggttggagtgtagtggtgtgatttcgatttattgtaatttttattttttgggtttaagcgatttttatgtttagttttttaagtagttgggattataagtacgtgttattatgtttggttaatttttatatttttagtagagacggggttttattatgttggttaggttggttttgaatttttgattttacgtgatttgtttcgtttatttttttaaagtgttgggattatagatgtgagttattacgttcggcgtgattttggaaattggaaattttttttttttttgagacggagtttcgttttggcgtgtaatggtacgattttggtttatttcgatttttgttttttgggtttaagtgattttgttttagttttttaagtagttgggattataggtatgtattattaaattcgattaattttgtattttttttttttttttagtagagacggggtttttttatgttggttaggttggtttcgatttttcgattttaggtgatttatttatttcggttttttaaaatgttgggattataggcgtgaggtatcgtgttcggtttggttttggaaatttttattttagttttttagtgttgttttttaattgtgttggtttgagggaggtgttattgggttggttgggatttcgggttttttagttatggttaataatagttggcgattggattgagaggaagtaggaagttgggagggttcgtttgtaggaaaggggttttatttttgaagaagtggttgttttgattttgaaggggaagtcggggataaggggtggttgggagagtttggagggatatatgtaggtagtcgtagggttggaggtttgtgggagtatggatgtgttgtaggggtttcggggagcgtgtatatgtgtgtgagtatgtgtatacgtatgagtatgtgggttatgttttttcgggtaggtgggagtgtgttttgtatgggttttagagggaagtttataagtatttgtatgtgtttgtaaataagtgtatatgtggtaggtatgggaatgggtatattgtgagtttattttttaggtatatatttgtaggtgtagaagtgtgtatttgtgtgtggatttttgttttatttatatatataggtatgggagtgtgtatatatgtgagtttgtgttgtaggtatatatttgtagttataattgtgtaaatataggttaggcgcggtagtttacgtttagtaattttagtattttgggaggttgaggggggcggattatttgaggttaggagttcgagattagtttggttaatatggtgaaattttgtttttattaaaaatataaaaattagttgggcgtggcggtatatgtttgtaattttagttatttgggaggttgaggtaagagaattgtttgaatttgggaggcggaggttgtagtgagttaagattatattagtgtattttagtttgggtaatataaagggagattttgttttaaaaaaaaaaaaaaaaaaaaaaaaaggaaagaaaaagaaagcgtgtaaatatttgtgagtttgtgttttgtgtatatttatatatgtatttgaaagttagtgtatatttaagttagttttcggagtttgcgtttttttatggatatattatgagtgtgtgaatgtataaattgtttgtattttggatattttttagggatagggagtaaggattgtttttgggttttatttagaggaataggaggttttttagatgttttggagttggtttcgcgcgaggggtgttgggagttgataggaaagaggaagtggtagtcgagaggttttggtggggttgaggtttaggaagagggcggggtttttagttcggatttaggatggcggaggttaataatttttcggagtaggagttggaggtggggtttagggtttttgtgggggtaggtagaagggggttttaagtggtataggttagtagttttttttcgggtattttttagtttgggaataaggagaggagatggggtattggttttagagttttttttttggaggatgagagtatttagtgtttttcggggtttttagattggggagagatagaaggaaggagatcgggttttgttttttagggttttagttgttgaatataggagaagagtagatgagggtttttaagattttatagtttgggggtatagtagagagaagatttggtttgtttttgggatattttagttttgggggtgtagttaaggaaagatgaggtttgttttcgggatgttatagttttagggtataagtgagggaagatggggtttgtttttaggattttgtagttttaggggtatagtagagagaagatagggtttgtttttgggtttttttagtttcggggagtagtagagaaaagaaggaatttttttttgggattttttagtttgggggaggtagtagaagggagatagattttatttttgagatttttttaatgtgggggacgttgtggtggtgggggtgataaggttttgtttttgagattttttagtttggggaggttaggaagtagtggtaaggtttcgttattttttagttttgggagttagaggaggtagagtaggttttgttttgggagttttagtttagggtagaggttgggttaggttggttgtatgtggtttgtatttggagtttttttagttttattgattttgttttgtttttcgtaga

SEQ ID NO: 362 - DNA, 12584 bp, Artificial Sequence
  chemically treated genomic DNA (Homo sapiens)
tttgcggaggatagaatagggttagtggagttaggagaattttaggtgtagattatatgtagttagtttggtttagtttttgttttggattggggtttttaagatagggtttgttttattttttttgatttttaaaattggaaggtgacgaggttttgttattgttttttgatttttttaaattgggaggttttaagagtagggttttgttatttttattattatagcgttttttatattaagggggttttaagaataagatttgttttttttttgttgttttttttaaattagagggttttaagggaagatttttttttttttttgttgtttttcgaaattaagagggtttaagggtaggttttgttttttttttgttgtatttttaaaattatagggttttgaggataggttttatttttttttatttgtattttgaaattatggtatttcgagggtaggttttatttttttttggttatatttttaaaattagggtattttaagggtaggttaagttttttttttgttgtatttttaaattatggggttttgaagatttttatttgttttttttttatgtttaataattgggattttaaagaatagagttcggtttttttttttttgtttttttttaatttgggagtttcgaagggtattggatatttttattttttagagagagaattttgaggttagtgttttattttttttttttgtttttaaattgagaagtattcggggaaggattattggtttgtgttatttggggtttttttttgtttgtttttatagggattttggattttatttttagtttttgtttcgaggggttattggttttcgttattttgggttcgggttgagggtttcgttttttttttgaattttagttttattagggtttttcggttgttatttttttttttttgttaatttttagtatttttcgcgcggggttaattttagggtatttaagggattttttgtttttttagatgaaatttagggatagtttttgttttttgtttttagagaatgtttaaggtgtaggtagtttgtatatttatatatttatggtgtatttatgaggggacgtaggtttcgagggttgatttgagtgtgtattaatttttaaatatatatgtggatatgtatagaatataggtttataaatgtttgtacgtttttttttttttttttttttttttttttttttttttttttgagatagagtttttttttgtgttgtttaggttggagtgtattggtgtgattttggtttattgtaattttcgttttttaggtttaagtaatttttttgttttagttttttaagtagttgggattataggtatgtgtcgttacgtttagttaatttttgtatttttagtagagatagggttttattatgttggttaggttggtttcgaatttttgattttaggtgattcgttttttttagttttttaaagtgttgggattattggacgtgagttatcgcgtttggtttgtgtttgtatagttatggttgtaggtgtgtgtttgtaatataggtttatatgtgtgtatatttttatgtttgtgtgtgtggatgaaataaagatttatatataggtgtatatttttatatttgtaggtgtgtgtttggaaaatgggtttatagtgtatttatttttatgtttattatatatgtatttatttgtaaatatatataagtgtttatgagtttttttttagaatttatataagatatatttttatttgttcgagagggtatggtttatatgtttatgcgtgtgtatatgtttatatatatatgtacgtttttcgaggtttttgtagtatatttatgtttttatagatttttagttttgcgattatttgtatatgtttttttagatttttttagttattttttgttttcggttttttttttagggttagaatagttatttttttagaggtgaggttttttttttgtagacgggtttttttaattttttgtttttttttagtttagtcgttaattgttattgattatagttgagaggttcggggttttagttagtttagtggtattttttttaggttaatataattaggggatagtattgggggattgggataagaatttttaaaattaggtcgggtacggtgttttacgtttataattttagtattttgggaggtcgaggtgggtggattatttgaggtcgggaggtcgagattagtttgattaatatggagaaatttcgtttttattgaaaaaaaaaaaaaaatataaaattagtcgggtttggtggtgtatgtttataattttagttatttgggaggttgaagtagaattatttgaatttaggaggtagaggtcgaggtgagttaagatcgtgttattgtacgttagagcgaaatttcgttttaaaaaaaaaaagaatttttaatttttaaaattacgtcgggcgtggtggtttatatttgtaattttagtattttgggaggatgagcgaggtagattacgtgaggttaggagtttaagattagtttggttaatatgatgaaatttcgtttttattaaaaatatgaaaattagttaggtatggtggtacgtgtttgtaattttagttgtttgggaggttaagtatgagaatcgtttgaatttaggaggtggagattgtagtgagtcgagattatattattgtattttagtttgggcgatagagtgagattttattttaaaaaaaaaaaaaaaaaaaaagaatgttttaaattagtagtttataaaattatttgttaagtatatagtaatatttaagaataatttatgatggtattattttttgataagtttattataagttgtaaatattataagttaaaaatgtatttaatatattttatttattaaatattatagtttattttggtttattttaaatgtgtttagaatatttatttaagtttatagttgggtaaaaacgtttaatataaagttattttatagtaaagttgaatattttatgtaatttttttttttttttttgagatagggttttattttgttgtttaggttggagtgtagtggtgtgattatggttttttgtagtgtttattttttgggtttaaatagtttttttagtttagtttttcgagtagttgggattataggtatacgttattatatttggttaatttttgtattttttatagatatggggttttattatgttgtttaggttgatttcgaatttttggttttaagtaatttttttgtttcggtttttaaaagtgttgggattataggtgtgagttattgtttcgtggttagggttttgatttaaaataagagtatttagattttaaatgttggttaggaaatggttttttggggttattttttttagttgggagtatttattttatagataaggaatgttatttttggttcgtgattgattttaagcgtagttgtttttagggaggaatgttatagattaagtgtattatttttattatttttttaatttttattataaattttgagtagttgttaagaattttttattttataggtgaggaaattgaggtttaaggaagttatagtagtatgttttgttcgttggtttgagatagagttttgttttttcgtttaggttggagtgtagtggtgtaatttcggtttattgtaatttttatttttcgggtttaagtaatttttttgttttagttttttgagtagttgggattataggtacgtgttattgcgtttagttaatgttttgtatttttagtagagacggggttttatatgttggttaggttggttttaaatttttgattttaagtaattagttagtttcggttttttaaagttttgggattataagtgtgaggtattgtgtttggttagtaatagttttttattgaggggagattttttttttatattcggggatatgcggtaatattcggagatatttttggttgttttgattgtgggtaaggaggtgatttttattagggtgaggttagggatgttatttaacgttttgtagtgtataggatagtttttattgtaaagaatgatttagttttgaatgttagtagtgttaaggttgagaagtttacggttaagggttatagatttggttaggtgtggtggtttacgtttgtaattttagcgttttgggaggttgaggtaggagtagtgtttgaggttaggaattggagataagtttgggtaatatagtaagatttataaaaatttttataaaaaataaaaaagtattggttaggtgtggtggttttttttgtttgtgattttagtattttaggaggttaaggtcggaggattgtttgagtttaggagttcgagattagtttgggtaataacggtgagattttatttttataaaaaatgtaagaattagttaggtgtgatggtatgtgtttgtagttttaattatttgggagtttgaggtgggaagttggtttgagtttaggaggtagaggttttagtgagtcgagattatattattatattttagtttggttaatagagttaggttttgttttaaaaaagaaaaaaagaggttaggcgcggtggtttatgtttataattttattattttgggaggtcgaggtaggtagattacgaggttaggagatttagattattttggttaataaggtgaaattttgtttttattaaaaatataaaaaaattagtcgggtatggtggcgggcgtttgtagttttagttatttgggaggttgaggtaggagaatggcgtgaatttaggaggtagaatttgtagtaagtcgagattaagttattgtattttagtttaggcgatagagcgagattttattataaaaaaaaaaggaaaagaaaaaaagaaaggttgggggtagtggtttatatttgtaattttagtattttgggaggtttaggcgggtaggttattttgagtttaagattttaagattagtttgggtaatatggcgaaattttgattttattaaaaatataaaaattagttaggcgtggtggtgtgtatttgtagttttagttatttaggaggttggggtgggagaacggtttgagtttaggaggtagagattatgtcgttgtattttagtttgggtgatagagtgagattttagttttaatttaaaaaaataaagaaaaaaaaattagttaggtgtggtggtgtatgtttgtagttttgtagattaggtgtttgaggttgtagtgaataagaatttcgttattgtattttagtttgggtaatagagcgagattttgtttttataaaagtaaaaggaaattagttaggtatgttggtttgtgttttttgttttagttatttgggaggttgaggtaggaagattatttgagtttcggaaattggaaatcgaggttgcggtgatataggatcgtattattgtattttagtttgggtgatagagtaagatttttttttttaaaataaataaatataaattagtaaattaattaataaggatatagatttatattttgagttgttgattaggacgtttattagtaacgattttatagtagttttgtttgttaagtgttggtaaggtttcggttttttttttttttatgaatatttttttagttttattttttttaggttagaatcgaggtttagagaggcgaaggtattgggtttaggatatatagcgaggaagtgttagcgttggaatttaagtttaggtttattaaatattattttcgtttagaaggttttattttatttttagtaggtagagggaggatatagttaagagcggggttagtttaattggggaagtttaggtagagaggagaggtggttttttttagttttatttttagtagttgaggtttgtaatgtatagagggagggaggttgggtttttgggttttttttttttgagtgatttatttttatttaaggtataggggttatttgagggttagtaaggtaaatttaggatttagggttttggtttggtttgttttatggagaatttttgttttttcgttgtttattatggagcggagattttagatttagaggatttgttttttataatttttattttgttagagtagttagggatttagatttttatattcggagattttaatgttttgggcgttttcggaatttggataggatattcgtttgtaggatatagaatagataggtatacgttgggatagatagagggatagggtagtaggtttaagtaattatgagagagggatgattaggagcggggaagagattggggaggagatgggaaggggggattagggcgtgggtttagtttcgttgtaggaattatagtttgtttgggttatgtgtgggatgcgttaagcgtatgtatgtattcggggatttttatatagttttttttgggtcgggggtagaggtagggatttcggtttatttcggttttgaggtttgattttgtgtgatcggtaatattagatacgtttagtttttcggtaaggtcggtaggttattagtaggattgggaaggcgggagggatcgggggttatcggggagatataaaggggtcgggggtaggtgtagaaggagacgagaatttagttatataataattataggataatgaattggatggtgaggtgttaatggggatattgaggtatagatattttttagatttgggttatttgaattaaagaaggttggtagttattttggtcgtgtttgttatagacggggaagatgagtttaggttagtgatttttattaggtggtataaggggaatttggttgggcgggaggttggtgttagttacgtgtgtgtgttagtagggtgggggtgatttagttatgtttagttattatgtaaaaaagtaggattttatatatgggagtatttttggtttgttgattgagatattttttatttaggagaaggttttatttgatagtttaagggtgggagtgggggtttttattttttcgatttaatgtagtgattcgggtattttcgttaataggtgttaatttgggtggcgtttggaatattataaagttgtttagaggcgggggtggttggagttttgttatgcgggggaagggtacgggtcgggtttagtagttttttttttttttagggtattgcgttaggtacgtgttttaggtggagcggtatttgtcgggtatttaattttggggagggggatgagtttgggggcggacgagaggtattgggacgtttagttagttatagatattcgaagtagagttttcgtcgcgttttttttagttttttaggagaggtcgagtttgagggtgtagtaggggttgttttcgggatcgtttttaaattagtttagtttatatcgttatttgtcgagaagggggtttcgttggttttatagtttcggtttagggagggggcgtcgggcgtttcggaggttttcgtttttgttatcgttattcgagtttcgtttcgggggttgggggggttttttcggtagcgcgcgggcggggttcgtcggcgtcgttcggtcgtttcgggattttagacgtaggtgcgtttatttgtacggcgtcgttggttatgtttttttgtcgttcgttaggggttttcgcgcggagggaggggcggttagaggagcgcgcgtgtagtttcgggcgtggcggggagggggcgggcgcggcgtaatttttttcggcgcgcggttcgtttcggtttgttcggtatttcgtttcgtttggattaggtacgtcgcgttttcgtagacgggtttttagaggttttcggggttgcggggtttcgttcgttcgttttttcggtttttcgagttcggagtatttttatcggttttttatttttttttttttcgggtttcgagacgatcgtacgttgtcgaggggttttttattggagcgcgcgggaattcgaggagaacggttttacgcgtttaagtcgagagcggcggaggtttttgggtttttcgggatttttgaaaaaaataaatagaataattttttattttattttatttcggtgtatttgtaagttcgggacgtttgtatttgtggttttttatttaagggtatggaagttttttcgttatttggagataagttttgggcggatttgtatttaaattttagcgttttacgttttgagggagataaatttttttaggtattttatttgtgaaatgggaatgatgcgtttattttttcggtgttggtaaaatttaataagatagtgtaggttaagagttgagaatatattagacgttttataagtgttagttgttgttatttttaatgttatcgtaattgtttgtttgttgttttgttatttttggacggagtttcgttttgttgtttatgttggagtgtagtggcgcgatttcggtttattgtaattttcgtttttcggatttaagtgatttttttgttttagttttttgagtagttgggattataggtgtttattattatattcggttaatttttgtatttttagtagagacggggttttattatattggttaggttggtttcgaatttttgattttaggtgattcgttcgtttcggttttttaaagtgttgagattatataggtttgagttatcgcgtttagtttttattatcgttattgttattaaaagaggtttgaattttaatttgttgtttattttggggatttttgtggtttttgagttttagtttttttcgttataaaatgggtatcgttttttttttcggggttgttgtatgtagatggcgttttataaatgtagattcgtgtttaagcggagagtggaggtttttgcggaatttttaggggattttcggggtttgtagagcgtgtagttttgttcgtggtcgtcgtcggatttttattttttcggaaattaggcgagggagttaaattttggttttcggggtttcggtagggagcgttttttggcggcggtgtttgtatattggcgttttttgggattcgaggaagcgtcgtgggttgcgggtattttggttattcgtggttttgcgtggttttagtcgttttagaaattagggcgcgatgtttttttttttatttttttttttgagtaattttttgggagatattaataatagaaagagagaaggaggagaattatgttgatttagaatttatttagtcgggtatggtggcgtacgtttgtagttttagttattaggaggttgaggcgggaggatcgtttgagtttaagaggtcgagaatgtattattgtggggagaaattatgatgtttttgtattttagtttgggtgatagagcgagattttgtttaaaaaaagaaagaaaaaaaaaaacggttgggtgtagtggtttatttttgtaattttagttttttaggaagttaaggtgggtggtggatggattattggaggttaggagttcgagattagtttagttaatatggtgaaatttatttttgttaaaaaatataaaattagttgaacgtggtggcgtatgtttgtaattttagttattcgggtggttgaggtaggagaatagtttgaatttaagaggcggagattgtagtgagtcgagatcgtgttattgtattttagtttgagcgatagagtaagattttatttaaaaaaagaaaaaagagggggttaggtgtggtggtttacgtttgtaattttagtattttgggaagtagaggtaggcggattacgaggttaggagattgagattattttggttaatatggtgaaagcggcgggcgtttgtagttttagttattagggaggttgaggtaggagaatggtatgaatttaggaggcggagtttgtagtgtgtcgagatcgcgttattgtattttagtttgggcgatagagcgagatttttttttaaaaaaaaaaaaaaaaagagaaagaaaataataataatatatatataagtttagaatttatttatattttatttttttattttgtcgtatttagtttttattattatttattttaattagtagttattttttttttggttttttggttttgttttcgtttttatagtttgtttttataatagtttaagggagtagtgaatatatgagatggggtatgttttttttttgtttagaattttttatggtttttagtttatttagggaaaaaatttaggttttttttatagtttacgaagttttgtattattagtttttatttttttttattttttttttttgtttattttttttagttatatgagttttttaattgttttttaaatgtttgttgattgaataaaagaaagaattttgtggttgggcgtagtggtttttatttgtaattttagtaatttaggaggttaaggggggtgaattatttgaggttaggaattcgagattagtttggttaatatggtgaaattttatttttattaaaaattaaaaaattagttaggtgtgttggcgggtatttgtatatttagttatttgagagattgaggtaggagaatggtttgaatttgggaggcggaggttgtagtgagttaagatcgtatttttgtatatttttttgggtgatagagtaagattgttagaaagaaagaaagagagagagagagagagagagagagagagaggaaggaagggagggaggggaagggagaaaaagaaaagagaaaagaaaagaatttatggttaggtatggtggtttacgtttgttattttagtattttgggaggtttagacgagtagattacgaggttaggagatcgagattattttgtttaatacgatgaaattttatttttattaaaaatataaaaaattagtcgggcgtggtggcgggcgtttgtagttttagttattcgggaggttgaggtaggagaatggcgtaaatttgggaggtagaggttgtagtgagttgagattacgttattgtattttagtttgggggatagagcgagattttagtttgggggatagagcgagatttttttttaaaaaaaaaaaaaaaaaaaaaataaaaaaaaattttgtaagttagtttttttatatttatttatttatttgtttgtttgtttgtttagatagaatttcgttttcgttgtttaggttgaagtgtgatggtacgattttaattgaacgtaatttttgtttttttgatttaagtaatttttagttttagttttttgagtagttggaattataggtatgtattattatattcggttaattttgtatttttagtagatatggggtttttttatattgggtaggttggtttcgaatttttgattttaggtgatttgtttattttggttttttagagtgttgggattataggtgtgagttatcgcgtttagtttgatatttatttatttagagatagggttttattttgttatttaggttggggtgtagtggcgttatcgtagtttattgtagtttttattttgtaggtttaaacgatttttttgttttagttttttaggtagttgggattataggtgtgtattattatgtttggttagtttttttaaaaaatttttttgtgtgtgtgtagatattggatttcgtaatattgtttaatttggttttgaatttttgggtttaagtaatttttttgtattggttttttgaaatgttgggattataggtatgagttattaagtttggtttaaattagtttttttgttttagttttgtaggtgagtaagttgagaagttttttattttaattattaagttaggatgtttatggttttttttttgagaaacgaagtagttttttttaattttttagtttatttattttatagatgaggaggataaggtagagtgaggttttatgggggtcgaaggattgggttgtttggaattattttgtatagggatgggttttttttttttaatttgtgaggttttaggttgtttttttagatggagttggggaaattagttaaattttcgttttattttttaggtatttatttatttagtgaatatttatagagatttattggggaatttggtggtattggagataaagttgtagtttaggttttttttttttttttggagataaagttttattttgttatttaggttagagtgtagtgggtgagattatagtttattgtagcgtagttttaattttttaggtttaagttatttttttattttagttttttgagtagttgggattgtaggtatgtattattatgtttagttaatttttttttttttttttttttttttttttttgtagagatgaagttttattgtgttgtttaggatggttttgaatttttggttttaagtgattttttcgtttcggttttttaaattgttgggattatagttatgagttattacgtttagttatattttgtttgttaaaaggggagacgtggttaggtgtggtggtttaagtttgtaattttagtattttgggaggtcgaggtgggtggattatttgagattaggagtttgagattagtttggttaatatggtgaaattttatttgtattaaaaatataaaaaaaattagttggg

SEQ ID NO: 363 - DNA, 5946 bp, Artificial Sequence
  chemically treated genomic DNA (Homo sapiens)
  unsure (2..3, 13..14, 47)
tnnacgttttttnnttttcgagatagatttcgttagaagttgaagtntgtgagattagatgacgtggatatttttgaggttttgagtgttttttgttagtttgttttttagaagacggttttagggtcgggtacggtggtttacgtttgtaattttagtattttgggagttgacgcgggtagattataagattaggagatcgagattattttggttaatatggtgaaatttcgtttttattaaaaatataaaaaattagttgggtgtggtggcgggcgtttgtagttttagttattcgggaggttgagataggagaatggtatgaattcgggaggcggagtttgtagtgagtcgagatcgttttattgtattttagtttgggcgatagagcgagattttattttaaaaaaaaaaaaaaaaaaaaaaagaagatggttttagacgtagtttttacggtgggtggtattcgagttttttttttttatatttttgttaggtcgggagatttaaaggacgagtttttggttgtgtttttttagggtagtttggtttttgagcggtttataaatattaggttttagggttttaggggttttggtatttagtttttgaataaaaggtaaagataattggggagggcggggtttatagggattttggttgataggttttttagtttggtgtggacgggagtggtaggacggggaggagtttaggggagggtttagaggttttttttggtttttgttttagtattttttcgtgatggtttgagtgaatcgagattttgtttgtttttacgaggttaaaatagcgtgtggagtagttttatgaatagtttttagtattgttatggtgatcgtggttttggtgttgtttttttagacgtattagtttcgcgtcgcgtttgaaataattttagggagtcgagggcggtggaggtgggggtttattatttagtagtaattgttggatttcgtagcgtaggagtggtagggttcgtttgtagtgtaggagtggtagggcgtgttcgcggtgttgatcggttggttttgggttttggcgttgtgttttcgtataggtttcgggagaggttttttattttgagggcgtgtttagtttagagaaggggacgcgcggcgtgtttttagtggtttggattttggggtttcgtttatttttgttttgtttaggttttgttttttgttggtgtgtgtttttggattaggtatggagcgatttcggtttggtgttttatttatagaatagggttatgatttttacgttttagggatgggttgagggttttagaggcgatgtcggatatagacggttttttaggggaaggtattattgagcggggtgggggtttgaagggaggttgtgttttttggtgagatttagttagggaagttgtgtgtagagtttagtttggtagtgtttagtttttttttgttttttttgggtgtttttttagttgttttattttttaggttagttttttttttttttttttggtttttttagatattggatatagtaattttattttttttttattgtgttggttttgttgggagtggtagtgtttagtttttttgatagtatgtgcgcgcgtatatatatatatttagagagttttatatatatataggtatatatagagttatagatatataggtatatatagagagttatatataggtatatatagagagttttatatattggtatatatagaattatagatatatatataggtatatatagagagttttatatatatataggtatatagagttatatatatatataggtatatatagaattataaatatatataggtatatatagaattatagatatatatatagatatatatagaagttatatatatatatatatatatatatatatacggttttttatatatgggtatttgtggagaattatatatatatatgtagagattgtattcgtgacggttttatttttaggtacgttttttttggttttttttgtttttatattttttttttttttttttttttttaggttttttttttttttgttgtagagtgtgaagtattttttttttcgttttggtttttcgtttttttgggtattcggtgtttttttgaggggattggttgtggggtgggatatttaggttttagggtaatgatatagttttagaaagcggttgttaggatgagtattgggttattgaaagttttagaaattttgtttttggggtgagacgttgttgttcgtgggggtagttgagcgtggatacgtggaagattagtttttagaaaaaggaagagtattttagttatttttatggggtatggttatttcgttatttttgtttgtttttttagggttttttgagtatatttgagatttaattttcgttattttatttcgttttttgtgggtttgaggggtttttaggtatttgtgtttttagggagttttaggtggtttgggttagatttttacgttgagttttagatgttcgtttttttagggttataaatattggtgttggttttttttttttttagtttagatttttttttttttttgagtttcgttgtgttgtttaggttgtagtggtgtggtttcggtttattgtattttttatttcgaggtttaagtaatttttttgttttagtttttttagtatttaggattatagacgttcgttattacgttcggttaatttttgtagttttagtagagatgaggttttattttgttggttaggttggtttcgaatttttgatttcgtgattcgttcgttttggttttttaaagcgttgggatgaaaggcgtgagttatcgcgtttggtttagtttagataacgtttgtgtttagggagtttttgtgtgtaaagtttagggtttggtgttgaggttaatagagacgtaggagtttttttcgggcggtttagttggttgttgggtgttgagttttggacgtttttgttgaagggtatagggtagttgtttgatttaggattgggatagggttggaggtggtggtttgatattttttaagttttggggttttattggagttatttatttggtttttagattggtcggaaattggtttttattggaggtaggattgtaggggtaggggcgtggggtaggaagaggttaaaggtgaagtgatggtcgatttttattttggagtttttggtggttagatttttggattttaggttaggtagtaggcgtggatgttagtttggggcgattttagggtgatgggtgtgtgatttttttttattttttatttttttaatttgttatgatgttgtgggttgtggcgaagattagttaggttggtttttgtggggtgtttgggtattgggggtaggtgttgggtggttagttttagtaggaaggggtgggtagttggggcgtttgttttttaggtttaggtggtttagggtgattgggtgaggtttgtggggtaggtgggttttgggttgttgtgttagggtcgcggttgtggatcgattttgtgttttgtttgtattggagtttttgtttgggatgagaattttgttttttgaaatttgtttgatgaatttagataattttgatggggagttagtagtgttagcgaagagtagagtttgtatttttggttgggatattttatatttttttaggtttttttttataggttttgtgtttttgtttcgcgtttttgtgggtgttagaaagtcgtagatttttttgaaaatttagtgtgtttataagggtgtgattttcgttttgagttttaggaaatattagttgggttttgtggtggttttttttttttacgtagggtgagattagtttttgtttagtgtaggaggtgaggggggatttcgggtttttattagtagggaagtgttagtttttaaagggtgtttgggagttcgtgagtttttttagtttttggagtttaggttttgtttggggttgaaaagataaaatatattgattttgtgtgattcggttttaaaaaaaaaaaaatttgtcggggtttttgtcgtggttgtagtaacggatttagtgtttatttcggggtttaaagagtggttttttattatggaattatttaattttcgttattttatcgttggtatcgtcgaggtttgggggtaggtttgattggttttttttattttagtgaagtcggcggtttgtatcgattcggttcgcgtttatttcggggttatttatatttgggtgaatttgaacgagtgttcgattaggtaacgttgtcggattttttataagagggtattttttttttttttattttgtttttattttttttagttaggtaggtcgcgtttttttttttgtgtaaggaagttgatggtggttatttttttttttttttttttaatacggagtttttttttgtcgtttaggttggattgtagtggcgcgatttcggttcgttgtaagtttcgtttttcgggtttacgttatttttttgttttagtttttcgagtagttgggattataggcgttcgttatcgcgtttggttaattttttgtatttttagtagagacggggttttatcgtgttagttaggatggtttcgattttttgatttcgtgatttattcgtttcggttttttaaagtgttgggatgataggtgttaggtattgtgtttggtaatggtggttattttttaaattatggttatggttaatggttttattttgtgtgtgggaggggggagggggtggggttgttatattgtttttggggaaagttttatttatttaattaatgatttggttagttggtaattattttttaatttgatttaaatatgttttacggtaatagatgtttatgttttttttgttttagggatatttttattattagcgtggacgtcgttacgattttcgaggagttttgtgaggaagtgagagatatgtgtcgtttgtattagtagtattcgtttatttttaagtgggtggatagttgaaggtagtttttgttttatgttggttagaatttttagttttaggggatttcgttagggtagtttttgtgtgcggagtgtgtttagttaattttgtggggagatttaaagttgtggaattaaatttgttggcgttaatttttttttagtggggatggtgggaaagaggttggttatagatgtttattaaggatttgggttttagatgtttttaggaagggttttggttttgaattgtttgtagggggtttttttgtttttattttgggtaggtttttatttttttttttgatttttttttttatgttttgtttttttcggtaggtgtttttgaaaggatgggttttttatattttagggattacggggagggtataagtagttagggtttgtcgtgtttattttttgttttttagatatattttgaaaaataaggggatgggagacgtttagagagattttttttttttagggattggcgggtagtttttggttaaggatacggtcgtgcgggtggagtttgatagcgttttcgttgggttgggtatagttttgtagggtttgggttttgtatatttttatgtttttttttagttatagagggtaaggagtttttttttcgtttaggattgattttcggagagtgtttttagtttcgtttattgtttagttttttaagtggtgtttagggttgtaggtgtattgatttttttttcggggtggttttgacgttgtatcgggggttaggtgattttttagtgtggacggtcgtttttggatttttcgattttgttaggaggtggttagtttgagtatcgggattttgttttttattagatttttgtttggtgtgttgagcgggttcgttatagttttttttgtttcgggttttcggcgacgttagtatcgttttttgttttatttagg

SEQ ID NO: 364 - DNA, 5946 bp, Artificial Sequence
  chemically treated genomic DNA (Homo sapiens)
  unsure (5900, 5933..5934, 5944..)
tttgggtggggtaggagacggtgttgacgtcgtcgaaggttcgaggtaaagggggttgtgacgagttcgtttagtatattagataagggtttggtggggggtaaagtttcgatgtttagattggttattttttggtagggtcgggaggtttaaggacggtcgtttatattagggagttatttggttttcggtgtagcgttagagttatttcggaagggaagttagtatatttgtagttttgggtattatttggagggttaagtagtgagcggggttgaggatatttttcggaggttagttttgggcggagggagagttttttgttttttatggttggaaagggatatggaggtgtatagaatttaggttttgtagggttgtatttaatttaacgggggcgttattaggttttattcgtacggtcgtgtttttggttaagagttgttcgttagtttttgggagaaaggggtttttttggacgttttttatttttttgttttttaggatgtgtttaagagataggaggtggatacggtaggttttggttgtttgtgtttttttcgtggtttttagaatatgaagagtttatttttttagaagtatttatcgaaaaaggtaggatatgagaaaggaggttagaggaagaggtgaggatttgtttagggtggggatagggagattttttgtaggtagtttaagattagagttttttttaggggtatttggggtttaggtttttgataagtatttgtggttaattttttttttattatttttattggggaaaagttggcgttaataagtttaattttatagttttaagtttttttatagaattggttgagtatatttcgtatatagaggttgttttggcgaagttttttgaggttgaggattttggttaatatgggataagggttatttttagttgtttatttatttgagggtgagcgggtgttgttggtgtagacgatatatgttttttatttttttatagagtttttcgaaggtcgtggcggcgtttacgttggtgatgaagatgtttttggggtagaggggatatgggtatttgttatcgtggggtatatttgaattaaattaaaaaatgattattaattaattaaattattgattagataaatgaaattttttttaaagataatatgatagttttattttttttttttttttatatataaaatagaattattaattataattatagtttaaaaaatggttattattgttaagtatagtgtttgatatttgttattttagtattttgggaggtcgaggcgggtggattacgaggttaggagatcgagattattttggttaatacggtgaaatttcgtttttattaaaaatataaaaaattagttaggcgcggtggcgggcgtttgtagttttagttattcgggaggttgaggtaagagaatggcgtgaattcgggaggcggagtttgtagcgagtcgagatcgcgttattgtagtttagtttgggcgatagagagagatttcgtattaaaaaaaaaaaaaaaaaaatgattattattaatttttttgtatagagaaaaaagcgcgatttatttggttggaaagaatgaggataaaatgggagaaaagaaagtgtttttttgtgggaggttcggtaacgttatttggtcgggtattcgtttaagtttatttaaatgtgggtgatttcgggatgggcgcgagtcgggtcggtgtaggtcgtcggttttattaaggtaaaggaaattagttagatttgtttttagatttcgacggtgttagcggtgaagtggcggggattaaataattttataatgaaaggttattttttagatttcggagtgggtattgggttcgttgttgtagttacggtagaagtttcggtagatttttttttttttaaaatcgagttatatagagttagtgtgttttatttttttagttttagataggatttgaattttaggggttggggaagtttacggatttttaggtattttttgaaggttggtatttttttgttgatagggattcgaggtttttttttattttttgtattgagtaagagttggttttattttgcgtggaggggagggattattatagggtttagttggtgttttttgaaatttagagcgggaattatatttttgtgaatatattgaatttttagaaaaatttacggttttttgatatttataagagcgcggggtaagagtatagggtttataaaaagaagtttgaaggggtgtgagatgttttaattagagatataggttttgtttttcgttgatattgttggttttttattaaggttatttgaatttattagataagttttaagaaataaagtttttattttagataagaattttagtgtaaatagaatataggatcggtttatagtcgcggttttgatatagtagtttagggtttatttgttttataggttttatttagttattttgggttatttgggtttgggggatagacgttttagttatttatttttttttgttggaattggttatttagtatttgtttttagtgtttaagtattttataggaattaatttggttggttttcgttatagtttatagtattatggtagattaggaaagtaaggaatggaggggggttatatatttattattttggggtcgttttaagttgatatttacgtttgttgtttgatttggagtttaaaagtttgattattaggaattttagagtgggagtcggttattattttatttttgatttttttttgttttacgtttttatttttatagttttgtttttagtggaagttagttttcggttaatttagaggttaggtgggtggttttagtaaaattttagggtttgggaagtgttaggttattatttttaattttattttaattttgaattaaatagttgttttgtgttttttagtaggggcgtttaggatttagtatttagtagttagttgggtcgttcgggagagatttttgcgtttttgttggttttagtattaagttttgggttttgtatatagaagttttttgaatataaacgttgtttgagttgggttaggcgcggtgatttacgttttttattttagcgttttgggaggttaaggcgggcggattacgaggttagaagttcgagattagtttggttaataaagtgaaattttatttttattaaaattataaaagttaatcgggcgtggtggcgggcgtttgtagttttagatattagggaggttgaagtaggagaattgtttgaatttcggagtgaaggatatagtgggtcgagattatattattgtagtttgggtaatatagcgagatttaaaaaaaaaaaaaagtttgagttgaaagagggaagagttagtattagtgtttgtggttttagaagagcgggtatttgagatttagcgtgggagtttggtttaggttatttgggattttttgaaaatataggtgtttggggattttttaggtttatagggggcggggtggggtggcgaggattggattttaagtgtgtttagagggttttgggaggataggtaaggatgacggggtggttatgttttatgggggtgattgaagtgttttttttttttttaaagattagttttttacgtgtttacgtttagttatttttacggatagtagcgttttattttagggatagagtttttagggtttttaataatttagtatttattttggtagtcgttttttggaattgtgttattgttttaaggtttgagtgttttattttatagttagtttttttagagaggtatcgggtgtttagagggacgaggagttagaacggggagaagggtattttatattttgtagtagagaggaggaggatttgggaggggagagaggagagaagaatgtaggagtaggaagaattagagggaacgtgtttagaaatgggatcgttacgaatgtagtttttgtatatatgtgtgtagttttttataggtatttatgtgtggggggtcgtgtgtatgtgtgtgtgtgtgtgtgtgtatagtttttgtgtgtatttgtgtgtgtgtttgtagttttgtgtgtatttgtgtgtgtttgtagttttgtgtgtatttgtgtgtgtgtgtagttttgtgtatttgtgtgtgtgtggagttttttgtgtgtatttgtgtgtgtgtttgtagttttgtgtgtattagtgtgtggagttttttgtgtgtatttgtgtgtaattttttatgtgtatttgtgtgtttgtagttttgtgtgtatttgtgtgtgtgtggagttttttgagtgtgtgtgtgtgcgcgcgtatatattgttagaggggttgggtattgttatttttagtagagttaatatagtgaggaggaggtggggttgttgtgtttagtgtttggagaggttaggggaggaaagaggaggttggtttggaagatagagtagttgggagggtatttaggggaggtagggaagggttggatattgttaggttgagttttgtatatagtttttttggttgagttttattagaaggtatagtttttttttaggtttttatttcgtttaatggtgtttttttttggaggatcgtttgtgttcgatatcgtttttgggatttttagtttatttttaggacgtgagaattatgattttattttgtggatgagatattaggtcggggtcgttttatgtttggtttagggatatatattagtagggggtagggtttgggtagggtagggatgggcgggattttagggtttagattattggggatacgtcgcgcgtttttttttttggattggatacgtttttagagtggagaatttttttcgagatttgtgcggggatatagcgttagggtttaagattaatcggttagtatcgcggatacgttttgttatttttgtattgtagacgggttttgttatttttgcgttgcggggtttaatagttgttgttgggtggtgggtttttatttttatcgttttcggttttttggggttattttagacgcggcgcgaggttggtgcgtttgaggaggtagtattagaattacggttattatggtaatgttgggaattgtttatgggattgttttatacgttattttagtttcgtgaaaatagataaaatttcggtttatttaaattattacggggagatgttgaagtaggggttaggaaaggtttttgaatttttttttgagttttttttcgttttgttattttcgtttatattaggttggaggatttgttagttaaggtttttgtgagtttcgttttttttagttgtttttgttttttatttaaagattgagtgttagggtttttggagttttgaggtttggtgtttatgaatcgtttaaaggttagattgttttgggaagatatagttaagggttcgttttttggatttttcggtttggtaaggatgtgagagaaggggattcggatgttatttatcgtgggagttgcgtttgggattattttttttttttttttttttttttttttgagatggagtttcgttttgtcgtttaggttggagtgtagtggggcgatttcggtttattgtaagtttcgtttttcgggtttatgttatttttttgttttagtttttcgagtagttgggattataggcgttcgttattatatttagttaattttttgtatttttagtagagacggggttttattatgttagttaggatggtttcgattttttgattttgtgatttgttcgcgttagtttttaaagtgttgggattataggcgtgagttatcgtgttcggttttgggatcgttttttagaaagtaggttgatagaaggtatttagagttttaaagatgtttacgttatttgattttatangttttagtttttggcgaaatttatttcgaaggnnaaagaacgtnng

SEQ ID NO: 365 - DNA, 5952 bp, Artificial Sequence
  chemically treated genomic DNA (Homo sapiens)
ttaataggttttgtaggggtttaagagcgaaaatcgttgggttggatggcgtttaatagttttggttacgttttttaattttagttttgttgtttggtttgttgcgttttagtgagaggtagcgggtggacgtttttgtggttggggcgtttggtagcgtttgtaggattttttttgggaagttagcgtggttttttggaatagtgaaggttcggagttttatagagaagagtgtgtgaaattttaatttatattttttaaatgtttttgagtttaagtttggttttgttaacgatttatagtatttgtgttttttagagttgttattagttgagatttgttaattttttgggggatttttatagagttttaagtagttttttttttttgttttgtgttaattaatttgtatttatagtggacggtagtaatttttagtatattggaaatgtagcgagtttaagaggaagataaaaagaaattattttttaaatttattttagattatttttttaaagtgttagttttattttttgataaggttttacgtggtatatttagttgtttgtagtaaatattagggttaaaaggggaaattgtagtaataattggatttaatttgtttttttattattgtaagtgtagattttttttatttataatgcgagtggtgtttgtggataggtgtttaaaggagtagaaggtaatatttttttttattttattatttaaaaataaagtttttaaaataaattttttttttttttttttttagtttaagtgtaagagttttaattattagggttaggaagtagtttttgttttttaaattttaattaaattataatgtatatttaaatatatatttagttttaaaattgaatttaatatatttgtaaaaattagttgatgtatgattttttttatataattaatttaaaattatatatatatatatatatatatatatattggagggtgtgtgtatatatatatatatatatatatatatatatatatatatatatatatatttgagatggagttttgtttcgttatttaggttggagtgtagtggtatatttttggtttattgaaatttttattttttaggtttaagtgatttttttgttttagttttttaagtagttgggattataggtatgtattattatgtttagttaattttgtattttttagtagagattaaatattatgttggttaagttggttttgaatttttgatttttaggttttttagtgtgttgggattatagacgtgagttattgggtttggtttaaaataatttgtataaggttaattatttgttattcgggtgatgaagaatttggatttagaaaataaattgtaaagagtttgttaaatttatttttaataatttttataatgtgttgatttaagtttttaatttacggatgatttttatatgtgatgtttttgttttttagtgtggtgggtagtttagcggacgagttattagggagtgttttggaaatgttgaatttttggtttcgttttaggtttagggaatagaaatatttatttaatagggtttagttggtttatatgtatattaaagtgtgggagaggttgtttttatgatgatgatgatgatgataatgatgatataatttatattttttaagggggttttgagatgataaggtttttttgttagagggttttggtgttttaataatgattgagaaattatgaattggatttttttttttttattagagattataattaagttagtttagtattgttaaaaagtttgtttattttttaaattatgtgtttgaagtattatatgtttaaagtttacgtttatagtagggtaggttgtgtggtttacgtgtgttatgttttagtaattttgagtaatatatttatttttttttattttatttttatttttggtattgtttttttatgggttatattatattttaatttagtatatgagagttatcggttgaagttttttgagattagtttaattattttattttcggtatagtttggttatttgtatttgtagtatttaatgtttaaggatttttattagatatttttttaaagtttgtttttaattttttatttgtgaaagtaaggttagaaatgtttttttagtttcgaagaatgatttagtaaatattttttttttgaaggtattattttattttaggaaatcgaggataaaaaattagagtcgattaaaaattaagagttgattaaaattacgtgttatttagaataaatatagttgaggttgttgtttttaatgtttttaaacgaatgaaggaggaatgtgtagtatggagagcgcggtttttaaaaagtaatttttggattttaaaaataaaataaataattttggtaggtattttgaatttggtataattttttatttttaagagagtttaaataaatttgtgtaattaggaatttgaaataaggaaattaattaaagtaagaggttttgttttttttaaaaataaatgataggatttgatggttgttttggtatttagttcgttgttttttttttagggtggagtgagttggttttttttttgtgggaagttgattttgtgaataggaggatttgaaattaggaattgttttagaattgtggttttagttttaaataagaattgattttatagaagttaaagacgtgaggaggattttggttattttagtttttgttgagtatatatattatcgttgtgatggagcggattgattaggcgtatggggtggaggtgaattggaggggtttgagttttaaggatttatttttgtagtaaggtacggttatttatttatgtttgtgtgtgtttttttagtttttgtttatgtgtgatatttgtgttcggtagaataggtttagtatggaaggagtgtgagttttaggtttttttttttagtataggggacggataggtgttttcgtaggaatagggtttagaggttgtgtagggggtaggtttttatgtttgtaggagaaattttggtttgaatttgttagcggttagtttttatcgtttatggtaattgagtgtgtagcggcgtagagaatatgttatttaataattgttttggggttttgttttgtaggtttaagatttaggttatcgtgtagtttttaggatggggtatttatttttttgttttttgaggtattgaggttgaagtttttagaattttttgggtgattatttttttttttgttattaatttggttgtggatttttttttgcgaggaatgtagttatgtgtgttaatttttagaaatgttttgcgttgagagtgtggttaaggtaaggaagggacgggtttttaaaacgttgggttggggttgtgattgaaagttttagaattggggaggatttattggggggttttatattttggatcggtaggtgaaggggattgagtaatatttatttttacgtgtagtgggtagggtggggttgggttatttggttaaggtggggttgtatgttatttaacggagttttttgtttggtagtttagggaagggggaggggcgtagggaataaggaaggggtatagggaagggggaaggggtatagggaaggggagggcggtttagggaaggtggaattattagaggattttttaatttataattttttttagattttttagtttttttgtttatttatttgtttttgggtatttgtttcgtgttagatatatagagggtatgggaggaaatagtagagggtggaaataggcgtgtgttcggtttttgaattttaggagagggaaatatatatttaatttatagttattgtatagtgtggcgagtttcgaaaaggacgtttgggtagtttcgggagagtttggggtttttatagggattttagcggatgaataggcgtttgtcggttggtgaagtagtattgaaggtattgtgttttgtaggaatgagtgaaagatattgcgcgtttatattatatttggtttttgttggcggtgcgattttcgtttagtggttttgggtttttcggttttggtgtttagggtgtttacgttttcgcgggatcgttttttagcggggtggtgttttttggatttatttttttgtgtttaagataggcgtggacgtggagtcgaacgttaatttttgttagtttgttcggtcgcgggggatgcgtggtttggggtcgtttggttatttaggtatcgcggatttttggagtttttttttgggtggggattgaggcgttgtttttgtttcgcgttttttttagggtttggttagtcgcgttggttttttttgttcgttttcgtttttgttgttttcgttgtttttttttttttttcgatttttttttgcgttttttgtttgtggttacggacgttacggtttgttttttacgtagtcgggtttttcgcggacgtcgttatttttttggaagttttcgtttttcggcgttcggtagttttgtttttagggacgcggtgcgtgcggtgagtattcggtttaggggaggcgtcgggtttaggggaggttttaaggggaggtttcggtttcgttgttgttttcgcggttagagagttttttgtgatgacgtcggtttgatttttagtttagagttgtgggtttggtttaggtgagagttgggtttcgggattaagttaggaggtttcgtacgtggtcgggttaggggcgtagcgttttggttttagaataatcggttttatttcggaaaagtcgggtcggaggagtttgtttgatcggcggtttttttgaaatttattagggggttaggaaggtagtttcgggggtatttttttttttttttttagttgatcgcgttttttttttgttttttcgtaggttgtttgttcgaggagggtttttgcggagcgttcgaggtttgtgtgaacggtgagtgtggggttttggttgttgcgttttggtttgttttttttttgttcgtcgtgcgtagcgtttagtttggtgagtttcgtcgttggtttggagttggggtcgttcggggcgcgttgtcgagaggaggcggatggaatttcggagttatgggttgcggtttcggtgggtggggagaagaggttgttcgggttttgggcgtttatcgttcgtattaatttttgttttttgattttgttttgttttgtttttcggtaagttttttatttttttttaaaaaatttttttgagatagagtttcgttttgtcgtttaggttggagggtagcggggttatttttttttattgtaattttcgttttttgggtttaagcgatttttttgttttagttttttgagtagttgggattataggcgtgcgttattgtattcggttaattttttgtatttttagtagagatagggttttattatgttggttaggttggtttcgaatttttgattttaggtgatttattcgtttcggttttttaaattgttgggattataggcgtgagttatcgcgttcggttaggtttttcgttttttaagttattgattttttttttttattaggcggataagaaaatagtgtaaacgttgtgtttttaggttgggttgaaagtttatgaggacggtagttattatgaaatacggcgagtagcgggttttgtagagttttttttttttagcgcggttaggtagagggtattttttagggtagacgttattcgggtttgttatgttggtgaattgggcgttgtcggtttgaacgcgtaggggagggttaaattttagtatttttagaaaagcgttgggcggacgtttttttttaagttaggggttgcgtgtgggttcggggcgtattgagcgaggttttttttttttttagttttttgcgtatttgtttttagattgtgggtaggagcggatttaattttagcgaggatggcggggttgtt

SEQ ID NO: 366 - DNA, 5952 bp, Artificial Sequence
  chemically treated genomic DNA (Homo sapiens)
ggtagtttcgttattttcgttaggattaaattcgtttttgtttatagtttgaggatagatgcgtagggagttggggaaagagaaggtttcgtttagtgcgtttcgggtttatacgtagtttttgatttggagaaaggcgttcgtttagcgtttttttgaggatattggagtttaatttttttttgcgcgtttaggtcgatagcgtttagtttattagtatgataggttcgggtggcgtttgttttgggagatgttttttgtttgatcgcgttggagggaaggggttttgtaggattcgttgttcgtcgtattttataataattgtcgtttttatgggtttttagtttaatttgaaaatatagcgtttgtattgtttttttattcgtttgataagagaggaaaattagtggtttaaaggacgaaaaatttggtcgggcgcggtgatttacgtttgtaattttagtagtttgggaggtcgaggcgggtggattatttgaagttaggagttcgagattagtttggttaatatggtgaaattttgtttttattaaaaatataaaaaattagtcgggtgtagtggcgtacgtttgtaattttagttatttaggaggttgaggtaggagaatcgtttgagtttaggaggcgaaggttgtagtgagaggagatagtttcgttgttttttagtttgggcgatagagcgagattttgttttaaaaaaattttttaaaaaaggatgaaaaatttgtcgaaggatagagtaaaataaaattagaaagtaagggttggtgcgagcgatgggcgtttagaattcgggtaattttttttttttatttatcgaggtcgtagtttatggtttcggggttttattcgttttttttcggtagcgcgtttcgggcggttttagttttaggttagcggcggggtttattaggttgggcgttgcgtacggcgggtaggagaggggtagattagggcgtagtagttaggattttatatttatcgtttatataggtttcggacgtttcgtagaggtttttttcgagtaggtagtttgcggggaaatagagaagagacgcggttagttggaggggaggaggggggtgttttcgaggttgtttttttggttttttggtgaattttagagaaatcgtcggttaagtaggttttttcgattcggttttttcgagatggggtcgattattttgaagttagaacgttgcgtttttgattcggttacgtgcgaggttttttggtttagtttcggagtttagtttttatttggattaggtttatagttttgggttgagggttaagtcggcgttattataggagattttttggtcgcgggagtagtagcggggtcggggtttttttttgaggttttttttgggttcggcgttttttttggatcgggtgtttatcgtacgtatcgcgtttttggaagtaaggttgtcgggcgtcggggagcggaggtttttagggaggtaacgacgttcgcggggagttcggttgcgtgggaagtaaatcgtggcgttcgtggttatagataagagacgtaggagagggtcgggagaggaaaggaggtagcggaggtagtagagacgaagacgggtaggaaaggttagcgcggttggttaggttttggaggagacgcggggtagaggtagcgttttagtttttatttaggaaggggttttagaagttcgcggtgtttgggtggttaggcgattttaagttacgtatttttcgcggtcgagtaggttggtaaaggttggcgttcggttttacgtttacgtttgttttaaatatagagagatgggtttagaaagtattatttcgttagggagcggtttcgcgagggcgtgagtattttggatattagaatcgggaggtttagggttattaggcgggagtcgtatcgttagtaaaggttaggtgtggtgtgaacgcgtagtgttttttatttatttttgtaaagtatagtgtttttaatgttgttttattagtcgataaacgtttgtttattcgttaagatttttgtggaagttttagattttttcggggttgtttaggcgtttttttcgggattcgttatattgtgtagtgattgtggattgagtgtgtattttttttttttggagtttaggagtcgggtatacgtttgtttttattttttattgtttttttttatgttttttgtgtgtttggtacgaggtaggtgtttaggagtaaatgggtgaataaagaaattgaggaatttggagaaagttatgaattaggggattttttggtgattttattttttttgagtcgttttttttttttttgtatttttttttttttttttgtgttttttttttgttttttgcgttttttttttttttttgggttgttaagtaaggggtttcgttgggtgatatgtagttttattttggttaggtgatttagttttattttgtttattgtacgtaggggtgggtgttgtttagttttttttatttgtcgatttagagtatggagttttttagtaagttttttttaattttgaggtttttaattatagttttagtttagcgttttggggattcgttttttttttgttttggttatatttttagcgtagggtatttttggaggttgatatatatggttgtatttttcgtagaggagggtttatagttaaattggtagtaggaggagggataattatttagaagattttggaaattttagttttaatgttttagagagtaggaagatgggtgttttattttgaggattgtacggtggtttggattttagatttataaggtaggattttaaaatagttattaagtggtatgttttttgcgtcgttgtatatttaattgttatgaacgatgggagttgatcgttggtaagtttaggttaaggttttttttgtaggtatgagggtttgttttttgtatagtttttgggttttgtttttgcggggatatttgttcgttttttgtgttgggaggaggggtttgaggtttatattttttttatgttgggtttgttttgtcgggtatagatgttatatatgagtaggagttgggagggtatatataaatatggatgagtgatcgtgttttattgtaaaggtggatttttggggtttaggtttttttaatttatttttattttatacgtttggttagttcgttttattataacggtgatgtgtgtgtttagtagaggttgaaatggttaaggttttttttacgtttttggtttttgtaaagttagtttttgtttgaagttggggttataattttaaggtagtttttgattttagatttttttgtttataaaattagttttttatagaaaaagaattagtttattttattttggaagaagggtagcgagttgggtattaggataattattaagttttgttatttatttttaggaaaaataaaattttttattttgattaatttttttattttaggtttttaattgtatagatttatttaaatttttttaagagtaagaaattgtattaaatttaggatatttattagaattgtttgttttatttttaaagtttaggagttattttttgggaatcgcgttttttatgttatatattttttttttattcgtttgaagatattaagagtagtaattttaattatatttattttaaatggtacgtggttttaattagtttttggtttttaatcggttttggttttttgttttcgattttttgaaatgggataatatttttaaaagaaggatgtttgttgagttatttttcgggattaagaaaatatttttaattttgtttttatagataaaaagttaaagataagttttgaaaaagtatttgatgaaaatttttgaatattaaatattgtaggtgtaggtagttaggttatgtcggggatgaaatggttaagttaattttagagaattttaatcggtaatttttatgtgttggattaaaatatagtatgatttatgaaagaatagtattaaaagtgagaataaagtgaagaaaggtagatgtattgtttaggattgttgagatatggtatacgtgaattatatagtttattttgttgtaaacgtgaattttagatatgtggtattttagatatataatttaaaaggtaaataagttttttagtagtattgggttgatttagttgtagtttttgatgaaagaggaaaaatttagtttatagttttttagttattgttaaagtattaaagttttttaataaaaagattttattattttaagatttttttaggaaatgtgagttatattattattattattattattattattatggaaatagttttttttatattttgatgtgtatgtgaattagttgggttttgttaaatgagtatttttattttttgggtttgggacggagttaaagatttagtatttttaaagtattttttggtgattcgttcgttgggttgtttattatattgagaagtaagggtattatatgtagaaattattcgtaaattgaaaatttgggttagtatattataaaaattgttaaaagtaaatttaataaattttttataatttgttttttggatttaaattttttattattcggataataaatgattggttttatataaattattttaggttaggtttagtggtttacgtttataattttaatatattgggaggtttagaggttaggagtttaagattagtttggttaatatggtgtttagtttttattaaaaaatataaaattagttgggtatggtggtgtatgtttataattttagttatttgggaggttgaagtaggagaattatttgaatttgggaggtggaggttttagtgagttaagaatgtgttattgtattttagtttgggtgacggagtaagattttattttaaatatatgtgtgtatgtgtgtgtgtgtgtgtgtgtgtatatatatatatatatatattttttagtgtgtgtatgtgtgtgtgtgtgtgtataattttaaattaattatgtggggaaaattatatattaattaatttttataaatgtattaggtttagttttaagattggatgtatatttaaatatatattgtaatttaattaagatttaaaagataaaaattgttttttggttttgatgattagaatttttatatttgagttaaaaaaaaaaaaaaaaaaggtttattttgaaaattttatttttaagtgatgagataggaaagaatattgttttttgtttttttagatatttgtttataaatattattcgtattgtgggtgagaggaatttgtatttataataatgaaaagataaattagatttaattgttattatagtttttttttttaattttgatatttgttataggtaattggatatgttacgtgagattttattagaggatgggattgatattttaggaggatagtttgaggtgaatttgaaaaataatttttttttattttttttttgagttcgttatatttttagtgtgttgggaattattatcgtttattgtagatataggttaattgatatagaataaagaagaaaaattatttaaaattttgtaaaagttttttagggaattagtaagttttagttggtggtagttttggagggtataggtgttgtgggtcgttaataaaattaggtttgggtttaaaaatatttgaaaaatgtgagttgaagttttatatatttttttttgtggaatttcgaatttttattattttaaagggttacgttggttttttaggaaggattttgtagacgttgttaaacgttttagttataaaaacgtttattcgttgttttttattggggcgtagtaaattagataatagaattgaagttgaaagacgtgattagggttgttaaacgttatttagtttaacggttttcgtttttaagtttttgtagggtttgttag

SEQ ID NO: 367 - DNA, 6014 bp, Artificial Sequence
  chemically treated genomic DNA (Homo sapiens)
ttatagaaatttttatttttggttaggtgcggtgttttaggtttgtaattttaatattttgggaggttgaggcgggcggattacgaggttaggagatcgagattattttaatttagtgaaattttttttttattaaaaatataaaaaattagttaggcgtggtggcgtatatttgtagttttagttatttaggaggttgaggtaggagaatcgtttgaatttaggaggtggaggttgtagtgagtcgagattgtgttattgtttgggtaatagagtaagatttcgttttaaaaaaaaaaaattattttattttataaaatagtattttatatgtaagtagtattttagggtttttagtgtgcgttaaattttgttttattttttttttatttagttttatattattttggtaggtggttaaggtagtgttattatttttattttatagataaggagatattttttggttagaggtttgggttttattttatttttttagattttaattttagtgtagtttgttattagtttagttgttatttatttttttttttttgagacggagtttttttttgttatttaggttggggtgtaatggtacgattttggtttattgtaatttttattttttaggtttaagtaattttttttttttggttttttgagtaattgggattataggcgtttattattaggtttggttaatttttgtatttttagtagagttagggttttattatgttggttaggttggttttgaatttttgattttaagtgatttatttgttttagttttatagaatgttgggattataggtatgagttattacgtttagttttagttgttatttttgaattttatttattgaaaggtattttattttatttgtaaatttagtttagagttattgggttggaatggtttttatgttgggttttgagatttaggaatatgggtattttttgtttattagagataatttgttttttgaaattttgaagtttttttatttttttgtttttattatgtttaaaatatttagtattttaatgttattttattttagagtaattagttttcgttttgtgtttttttttattttttagttgcgtgtttagaaggatagttgttttatagaatggggatttgtttataatattttatatatatttagcgtgatatgggggaatatagtatttattttttttgttttattaggtaattgttgtttattaaaatatttgttatattagtgagagttaaattgttgatttttgttattaggaagaaaatatattttatttagtttttttttaagttttttttattgtatatttataaaatatttttttggtgttttgtggggttgtatatatgtatatttaggaaagtaggatgttagtgtgtataagagttttgataatggatttttttttttatttagatggtttttgagtagtggttattgggagattttttggtttttgtatttggtttagatgtatatcggtgggtgtttatttttttatttttggtttatgtttggtgtatttgagggtagtttgaaggttataatagagtttattttttagtagaattatattttttaaaatagattaagaagtgtaaggttattttttttatttttttttggatggggaaagtataagagtatttttttaatttttttttttattttttagattttatttattattatattttggtgaaattatttattttttttttgttttagaattaggtgaataagatttttgtagggatgggtgagttatttttggattaatagttggattaagatatttttatattaattttgtttagattttgtttttgggagaagaggtatagagtaaatattttaagtgtgtgtttagataaaaaagtatttaggaatttttcgtttatgggagtaaatgatttatttttgagaaaaaaaatttttgggagattattgggatttatttgtgtttttttttttgaattaaataagaataatattgagattggtttttagattttttaagtgattatttattattgagtggtggttatataggtgattaaaaaaataaaatttaaaaaaatgggaaatgttggtcgggaacggtgattaacgtttgtaattttagtattttgggaggtcgaggtaggtagattttttgaggttaggagtttgagattagtttgaataatatggtgagagaatagatttatagtaatttttattttcgttcgggtatagtggttttattaattttgtttttattaaaaatataaaaattagttgggtgtgggggtaggtgattacgtttttagttattcgggaggttgaggtaggagaattttttgaatttaggaggcggaggttgtagtgagtttagattacgttattgtattttagtttgggtgatagagcgagattttattttgaaaaataaaataaaataaaataaaaaatagggaatattttacgaatttgtatgttatttttgtataggggttatgttaattttttttgtattttaattttagatatgtgttgttgaagcgagtagagattatttttttaaaattaatttttatattaaattaaattaattaatttatttatttgagattagtttttattttgttatttaggttggagtttagtgtcgtgattttggtttattgtattttggatttcgtgggtttaagttatttttttattttagttttttgaatagttgggattataagcgttcgttattacgtttagttaatttttgtattttttgtaaagattaggttttattatgttgtttaggttagttttgaattttgagtttaagtaattagtttgtttcggttttttaaagtgttaggattttaggcgtgagttattgcgtttagtttattttattttattttttttgtttttgttgtggaggtaggtgaatttttttttttttttttttttttgagatagagtttcgttttgttgtttaggttggagtatagtggtacgaattcggtttattgtaagtttcgtttttcgggtttatattattgttttgttttagttttttaagtagttgggattataggcgttcgttattatgttcggttaatttttttgtatttttagtagagacggggttttatcgtgttagttaggatggtgtcgattttttgatttcgtgatttgtttagtcggtagtaggtgattttttaaattaaaaaatatatttttttaaatagaggtggggttttgttatgttttatagggtggtttttaatttttgtgtttaagtgatttttttattatggttttttaaagtgttgggattataggtgtgagttattatatttggtttggtgatttttttttttttttaattttataaatatttttttggttgtgtattgtggtgtgtttttttagtaatagttatttaggaggttgaggcgggaatattatttgagtttaggagtttgagtatagtttgggtaatatagtgagattttattataaaaacgaaaagaaaataaaaagtaaataatttttttatatttttaaggtttaatataatgaatatttattattattaaaattatattttaaagttttattaaaaataaaatataggttgggcgtagtggtttatgtttgtaattttagaatttgggagattgaggtaggagaattgtttgaatttaggagtttgagattagttttggtaatatagtgagattttttttttataaaaagttaataaattagttaggtatagtggtatgtatttgtaattttagttgtttaggaggttgagatgagagaattttttgagtttagtaatttaaggttgtagtgagttatgattatgttattgtattttagtttggttaatagagtaagatttagttttaaaaataaaaaataaaatgaaataaaatataaagtaaatatataagtagcggtattttaattttttagtattgtaagatataagaagttttaggttaggtgcggtggtttatgtttgtaattttagtattttgggaggttagggtaggtagatcgggagtttaaggtttagtttgaggttgggagttcgagattagtttgattaatatggagaaatttcgtttttgttaaaaatataaaattagtcgggcgtggtggtatatgtttgtaattttagttattcgggaggttgaggtaggataatggcgtgaatcggggaggcggagtttgtagtgagttaagattgtattattgtattttagtttggacgatagagtgagatttcgttttaaaaaaaaaaaaaaaaattattttttttgaaatgattaaaatgtgaaatggttgaaaatttagatttaaaagggaagtattagggttgtgtaaggtggtttgtgtttgtaattttagtattttgggaggttaaggttggaggattgtatgagtttaggagtttgagattagttttagtgatatagtaagattttgtttttataaaaaaatttaaaaattagttgggtatgatggtgtatatttgtagttttagttatttaggaggttgaggtaggaggattatttgaatttgggaggttaaggttgtagtgagttattattttgttgttttgtattttagtttgggtgataaacgagattttggtttaaaaataaaaaaaaagattaaaaatagtatttttttataatgttttgtgaaggtaaattagttgattgttgtttttaagaatagtttatatggaaaatttttaagttggaaatatttttagaattatatttttatttaattttatttttttaaaaaaagattaaaagaatttattttttttattatttattgtgaaataggaggttaattttttattttattatagaaggaataaagattttgtgtttttgttggatattagatgtagaaatattatgttaatattagattttatatatttagtttgtgataattaaaagatgattattttttatggtaattagaataaagtttttgagtaaagtattttttatttaaaattattttaagttggtaagttaaaatatcgaaggagatatggtttaaagtaattaaatagtttgtaaatttgtaaagtggttgtatggttttttaatttataattaaagtgtttgatgaagatggttttttggttttggggtagttaattgtattgtttgtttgtttgatagtgtaaattataggttttttatgttttgatttttgggattttttgtttttgatttagtttaagtgttatgttattgtgtaatatatgttaatgttttaaaaagtatatgtatatatatttaatgatgtatattattttttgtttttttggagttagtgttagtgttgttatttatgttaaagaatggtttttatttttttttattgtgttttttgtagtttttttttgggtataagttatatttattgtttttttgagatttattttagaattaaattattttttgtattgaaatttagatatattagttattaataattattgttatttttgttatataaaatattagaagtgttttttgatttgttataaagttgatattttttttgttttttattggtaataaaatatatatgagttgggtgttgtgttgcgtatttgtagttttagttatttaggaggtttaggtgagaggattatttgagtttaggagtttaaggttagtttaggtaatatagtaagaatttgtttgaaaaaaaaaagaaaaaataataattaaattatatgtttattatgtaattttttttttgtttttaagagattttagattagaagttttaaagttttaagtaagtttttaaaaatttaggttggggttaggtatagtggtttatatttgtaattttagtattttgggacgttaaggtaggtaaattgtttgagtttaggagtttaagattagtttgggaaacgtggtgaaattttgtttttataa

SEQ ID NO: 368 - DNA, 6014 bp, Artificial Sequence
  chemically treated genomic DNA (Homo sapiens)
ttgtagagatagggttttattacgttttttaggttggttttaaatttttgagtttaagtaatttgtttgttttggcgttttaaaatgttgggattataggtgtgagttattgtgtttggttttagtttagatttttgaaaatttgtttaaaattttagaatttttggtttggaattttttagaaataagagaaaagttgtataataaatatataatttaattattattttttttttttttttttagataggtttttgttatgttgtttaggttggttttgaatttttgggtttaagtgatttttttatttgagttttttaagtagttggaattataggtgcgtaatatagtatttagtttatgtatgttttattgttaatagaaaatagaaaagatattaattttatggtaagttaaaaaatatttttgatgttttatgtggtagagatggtagtaattgttaatggttgatatgtttgggttttagtatagagaatggtttagttttggggtgggttttaggaaggtagtgaatgtagtttgtgtttaggagaaaattgtagaaagtatagtgagaaaggatgaaggttattttttggtatgaatggtagtattggtattaattttaaagaggtagaaagtaatgtatattattaaatatatgtgtatatattttttaaaatattggtatatattatataataatatgatatttaaattggattagaaataggaaattttagaaattaagatataaggaatttgtaatttgtattgttaaataggtaggtaatatagttaattattttaaggttaaaaaattatttttattaagtattttaattataagttgaaaggttatataattattttataaatttgtagattatttagttattttaaattatatttttttcgatattttaatttgttaatttaaaatgattttaggtgaaaaatattttatttagaaattttattttaattattataaagaataattattttttgattattatagattgaatatataaagtttggtattaatataatatttttatatttaatatttaataaaggtataaagtttttgttttttttataataggatgagaaattaattttttattttataataggtaatagaagaagtaaatttttttgatttttttttgagggggtggggttgggtagaggtgtagttttgaagatgtttttaatttagaaattttttatatgagttatttttaagaataatagttagttagtttatttttataaaatattgtaaaagggtgttatttttaatttttttttttgtttttgagttagggtttcgtttgttatttaggttggagtgtagggtagtaggatgatagtttattgtagttttgattttttaggtttaagtgatttttttattttagttttttgagtagttgggattataggtgtgtattattatgtttagttaatttttaaatttttttgtagagatagggttttgttatgttattaaggttggttttagatttttagatttatataattttttagttttggttttttaaagtgttgggattataggtataagttattttgtatagttttaatgttttttttttaagtttgagtttttaattattttatattttaattattttaaggaagataatttttttttttttttttgagacggagttttattttgtcgtttaggttggagtgtagtggtgtaattttggtttattgtaagtttcgttttttcggtttacgttattgttttgttttagtttttcgagtagttgggattataggtatatgttattacgttcggttaattttgtatttttagtagagacggggtttttttatgttggttaggttggtttcgaatttttaattttaggttggattttggattttcgatttgtttgttttggttttttaaagtgttgggattataggtatgagttatcgtatttggtttaaaattttttatattttatagtattgagaagttggagtgtcgttatttgtatatttattttgtgttttattttattttattttttatttttgagattgggttttgttttgttgattaggttggaatgtagtggtatgattatagtttattgtagttttgaattattgggtttaagagatttttttattttagttttttgagtagttgagattataggtgtatgttattatatttggttaatttgttaattttttgtagagaggaggttttattatgttattaaggttagttttaaatttttaagtttaagtaatttttttgttttagttttttaaattttgggattataagtatgaattattgcgtttagtttgtattttatttttaataaaattttaaaatataattttaataataataaatgtttattatattaggttttaaaaatatagaaaagttgtttgttttttgtttttttttcgtttttatgatgaggttttattatgttgtttaggttgtatttaaatttttgggtttaagtgatattttcgttttaattttttgagtagttattattagagaaatatattatagtgtataattagaaaagtatttgtaaagttggggaaaaaaaaaaattattaggttaagtgtggtggtttatatttataattttagtattttgggaggttatagtgggaggattatttgaatataggagttggagattattttgtgaaatatagtaagattttatttttatttaaggaaatatattttttaatttaaaaaattatttgttgtcggttgggtagattacgaggttaggagatcgatattattttggttaatacggtgaaatttcgtttttattaaaaatgtaaaaaaattagtcgggtatggtggcgggcgtttgtagttttagttatttgggaggttgaggtaggatagtggtgtgaattcgggaggcggagtttgtagtgagtcgagttcgtattattgtattttagtttgggtaatagagcgagattttgttttaaaaaaaaaaaaaaaaaaaaaaatttatttgtttttataatagggataaaaaaaataaaataaaataggttgggcgtagtggtttacgtttgaaattttagtattttgggaggtcgaggtaggttgattgtttgagtttagggtttaagattagtttgggtaatatggtgaaatttagtttttataaaaaatataaaaattagttgggcgtgatggcgaacgtttatagttttagttatttaggaggttaaggtaggagaatggtttgagtttacgaggtttagggtgtagtgagttaagattacgatattgaattttagtttgggtgatagagtgagagttgattttaaataaataaattaattaatttaatttaatataaaaattaattttaaaaaaataatttttgttcgttttagtagtatatatttaaaattagaatatagaaaagattagtatggtttttgtgtaaagatgatatgtaaattcgtgaaatattttttattttttgttttgttttgttttgttttttaagatggagtttcgttttgttatttaagttggagtgtagtggcgtgatttaggtttattgtaattttcgttttttgggtttaagggatttttttgttttagtttttcgagtagttgggaacgtagttatttgtttttatatttagttaatttttgtatttttagtagagatagggttagtagagttattatattcgggcgaaaatgagaattgttgtgagtttgtttttttattatattgtttaggttggttttaaatttttgattttagggggtttgtttgtttcggttttttaaaatgttgagattataggcgttaattatcgttttcggttaatattttttatttttttaaattttatttttttaattatttgtatagttattatttaatgataaatgattatttaaaaaatttggaagttagttttagtattatttttatttaatttagggaaagagatataaataggttttaataattttttaaagatttttttttttaagaatagattatttatttttataaacgagagatttttgaatgtttttttgtttaagtatatatttaaaatatttgttttgtatttttttttttaagaatagagtttaagtagaattgatatggaaatattttaatttagttattagtttagagatggtttatttatttttgtaaaaattttatttatttgattttgagatagagggaaaatgaatgattttattaggatgtagtagtaaatgggatttaaagaataaaggaaagaattaaagggatgtttttatattttttttatttagaaggaagtagagaaaatgattttgtattttttaatttgttttgagaagtatggttttattgaaaggtaagttttgttataatttttaaattgtttttaaatgtattaaatataagttaagaatgagaaaatgagtatttatcggtgtgtatttgaattaagtatagaggttagaggattttttaatgattattgtttaaaaattatttgggtaaaggaaaggatttattgttaggatttttgtatatattgatattttgtttttttaggtgtatatgtatgtaattttatagaatattagaaaagtattttgtaaatatgtaatgaagaaaatttaaaaagagattggatggaatatgttttttttttaataatagagattagtagtttgatttttattgatgtaataggtattttaatgggtaataattatttagtgaaataaggaaggtgagtattatatttttttatgttacgttgagtgtgtatagaatgttataagtaggtttttattttgtgaagtagttatttttttgggtacgtaattgaaagatgggaagaaatataaggcggggattggttgttttggaatagggtggtattgagatgttgagtattttgagtatgatgaaggtaggaaagtaaagaaattttaagattttagagagtaaattatttttaatgagtaaggaatatttatatttttaggttttaggatttagtatagaaattattttaatttagtgattttgaattgaatttataagtgaaataaaatattttttagtaagtaaggtttaagaataatagttggggttgggcgtggtggtttatgtttgtaattttaatattttgtgagattgaggtaggtggattatttgaggttaggagtttaagattagtttggttaatatggtgaaattttgattttattaaaaatataaaaattagttaggtttggtggtgggcgtttataattttagttatttaggaggttaagggaggagaattgtttgaatttgggaggtggaggttgtagtaagttaagatcgtgttattgtattttagtttgggtgatagagggagatttcgttttaaaaaaaaaaaaataaataatagttgggttagtgataaattatattgggattagggtttaaagaaatgggatagagtttaagtttttaattagagagtatttttttatttgtaaagtaggaataataatattgttttgattatttattagggtagtgtgagattaaatggagagagaataagataaggtttagcgtatattagaaattttgaagtgttatttatatgtgaggtattattttatgaaataaagtaattttttttttttgagacggagttttgttttgttgtttaggtagtggtataatttcggtttattgtaatttttattttttgggtttaagcgatttttttgttttagttttttgagtagttgggattataggtgtgcgttattacgtttggttaattttttgtatttttagtagaaaaggggttttattgggttaggatggtttcgattttttgatttcgtgattcgttcgttttaattttttaaagtgttgggattataggtttaagatatcgtatttggttaaaaatgagaatttttgtga

SEQ ID NO: 369 - DNA, 5282 bp, Artificial Sequence
  chemically treated genomic DNA (Homo sapiens)
tcgtttttacgtcgcgtttacgtgattcggggttaattttgttttggtgattttacgcgtcgttttaggtttagtcgttatggttacgtcgtagcgtttagcgttttttttagtcggtcgtgttttttttttttttttattcggattattttttttcgtcgtcgcggttttcgttttagttacgcgttacgtgacggtcgggaaggaggtcgggaagggggagggggcgttgtggtcgtaatttttttttttttatttttagcggttttgatttgggtttcgtttttttattgttggtgattaagttgtttagggtacggtttcggttttttttcgagggttttaatttcgttattttttttttttggtttgttaggcgagagcgttttagagttttgggttttgtttttgggtggtttagaagcgaagttcggggttgcggcggagtgggaggtggtgggggcggggagggaggttggggggtaggtaaaattttttgggttttttagacgaaatttttttatatgttggtattttgtttggtttgtgtttgtttgtaatttgtattgtaatttatattttattttttgaagttataaataacgcgtgggatatgttggggatttggaagttgaattttagtgtgatttgtgttttttgggttttagtttttttaagaatataatgggattagtagtattttttttatttggtttttttgaggatttagggagttagttttgtgtgtgtgtttgcgcgcgcgcgcgcgcgtagagagagtgtgcggggtttaaggcgatttttcggggtgagtagagtagtggttttattttatcgagtattttttgcgtgttaggtgttgttgtaagttatggtttttttgtgatgcgaagttatttttttaaaggttgtttaggtttttaaaggagttagacgttcgattatattgttcgtttagtataatgggaattatgatagaggacgtatagtggggttgtgttagtttagaaggcgtattaatttagagcggattaggaaagaaggacgtttaggataaagtgatatttggatagagatgagaagcgttttttaggttgggggtgaagtttgagttttttttttttttttttttttttttttttttttttgaaatagagttttgttttgttatttaggttagagtgtagtggtataatttcggtttattgtaattttcgtttttcgggtttaagtgatttttttgttttagtttttcgagtagttgggattataggcgatcgtcgttttatttggttaattttttgtattttagtagagacggggttgtatcgtgttgtttaggttggtttcgaatttttgagtttaagtaatttttttgttttagttttcgaaagtgttagattataggcgtgagttattacgtttagtcgtaagttttttttaagttagttattattattgggtgttttggtttaaaaattcgacgtggttaagtttgttggtgggggtggttgtttttttttttgtgataaggtttcgttttgtcgtttaggttgtagtttagtggtgtaattattgtttattgtagttttatttttttaggtttaaggtatttttttattttagatttttgagtagttggaattaaaggtgtatattattatatttagttaattttttttttttttttgagatggagttttattttgttgtttaggttggagtgtagtggtgcgatttcggtttattgtttaatttttattttttatgtttatgttatttttttgttttagtttttcgagtagttgggattataggcgtttgttattatatacggttaattttttgtattttttagtagatagggttttatcgtgttagttagtatggtttcgattttttgatttcgtgattcgttcgtttcggttttttagagtgttgggattataggtatgagttattgtgtttggtcggttaatttttatatttttgtagagatggttttttattatgttgtttagattggttttgaatttttaggttttagtgatttatttgttttggttttttaaatttttgggattaaaggtgtgagttattatgtttggtttaatttgttttttgttgttgttgagatatagttttgttttgttatttaggttggagtatagtggcgtgatttcggtttattgtaattttttttttttagatttaagtaattttcgtgttttagttttttgagtagttgggattataggtgtttattattacggtcggttaattttggagatttttagtagagacggggttttattatgttggttagtttggttttaaatttttgattttaggtggttcgtttgttttagttttttaaagtgttggtattataggtatgagttattatatttggtttttaatttgttttagaaagatttttttgaaggagttgggtggagaattggggttagggagggtatttggagattagttgttttgggttaggtgaggatagttaatgagggttgaattaaggtagtaatagtgggattggaaaatagtatgtattgggttagagttttataaatttagggtgtttgttaaatatgttgattttaggtttattatttttattttttaggaaaaagtttttaagggaaaggtttggtaattattataagaattattagagttttttaagtttttttgtgtgtttgtgtaattatttattgaatttttttagatgtagagatttttgttattttttttttattgtaatttagaatgtatggtaattatttttagattaatttaggggtttatggaaggattttgttagttatgaggaataattagagggatgtttgtttttgggaatttttaaattttaggatttggtaattgataagtgtggagtgagttgggagattagtatggcgtttggggttaagttttggataagtttggtgtaggattaagggtttgttgtgttttagtgatagttagtttatttttttgtatagttgaggtttaattatagttcgtttgaggttatatagttattatgtggtagaagtaagttaggatttagggtttttgtttgtttgtttgttttttgagacggggtttggttacgtcgtttaggttgggatttagtggtttattgtaattttcgttatttgggtttaagtaattattttattttagtttttagaggagttgggattatagttataggattattatgtttagttttgttgttttttgtttgtttgtttgtttttatttttggtagagatagggttttgttatgttgtttaggttggttttaaatttttttttttttttttttttttgagatagagttttattttgtcgtttaaggttggagtgtagtggtgtgattttggtttattgtaattttatttttggggtttaagtgatttttttgttttagtttttcgagtagttgggattataggtatttattattacgtttagttaattttttttttttaagtagagatagggtttcgttatgttggttaggttggttttaaatttttgattttaagcgatttatttattttagttttttaaagtgttaggattataggcgtgagttattgcgtttagttaaggttttaaatttttgagtttaagtgatttatttgttttagttttttaaagtgttgagattataggtatgagttaatatatcgtgttagatttaggttttttaatggttgttttttatttatttatatatttttttagatagagtttcgtttttgttgtttaggttggagtgtagtggtatgattttggtttattaaaattttagtttttcgggtttaagtaatttttttgttttagttttttaagtagttgggattataggtatgtgttattacgtttagttaattttgtatttttagtagagacggggtttttttatgttgattagattggtttcgaatttttgattttaggtgattcgttcgtttcggtttttgaaagtgttgagattataggtgtgagttattgtattcggtttaatggttgttttttaaatagtatttagttatgaattgggatatatttttattgtttggaaagtttggggagtagaggatggggtaatggagaagaggaaagagaagataagattttgtttgatttttgggagagtcgttggattgaagggagggttaagggggatgaagtagtggttttttgtgatagtgtttgtatttttattggttgtttttgtttttttttttatttgtgttggggggatagaattttgtggttataatttttatttattttggagaggtttaggagtgtgttttagaatgaggtttttatttgagttgagtgtttttgagagggttttagtagtatcgtgtgtaagtatttgggtgggaggttcgggtgtatcgtttgtgtgtaggtagtttaagaatgttgtttaagggtgtttgaaaggtttattagtattttgtgtgtgttttaatgtgaaggaggtttaggtgttattattgtgtgtttgaggttgatttcgaggtaaaggtgtaaatgtgagatttttttgatatttgtgtgtgtttgtgagtttcgggtgaaaaaaatgtgttgtagtaatgaattagttattttatagggagaagggaatttatttgttattattatttttgaatttgagatatattttattagtgtgtatttacgtggggttgttatttgagaatgatatttaggtacgatatttgtttatttattatttgttttattaatatgtttgagaggaagtttaagtgtattagattttttaagatggtttaaggtgtaatttggagggttatgggaaacggagttataagtgttatttttagcggggttattgtgaatttagtattttagtttgtgtttttgggataagtgttttgagtaggtagttttggggttttaatagtttagttttttttttttttatttttatagggtttagtgtttattattatattagggggttagaggcgatggtttgtttttatgagattcgaatatttttttttttttttgggggttttgtgtttattttaagtgaggtatttatgcgtaagttggatttagatatttttgattgtattttcgagaaggatttgacgtttatttagtgtgtatttcgagatgtggtattttttggtgggtagggtgggggagggtttagtttttttttaggtggagagtcgttttttgagttttttgttaatagt

SEQ ID NO: 370 - DNA, 5282 bp, Artificial Sequence
  chemically treated genomic DNA (Homo sapiens)
attgttggtaaaaggtttagggggcggttttttatttggggaggggttgggtttttttttattttgtttattaaggggtattatatttcgaagtatatattgggtaggcgttaggtttttttcgggagtgtagttagaagtgtttgggtttagtttgcgtatggatgttttatttagggtagatataaagtttttaaaggaaggagagggtgttcgggttttatggaggtaagttatcgtttttggttttttggtatgatggtgaatattgggttttgtgggaatgaaggaaggaggggttgggttgttaaagttttaggattgtttgtttaggatatttattttagaggtatagattggggtgttgggtttatagtagtttcgttggaggtaatatttgtggtttcgttttttatggttttttaaattgtattttgagttattttaggaaatttgatatatttgggtttttttttaggtatgttagtaaggtaagtaataggtagataggtatcgtatttgagtattatttttaggtaatagttttacgtgggtatatattggtaaaatatgttttaaatttaagagtaatggtaatagatgagtttttttttttttgtaagatgattaatttattgttgtagtatattttttttattcgagatttataggtatatataggtattagaagggttttatatttatatttttatttcggggttaattttaggtatataatagtaatatttagattttttttatattgaagtatatataggatgttggtaaattttttagatatttttggatagtatttttgagttgtttatatataggcgatgtattcgggttttttatttaggtatttatatacggtattattgaggtttttttaggaatatttaatttaggtgagagttttattttaaaatatatttttgggtttttttaaggtaagtgaaggttgtaattatagagttttgtttttttagtataggtggggaaaaaggtagaagtagttaatggggatgtagatattgttatagaaggttattgttttattttttttggttttttttttagtttagcggtttttttaggggttaaataaggttttgttttttttttttttttttttattgttttattttttgttttttaaattttttaggtaatggagatgtgttttagtttatagttgggtgttatttaaaaagtaattattaggtcgggtgtagtggtttatatttgtaattttagtatttttagaggtcgaggcgggcggattatttgaggttaggaattcgagattagtttggttaatatggagaaatttcgtttttattaaaaatataaaattagttaggcgtggtggtatatgtttgtaattttagttatttgggaggttgaggtagaagaattgtttaaattcgggaggttgaggttttggtgagttaagattatgttattgtattttagtttgggtaataagagcgaaattttgtttaaaaaaatatataaataaataaaaagtaattattaaaaaatttgaatttggtacggtgtgttggtttatgtttgtaattttaatattttgggaggttgaggtaggtggattatttgagtttaagagtttgagattttggttgggcgtagtggtttacgtttgtaattttagtattttgggaggttgaggtgggtggatcgtttgaggttaggagtttgagattagtttggttaatatggcgaaattttgtttttatttaaaaagaaaaaattagttgggcgtggtggtggatgtttgtaattttagttattcgggaggttgaggtaggagaattatttgaattttagaggtgaggttgtagtaagttaagattatattattgtattttagttttgggcgatagagtgaaattttgttttaaaaaaaaaaaaaaaaaaaaaagtttgagattagtttgggtaatatggtaaaattttgtttttattaaaaatagaaataaataaataaataaaaaataataaagttgggtatggtgattttgtgattgtggttttagtttttttggaggttgaggtgagatgattgtttgagtttaggtggcggaggttgtagtaagttattgaattttagtttgggcgacgtagttaaatttcgttttaaaaaataaataaataaataaaaattttgaattttgatttgtttttgttatataatggttatgtgattttaggcgagttgtagttgagttttagttatataaaggaataaattggttgttattaaggtatagtaaatttttaattttatattagatttgtttagaatttggttttaggcgttatgttggttttttaatttattttatatttgttagttattagattttgagatttgaagatttttaagaataagtatttttttaattgttttttatagttagtagggtttttttatgagtttttgggttagtttggaaatgattgttatatattttgaattgtagtgggggaggagtggtaggaatttttatatttagaagggtttagtagatgattatataggtatataaggaggtttgggaaattttgatagtttttgtaataattattaggttttttttttgaagatttttttttggggggtgagggtggtaggtttggaattagtatatttaataagtattttagatttgtaaagttttaatttagtgtatgttattttttagttttattgttattgttttagtttaatttttattagttgtttttatttggtttaggatagttggtttttaagtgttttttttaattttaattttttatttagtttttttagaaggatttttttaaaatagattgggggttaggtgtggtggtttatgtttgtaatattaatattttgggaggttgaggtaggcggattatttgaggttaggagtttgagattagattggttaatatggtgaaatttcgtttttattaaaaatttttaaaattagtcggtcgtggtggtgggtatttgtagttttagttatttaggaggttgaggtacgagaattgtttgaatttgggaggaggaggttgtagtgagtcgagattacgttattgtattttagtttgggtgatagaataagattgtgttttaataataataaaaaatagattgggttaggtatggtggtttatatttttaattttagaaatttgaggggttaaggtaggtggattattgaagtttggaagtttaagattagtttgggtaatatggtgaaaagttatttttataaaaatataaaaattagtcggttaggtatagtggtttatgtttgtaattttagtattttgggaggtcgaggcgggcggattacgaggttaggagatcgagattatgttggttaatacggtgaaattttgtttattaaaaaatataaaaaattagtcgtgtgtggtggtaggcgtttgtagttttagttattcgggaggttgaggtagaagaatggtatgaatatgggaggtggaggttgagtagtgagtcgagatcgtattattgtattttagtttgggtaatagagtgagattttattttaaaaaaaaaaaaaaaattagttgagtgtggtgatgtgtatttttagttttagttatttaggagtttgaggtgggaggatattttgagtttgggagggtgaagttgtagtgagtagtgattgtattattgaattgtagtttgagcgatagagcgagattttgttataaaagaaaaaataattatttttattaataaatttggttacgtcgggtttttgaattaggatatttaatgataatggttaatttaaggaaggtttacggttgggcgtagtggtttacgtttgtaatttagtattttcggaggttgagataggaggattgtttgagtttaggagttcgagattagtttgggtaatacggtgtaatttcgtttttattaaaatataaaaaattagttaggtggggcggcggtcgtttgtagttttagttattcgggaggttgaagtaggagaattatttgaattcgggaggcggaagttgtagtgagtcgagattgtgttattgtattttagtttgggtgatagagtaagattttgttttaaaaaaaaaaaaaaaaagaagaagaagaaaaagaagtttaagttttatttttagtttggaaggcgttttttatttttatttaggtgttattttattttggacgttttttttttttgattcgttttaggttaatgcgttttttgggttgatatagttttattatgcgttttttattatggtttttattatattggacggataatgtagtcgggcgtttggtttttttgagagtttggatagtttttagagagatgatttcgtattataagggaattatggtttgtaatagtatttggtacgtagaaggtgttcggtaaggtggaattattgttttatttatttcggaggatcgttttaagtttcgtatattttttttgcgcgcgcgcgcgcgcgtaaatatatatataaaattagttttttgaatttttagaagagttaggtgaaggaggtattattggttttattatatttttgagagaattgaggtttagaaagtataaattatattaaagtttagtttttaaatttttaatatattttacgcgttatttgtggttttaagaggtaaggtgtaggttgtaatgtaaattatagataaatatagattaagtaaagtgttaatatatgggagaatttcgtttggaggatttaagggattttgtttgttttttaattttttttttcgtttttattattttttatttcgtcgtaatttcgggtttcgtttttggattatttagaaataaggtttaagattttgggacgttttcgtttggtaggttaggagggagggatggcgggattggagttttcggggaggagtcggggtcgtgttttggatagtttggttattagtaatggaaggacgaagtttaagttaggatcgttgaaagtggggaggaaggggttacggttatagcgtttttttttttttttcgatttttttttcggtcgttacgtggcgcgtggttggggcgggggtcgcggcggcggaagggggtggttcgggtggggaaagggaagggatacggtcggttgggggaagcgttgggcgttgcggcgtaattatgacgattgggtttgaggcggcgcgtgaagttattaggataagattagtttcggattacgtgagcgcgacgtgggggcgg

SEQ ID NO: 371 - DNA, 8032 bp, Artificial Sequence
  chemically treated genomic DNA (Homo sapiens)
cggagtttgtagtgaggttaagatcgtgttattgtgttttagtttgggttatatagtaagatttcgtttttaaaaaaaaaaaaaaaaaattatgggatattaaatagacgttttatatgttaaaatggataatattttttttatggtaagttgttatggtttaatatttgtttattatgttttgatggtaatatatttttaaatttaaatgtaatgtaagaatgttttttttgtttattatttatatgagttatttataaatattataataataaaaaagataattataaaattttaaatggaaaaataatggagtattttatttattgatagagataataaaattttttgtaataattttgaatagaatttaatgaaatgtaaatttaaatataaatagtaagaatttgttttggtaattggagatgattagtgaagcggagaattttgaatggtggatatttatttaagtattattggattacggggtggagaaggagggagtcgaggatggtgaagaggtattattgatttttaaattaattaattaattaattatatgtgtttttattttttttttatatatataattggatgtttgatagtgagtaagttttttgatttttttagattttagaggtaaaatgagaagtgttttttagttagaaagtattataaattaaatgttttgttttaggtttttttttttaaatattttatattttttatgtaaaaatagagttattattatatttttatgatcgtattttaaattattgggtaagaagtatttttttataaattaaatttttattttaatttttgttatttttgttttttattttaaattaaaataaaaataaattttattatattgtaggagatagttataatgtaatgtttaagtgtttgggtttttagttagatttttgggttttatttaaattaggtaagttattgattcgtttagtgttttagtttttttgtaagaataatgatatttgttttataggatgggtaggaggatgaaataatatatttagtataaggtttggttatagttaatgttgagtaattattttttatttttattttttgagatagagttttgtattgttgtttaggttggagtgtagtggtgcgatttttgttgattgtaatatttgttttttaggtttaagcgatttttttgttttagttttttgaatagttgggattataggtgtttgttattacgtttagtttattttttgtatttttagtagagatagggttttattatgttggttaggttggttttgaatttttgattttatgatttatatgttttagttttttaaggtgttgggattataggtgttagttattatgtcgagtaagtaattgttatttttaaattatttttatttttttatttgtattttttatttttttatttttaatatatgtatatgtgtgtatatatatatatgatagaggttatatatgtatatgttataattatataattttagatatagggttttatagttagaaggaatttttatattaagtataaaatttttgttatatttgtgttttttttgttagatttagagggttagagtgatttggttagtgacggaaatgatatttaaatatgagatttttggtttgaggttgtatcgtttttattttttttttatttatttttattttatttaaataattttttatagaataattttttttaaatatgaaatgttttataggtttttggtttttagtaaattatgatattataataatgcggtttatttttttgattgttgatttttttataaattaggacgtgtatttatttaaagtagtttatttgataatgaaaatttagtgatttttaaataggtagttagaagaatttgttttatgaaatagataaatttttaatattgggtttttaaaatgttcggatattaagattacgaatatattatttaaattagagtttttgagtaaggatttaagttttattttatgttttatttttgatttatagtaagattttgggtaagttatttgatttttttatattttagagtgttaaattgtgaaaagtatgtttataaaattgtgtaagtatgattttattataaattcgatgaatttgaaagtaaagatgtgttttgatatattaaagaattattaaaatagaattttagtttgtaaaatatgaagaattaggaaaataaattttattatattaagtaaaaggattttgaaatgtatagtttttagtaagtaaagttataaaaagttttaaaatgttatatttaggtgaaataaggttaatgatagaggaaaaatattattttagagaatgtttggtttttaaaattatagattgtagtaatttaattaaaataattataaggaatggaagattattagaaacgagtagatttttaataattaaatatatttttaggttattatttttttttatttatataatgtatattatgttttaaaatgtattttattggttgggagcggtggtttatatttgtaattttagtattttgggaggtcgaggtaggtggattatttgaagttaggagttcgagattagtttggttaatatggtgaaattttatttttattaaaaatataaaaattagttaggcgtggtggtaggtatttgtatttgtaattttagttatttagggggttgaggtaggagaatcgtttgaatttataaggcgaaggttgtagtgagttgagattgtattattgtattttagtttgggtaatagagtgaggttttgttttaaaaaaaaaagaaaaaatgtattttattaattattatatgaaaagttttagagaaagaatattaatatttttaggaaagaagtagttttagtattattattattattggatggagtttcgttttgttattaggttggaatgcgatggcgttattttggtttattgtaattttcgatgttttggtttaagggatttttttgttttagtttattgaaagtagttgagattataggtacgcgttattatatttagttaatttttgtatttttagtagagataaggttttattatgttggttaggatggtttcgattttttgattttgtgattcgtttgtttcggtttttttaagtgttgggattataggtgtgagttatcgcgttcggttaagatgtagttttaataaggagtttggttatttaggtttgtaattgattggattattgtatattttttaaaattaatttgtattagtttttttttttttatttttttatttttaattttcgtattagtatgtacgttttatttttatttaggtttttttttatgagtttaggagtattattattatttttttgtagggattaggattaggtttgtgaagtgaatagtgtttttttaatttgtagagggaaggtagtattttttggtttgttgttgtagtttttttttaaattaaatagtaggtttattttttttgcggtattttagaaggaatattagtaggaatagttttatagatgttgacgttttgtttaaggttattttaagaagttttgtggtatttgtaatgtgtttgtatatttttttttttttaaaaaatatatttttgtagattttgttgaaagtagaaataaatataagtaagtaaagttttttttagtatagtatgttaattatatattttgttatattttgtgaaatagtaagtaaatgataatttttaattgttgttcgggttttgtaaaatagaagattaaattttgtgttttgttttggtaagaaaagaaattgtagtattttgtttagatttttataagttttggggtttatattattggttgaaattgttttttttttattttatagaaaaatggaaaatattagtaaatttaaagatttaaatattattttaaaaggaatataataaaaaatggaaaatattagtatatttaaagatttaaatagttttttaaaaggaatataattaaaattgtagtttaaaatataatttagttttataagagaggtaattggttgtgtgttttatttgtaatgtagaggatttgaagtatttatttttttttttgtttttatggatttatgaataaagattttgattttttttaggattaggaaaattacgaaaaatttaaagtttgggtttaaggtttgtagaagttgtataggtatattaattttagtaagacgggcgttaggaaaaagaataaaatagtaggggagaaatatttaggtattttaaaaaatatttagtggaaacgtaaaaatattaaagattgattaaatatcgtagtatgatatagatttagtaattgagtataaataatttgattcggatattgttttaaaattcgaagaggattaattttttttaggaggataattatttcgttttttgtagattttttttttcggtagttgaaggagtgtggttaatttgtttttattttttcgcggattttttatttttaggattttttgtagtattttaaattggaagtggtcgttgtagatttaaggacgaggggtacgcgggagtcggtagttttagtggagcggttggagatgttgaggtgggagggttatttaggtggggtgaggttggggtaggtagcggagtgaacggttttcgaagttttgggtcgtttttaggttggattaagtaggcgttttgttttcgttttcgtttagggtgggcgttttttgaggatttttcgttatatttgattcgagatcgcgcgtttagtttagaacgttttttcgatttagcgtagggtcgtcgcgattggcgcgtagggggcggcgggaggtttggcgaattcgggggcgggattaggcgggtaaggttcggttgtcgtagcgtcgttttgcgcgaggcggtttcgtcgcggcggagggatacggcgtattatatatatatcgcggggcgtagattcgcgtttcggtagtggtgttgggagtgtcgtggacgtcgtgtcgttattcgtagttaggcggcggcgtaggcggcggcggcggtatagcgtatagcgcgttttagtagtagtagtagtagtagcggtatcggaggtattttcgtcgtcgtagttttcgcgttggtgtagttattttcgttttttttgtttttttttttttcgttcgtattatggtaggtcgggagtggtaaatgtcggcgtagtagttgttcgagatttttttttagatttttagttgttttgtttgttttttgtttgtttttggtttttggaggttttttttttttgagtgttacgtagtagttgcgtttaaaggaggttgtattttggatttgtatttcggcgatttttgttagggagttttatttattggttttttttggagttggatttggtcgtaggtcgtttacgggtaggggtttcggtcgtaattgtagcgggggtttttgtatttaatttttttgtttttcgtttagtttcgtatttattgtatttattagcgtcgtattcgggttgtttgtagcgtagcgtttcggtttgggagtcgggcggggtcgggtattagattttttttttcggttcgtttttttttatttcgttttttcgtcggcgcgaaggtggtaggtcgggcgggtagtggagaatgaatgggttggagttggtcggtggcgtatattgtttcggtcgggtgttgaggggcgtagttagcgttcgttatttttttattttggtcggttttgttgggcgttttttttcggtcgttttttttttttttttttcggggggcgcggcgcgggcgtgggttgggaaggaaggagtcggggaagggtggggttgggggtaggaaggcgaggggttgggggcggagagggcggaagcggcggtcgggtcgttttgcgttcgggcggggttttgcggtgtggtcgtggtttgtttttgtcgttttcgtattttgcggttttttatttagtgtagtagtgcgggcgggcgtgagtttcggtgtattaggaggtatttttcgcgggaggcgttgggttcgcgttaattggggcggggggggggggcggcgggggaggagggaattggcgcgcggtttggtttttattagagacgtaaagtttttgtttcgggaggaggcggcggcgtcgcgggttcgtcgtttgggggagtagaagcgggtgggaggtgcgggtggttttggttttagttttggtgcgcgggggtcgggggtggtgatttttttggtcgaggaggggcggcgtttagacgttcgttcgggggtcgtttttttttttacgtttgttttcgggtacgcgttttgttcggtttttcgtttcgcgttatttttagttcgtagagagatgtttttacgtttttgttttttttgtagtttttagattgttagatgcgattgtgcgtttcgttgggtgtgttttttatagttttttttttttcggcgtgtagggttgatattatcgattgcgtttttggtttggcgggtggggagatggtttttcgtagggttttggtatatttttgtttttaggttagcgttatttgggggaggaggttttcgttgtcgagaaagttggatgtttttggtaatttttttaataagagagttttgtagcgaggtgggattgttttttttataaggtgatagttttttttgcgaggtgtggtagcgttttttgttgtataagatagatgttgttttggcgttacgtaaattatcgtgttttcgttatttaaagaaagttaatttttagtgattgaggtagaaagaaagattcgtttataatttgtaaaaataaatttttatttagaattaatatattggaatattatttttattgttaaagtttttatttaagagtataaattttattagttttttattaggatttattttgtaattggttttttaggtatttttttttaaaagagaaatttacgttagttttttttgaggtttcgagttttttcggttggaggtataggtttagtggagattaaataatgtaggtgaattattttcgtggttattattgtttttaacgaagtgtgtttattaagaatagtttttatgttatttttaaggtaggtagggttaatattttttagtaaatttagtagatattttttgttagaaaagagaggagtatatatagtttgataattattgtgtagttttttgtgtatttaatttttgtagttttgtaatattttatttgtaagatggtattatttttttttggtttttgaattataggatagtttgatttagggtattagttattgtaatggtaggtttttaataaataattgtttaatttaaaggattggaaagtatttgttatatggaaatgaagttggtggcgtatttagttgttgtatttttattttttttatttaattattttttataaaatggatataaaagtttgttaatttaatttaatgttattatgtaacgttagtttggagatttcgagggtttggagtagtgcgtaaggtgcgttgaaagtttgtttttggatgagatttttattttggttgtgatggtagtggtagtgggttgggttttttgttgagtggaaagggggattgcggtgtttatggtgtagtaggtggcgtttttttgttttagagtttgtcgttattgtagttggtgttaaggggttttttgttattagaggtgttattttttatatgatgaatttagtttagttagatcgtagagtaagttgtaagttatgggtttagaaaagaaaatttgaagtgagtagatgttgttatttttttgtaattttttgttaaaatagtataaggagttttttttattttatttatttttattaaatgatcgtgttataggttttaaaggattttaagattgatttttgaaagattataatattaaaagtataattggaaaatttatgttgaaattaattaaatatgtcgtggattgaatgataattttttttttttttatatagg

SEQ ID NO: 372 - DNA, 8032 bp, Artificial Sequence
  chemically treated genomic DNA (Homo sapiens)
tttatatgaagaaagaaaaggttattatttagtttacgatatgtttggttgattttaatataggttttttagttatatttttaatattgtgattttttaaaaattaattttaaaattttttgaaatttgtagtacggttatttaatgaaagtaaatagaataaagaaaattttttatgttattttaataaaggattataaggaagtgataatatttgtttattttaagtttttttttttgggtttatggtttatagtttgttttgcgatttaattaggttaagtttattatgtgaaaaatggtatttttagtggtagaaggttttttggtattagttgtagtggcggtaggttttaagatagaagagcgttatttattgtattatggatatcgtagtttttttttttatttaataagggatttagtttattgttattgttattatagttaggataaggattttatttaggggtaggtttttagcgtattttgcgtattgttttaggttttcgaaatttttaaattggcgttatataatggtattgggttggattaataggtttttatatttattttatgagaaataattaagtagaaaaaataaagatatagtaattgggtacgttattaattttatttttatgtaataaatgttttttaattttttaaattaggtagttatttgttaaaagtttattattataatggttaatgttttgggttaaattattttatgatttagaagttaggaaaaaatggtattattttataaatgaagtgttataaaattgtaaaaattaagtatatagaaaattatataataattattaaattatatatattttttttttttttggtaaagagtatttattaaatttgttggagagtattaattttatttattttaagaatgatataagaattgtttttaataaatatatttcgttggaggtagtaatggttacgaaggtaatttatttgtattatttggtttttattgaatttgtgtttttagtcgagggaattcgagattttaaggagagttaacgtggattttttttttaaagaaggatgtttaagaagttaattataaaataagttttaatagaaagttgatgaagtttatatttttaagtgaaaattttaatagtaggaatggtgttttaatatattgattttgggtgaaaatttgtttttataaattataaacggatttttttttttattttaattattaaaaattggttttttttaaatgacggagatacgatgatttacgtaacgttaaggtaatatttgttttgtataataggaagcgttgttatatttcgtaagagaaattgttattttatggggagaatagttttatttcgttatagaatttttttgttagaggggttattaggagtatttaattttttcgataacgaaaatttttttttttaaatggcgttagtttgggggtaaaggtgtattagaattttgcggggaattatttttttattcgttaaattagaaacgtagtcggtgatgttagttttgtacgtcgaggaggaaggggttgtggaaaatatatttagcgaggcgtatagtcgtatttggtaatttagaggttgtagagaaagtagaaacgtggaggtatttttttgcggattggaagtggcgcggggcgagggatcgggtagggcgcgtgttcgggggtaggcgtgggggggaaggcggttttcgagcgggcgtttggacgtcgttttttttcggttaggagggttattattttcggttttcgcgtattagggttgaggttaaggttattcgtattttttattcgtttttgtttttttaggcgacgagttcgcggcgtcgtcgttttttttcggagtagaaattttgcgtttttaatggaaattaagtcgcgcgttagtttttttttttttcgtcgtttttttttttcgttttaattagcgcgagtttagcgtttttcgcgggaagtgttttttggtgtatcgaggtttacgttcgttcgtattgttgtattgggtggggggtcgtagggtgcgaaagcggtaggaataagttacggttatatcgtagggtttcgttcgggcgtagggcggttcggtcgtcgttttcgtttttttcgtttttaatttttcgtttttttgtttttaattttattttttttcggtttttttttttttagtttacgttcgcgtcgcgtttttcgggaagaaggaggggagagcgatcgagggagggcgtttagtagggtcggttaaagtggggaggtggcgggcgttgattgcgttttttaatattcggtcggaataatgtgcgttatcggttagttttagtttatttattttttattgttcgttcgatttgttattttcgcgtcggcggagaagcggggtggggaggggcgggtcgggggggggggtttagtgttcggtttcgttcggtttttaggtcgaaacgttgcgttgtaggtagttcgggtgcggcgttagtggatgtagtgggtgcggggttgggcggggggtagggggattggatgtagaaattttcgttgtagttgcggtcggagtttttgttcgtggacggtttacgattaagtttagttttaaggggaattaataaatgaagttttttggtagaggtcgtcgagatgtaaatttaaaatgtaattttttttaagcgtagttgttgcgtaatatttagaaaagaaaaatttttaagaattaaaaataaataaaaaataaataaaataattagaaatttgggaagaaatttcgggtagttgttacgtcggtatttgttattttcgatttattatggtgcgagcgaagggaggaagagtagagggagcgagggtggttgtattagcgcgggggttgcgacggcgggggtattttcgatgtcgttgttgttgttgttgttgttaaggcgcgttgtgcgttatgtcgtcgtcgtcgtttgcgtcgtcgtttgattacgagtaacggtacggcgtttacgatatttttagtattattgtcggagcgcgagtttgcgtttcgcgatatatatatggtgcgtcgtattttttcgtcgcggcggagtcgtttcgcgtagagcggcgttgcggtagtcgggttttgttcgtttggtttcgttttcgggttcgttaggtttttcgtcgttttttgcgcgttagtcgcggcggttttacgttgggtcggggaagcgttttaggttgggcgcgcggtttcgggttaggtgtggcggggagtttttaggagacgtttattttgggcgggggcgaagatagagcgtttgtttagtttaatttgggggcggtttagagtttcggaagtcgtttatttcgttatttattttagttttattttatttgggtgatttttttattttaatatttttaatcgttttattagggttgtcggttttcgcgtgtttttcgtttttgggtttgtagcggttatttttagtttggggtgttgtaggaggttttgagagtagggggttcgcggggaggtggaggtagattggttatatttttttagttgtcgaggagaggggtttgtagaggacgaggtagttgtttttttggaagaaattggtttttttcggattttggagtagtattcgagttaaattatttatgtttagttgttaaatttgtgttatgttgcgatgtttaattagtttttaatgtttttacgtttttattgaatattttttaggatgtttgaatattttttttttattattttgtttttttttttggcgttcgttttattaaaattagtgtatttgtgtagtttttatagattttaaatttaggttttaaatttttcgtaatttttttgattttgagaagggttagagtttttatttataaatttatagaaataagggaaaaaatagatgttttaaattttttgtattataagtggaatatatagttaattgttttttttatggagttagattgtattttaaattatagttttgattatattttttttaaaagattatttaaatttttaaatatattagtgttttttattttttattatattttttttaaaataatatttaaatttttaagtttattagtgttttttatttttttgtaaagtagagaaagaataattttagttagtaatgtgaattttaggatttgtaaaaatttagataaaatgttgtagtttttttttttgttaaggtagaatatagaatttgattttttgttttatagggttcgggtaatagttggaggttattatttgtttattgttttatagaatatggtaaagtgtgtgattaatatgttgtgttagaaagggttttgtttgtttgtgtttgtttttgtttttaataaagtttgtaggaatatgttttttaaaaaaggaaaaatgtataggtatattgtaaatgttataggattttttgggataattttagataagacgttagtatttgtggagttgtttttattgatgttttttttggaatgtcgtagaaagagtgaatttgttgtttaatttaaagagaggttgtagtagtaagttaggggatgttgttttttttttgtagattagaaagatattatttattttataaatttgattttaatttttgtaaaaaaataataataatatttttgggtttataggggaaaatttgagtaggaataaagcgtgtatattaatgcgagagttggagataaggaaatagaagaaaagggattaatataaattaattttaaagaatatgtaataatttagttagttataagtttaaatggttaaattttttattaaaattgtattttggtcgggcgcggtggtttatatttgtaattttagtatttggggaggtcgaagtaggcggattataaggttaggagatcgagattattttggttaatatagtgaaattttgtttttattaaaaatataaaaattagttgggtgtggtggcgcgtgtttgtaattttagttatttttagtaggttgaggtaggagaattttttgaattagggtatcggaggttgtagtgagttaagatagcgttatcgtattttagtttggtgatagagcgagattttatttaataataataataatattaaaattgttttttttttaagggtattggtattttttttttggggttttttatatagtagttagtgaaatatatttttttttttttttttgagatagagttttattttgttgtttaggttggagtgtagtggtgtaattttagtttattgtaattttcgttttgtgggtttaagcgatttttttgttttagttttttgagtagttgggattataggtataggtgtttgttattacgtttggttaatttttgtatttttagtagagatggggttttattatgttggttaggttggtttcgaatttttgattttaagtgatttatttgtttcggttttttaaagtgttgggattataggtgtgagttatcgtttttagttagtgaaatatattttaaaatatgatatgtattgtataagtagggggaaataatggtttagaaatgtgtttaattattaaggatttattcgtttttgatagttttttattttttgtgattattttggttaagttgttataatttatggttttgaaagttaagtattttttaaaataatattttttttttgttattaattttattttatttaaatataatattttgaaattttttatgattttatttgttaaaaattgtatattttagaatttttttatttagtatagtaaaatttatttttttgattttttatattttataaattagagttttattttggtaattttttaatgtattaaagtatatttttgtttttaagtttatcgggtttataatgaggttatgtttgtatagttttatggatatgttttttatagtttgatattttgaaatataagaaggttaagtgatttgtttaggattttattgtgagttagggatggggtataaaatagagtttgagtttttgtttaggggttttaatttagataatatattcgtggttttgatattcgaatattttaaaggtttaatgttaggggtttgtttgttttataaagtagatttttttgattgtttatttagaaattattgggtttttattattaaatagattgttttaagtgaatatacgttttaatttatgaagagattagtaattaggagaataaatcgtattattgtaatattataatttattgagaattaaaaatttatggaatattttatatttaaaggaaattgttttataggaagttatttaaataagataaaagtaaatggaagaaaagtaaaaacgatgtagttttaagttaggaattttatgtttaagtattattttcgttattaattaaattattttaattttttgaatttgatagaaaggatatagatgtaataagagttttgtatttgatgtagaaattttttttagttgtgaaattttgtgtttgaggttatatgattataatatatatatatataatttttgttatatatatgtatatatatatatatatatattgaagatggagaaatggagaatgtaaatggagaaatggaaatagtttaaaaataataattatttgttcggtatggtggttgatatttgtaattttagtattttgggaggttgaggtatgtggattatgaggttaggagtttaagattagtttggttaatatagtgaaattttgtttttattaaaaatataaaaaataagttgggcgtggtggtaggtatttgtaattttagttatttagaagattaaggtaggagaatcgtttgaatttgggaggtagatgttgtagttagtagagatcgtattattgtattttagtttgggtaatagtataagattttgttttaaaaaataaaaataaaaaataattatttagtattgattatggttaggttttgtgttaaatgtattattttatttttttatttattttgtgaaataggtattattatttttataaaggaattgaggtattgaacgagttagtgatttgtttaatttaagtggaatttaaaaatttagttgagagtttaagtatttaagtattatattataattattttttgtaatgtagtagaatttatttttattttaatttggggtaggaggtagaagtggtaaagattaagatgaaaatttggtttataaagagatattttttatttaataatttaaaatacgattataggaatgtagtaatggttttatttttatataaggaatatggagtgtttggggaagaaaatttaaagtaaaatatttaatttgtgatgttttttagttggaggatattttttattttgtttttgaggtttagagaggttaagaggtttgtttattgttaaatatttaattgtgtgtgtgagagagaggtagagatatatatggttggttggttggttggtttgagagttagtaatatttttttattattttcgattttttttttttttatttcgtggtttaatagtatttagatgaatatttattatttaggatttttcgttttattaattatttttaattgttagaatagatttttgttgtttgtgtttggatttatattttattaaattttatttaggattattataaaaagttttgttatttttattaataaataaaatattttattatttttttatttaaaattttgtgattattttttttgttgttataatgtttatgaatgatttatataggtaatgagtagagggaatatttttatattatatttaaatttgaaaatatgttattattagaatataataagtaagtgttaggttatgataatttattatgagaaaaatattatttattttagtatataaggcgtttgtttagtgttttatgattttttttttttttttttggagacggagttttgttgtgtagtttaggttggagtatagtggtacgattttggttttattgtaagtttcg

SEQ ID NO: 373 - DNA, 6130 bp, Artificial Sequence
  chemically treated genomic DNA (Homo sapiens)
  unsure (1717)
gaatttttgattttaggtgattcgtttatttcggttttttaaagtgttgggattataggtgtgagttatcgcgtttagtcgaagagtgtttaatttttattgataggaatggataagtaaagagttttaaagattaatgtgaaatattgtataaatattatagatgtttataatagtgatttggaatattgtaagtatcgagatagttttttgatttttaaagaaaaaagttaaattatatgtagtttggtttattgttttttttttttttttttttttttttttttgagataggtttttgttgtttagggtggagtgtagtagtgcgatttgggtttattgtaatttttattttttaggtttaaataatttttttgttttagttttttgagtagttgggattataggcgtgcgttattgcgttcggttaatttttatattttttttttggtagagatggggttttattgtgttggttaggcggttttaaatttttggttttaagtgatttgtttgtttttgttttttaacgtgttaggattataggtgtgagttatcgtgttcggttaattttgtgtttttaagtttcgtaattataattaattttttaaaaaagggtttattacgtgttagttatttttttatgtattttaaataaattaatttattttttttttataattattttgtgggggggtattattgttattattatttttagaaaaggaaattgaggtatagagaggtggtttaatttagttaaatttatatagtgagggagtggagtggtagaggggtgtggttttaggttttggagggttttttttatacgttagattatgcgtttatcgttagaagttaggtttttaggatttgttagagatgtaattttaggagtagggtttttgttgtttaaatttttgttttttttagaggggttatggatgtatgtttataatagaaagggtattttttgagaaagggaataataataattattttagaaattattatttttgaatgtttgttttgtgttaggtataggtaagatattttttgtttgtttaatttttagaatattattatagggttattatattatttttattggataaaagaggaagtagagaggttttagtaatttttttaaagttataagttgtggagttaggtttgaattgaaagtagtttttgattttagaattttgtttagtatttttgtttttagttttatggttcgtttggttttttttagtattttaatgggtttgaaggtaattaagttatggtatgtggattgtggggtgatgggttttatttattattttgtttagttttttattttttagatgcggatttttttttttggagatagagtttcgtttttgttgttttggttagagtgtaatggtacgatttcggtttattgtagtttttggttttagggtttaagtgatttttttgtttagttttcggagtagttgggattataggtatttattattatatttggttaattttttgtatttttagtagagataaggttttattatgttggttaggttggtttcgaatttttgattttaggtgatttattcgttttggtattttaaagtgttgggattataggcgtgagttatcgtgtttggtttagatgggggtattttgatgatgaagaggaagagaaagaaaatgtattttttttttttggggtttnttattacgtttgtgatattttatttttattttttttttaatttgttattttattgattttttttaattggattttttttagtggttagtttttgttttgaaagttagggatgatttagttttaggtatggttattttatttaggggtgaggtagaagtattttttttaaagttttgtttattaggagttttcgtttttatattataggtttatatttagtttttaggattagttagtttatgtggtttttttttaattaataaattagtaattaatttgttaggtgcggtggtttgtgtttgtaattttagtattttaggaagttgaggtaggtagattatttgaggttaggagttcgagattagtttggttaatatggtgaaatttcgtatttattgaaaatataaaaattagtcgggtatggtggtatgtattcgtaattttagttatttaggaagttgaggtaggagaattatttgaaattaggaggtagaggttgtagtaagttgtattttagtttggtgataagagtaaaattttgtgttaaaaaaataaagaaaattaaaaaataaagaaaaatataaaaaatttttttatttgttaaaaaaaaaaaaatttatcgtgaattaaaaattagtaaaaataatgaattaaaattttgtttttgtaaaatgtatgataataaaatgttaaggaaggttatgtgtcgttatggtttattgtagttttgaatttttgggtttaagcgatttttttgtttcggtttttttagtagttgggattataggtttgtgttatcgtatttagtttattttttttttttattttttgtagagataggagttttgttttgttgtttaggttggtttttaatttttagtttttagtgatttttttgttttagttttttaaagtgttgggttgatgggatatttttatatatagtgttatgttattataaatgagaagttttaaaaatattgattttaaaaattaatttatgttaagaatttttataattaaagttaaaaaattaaataaaaaatatgaaaagggttaatatttttgagaggtgatgagaatttataagttaataagagaaaataaatatttttataaatgaataagttaaggatatgaatgggtaatgtatataagaaatgtaaatgtttagtaatatgttaaaatagatttattattattaataagttatttttattttttagttggtagagttgttttgaaaaatagatatgtaatgatggtggaaaagattggtttaattatttagtaggaaaatttggtaattagaagtgtattaaaagttttagaatgttttataattttagattgggaaattttatttttagaaattaatttatttttagaaataattatgagtgtgtataaagatattattataaaaatattttatagtattatgtttaatagagaagaattagaaataatttaaatttttattaatataggtttgttaaaatatattttgtatatttatttaatggtatattatgtttttattataaattatgttttagaatatttaatagtatggaaaagtgttaatagtatttttttaatgaaaaaagtttataaaatagtttgtgatgattttatttaaaatgtgtgtttatttatagaataaagattagaaaaataaatattgatatattaaagggttattttatggtaaattgtaaatgattattttttttttttgtggtttatttgtatttttgaagttttttataatgtaaaagaatattttatgatatgaaaattataatataatttataatataagaaagaataattcggtcgggaacggtggtttacgtttgtaattttagtatttttggaggtcgagatcggcggattacgaggttaggggtttaagattagtttggttaatatagtgaaattttatttttacgaaaaatataaaaattagttaggtatggtggtgcgtgtttgtagttttagttattcgggaattgtttgaattcgggaggtggaggttgtagtgagtttagatcgtattattgtattttagtttgagtaatagagtgagatttcgttttaaaaaaaaaaaaaaaaaaaaaaagaataattaatagaaaatggttagatatttttttagtgttttttaagttaggaggattttagtagggtagggatttttatggtttttttttatttggagtattattggaggtttttttcggttttttcgttaagtggaatttagttttcggtaaaattataaagtaattaaaagtttgggaggtggaagaaatgtaatcggtagattttatagagtttgtgtaagaaattgatttaatgagaatttagttttttcgtttatagtttttttaaatagaaattaaggtcgattttaggggtttgtttaaatttaggtaagtaatttaataaggtgaggttatgattttatggttttttcgttttgttatatgttgatttagattaaagtttttatattttaaagtgtatagaaatttagttaaaatgtagattttgatttaggttaggggtgggtttgagagtttgtatttttaattagtttttaggcgatgattacgtacgggataggtttgggattatagtttaattagtaatggtgtagaatatagaatttgtagtaagaaggttagttttttaattttagttttgttacggattaattgaatgatagttgtttcggttttcgagttttcgtgaagatgtagtgagttattatatcgtgaggttttcgagtagcgtttattaagaattagttttgatattatttatcgtattttttagagtaagtagtcggtgaagtagggtttgacgaatgaataagtgaatgaatgatttttggagaaaaattgttttttgggtgattagagttcgagaagtaaaatgggagggttcgtgggtgggtaggaggtttattttttagaaagttttttgtattcggtggtttagagggtttggagtgttcggaagtcggtcggtttgcgtttagcggtttaatggggtcgcgggagggaggggagagcgtttagttaatttttttcgttcggggcgtcgtagtttcgtttttcggagcgttgcgacgttcgagtattttacggttgttatatcgtcgcgaggggcggggcgtttgttagggaagcggcgcgcgcgcgcgggcggcgggcgggttggggattcgtcgcgtagtgttagcgttagcgttagattcgcgtttcgcgtttttcggttcgtcgtttgttttgggattcgcgagttcgtattttcgttttgtttgttcgttgttcgagtatggagttgttgtgttgcgaaggtattcggtacgcgtttcgggtcgggtcggattcgcggttgttgggggattagcgtgttttgtagagtttgtttcgtttggaggagcgttacgtatttcgcgttttttatttttagtgcgtgtagcgggagattaagtcgtatatgcggaagatgttggtttattggatgttggaggtatcgttcggacgcgttttttttttttatcgttttcgggtttggatatatcggggtcgttttgtcgggatatttcggtttttatagtaatttgtaggatgtttcgaggttaagattttcggggtttggttttttattagggtatttacgttagttgttttttttgttttttcgagttttaatcggtttttttcgatagtgattgttagttatttggtattttaattgtgttttttttcgggtcgagtaaacgggattaaggatattttttttttttcggttttttatagcgtttttcgttttttttcgtttttcggtttttttcggagagcgcgtttggaaaattttgggttcggtcgttttcgttcgggagtcggtttttgtgtttttcgcggggttttggcggggaaggcgatgggggtggcgcgcgttttgtttcggtcgatagggaaatgaaaagtgtaggaggtagcggtaggagttttttttttttttttcgggtgtgtgtagtggtggcggtgatgggggtgaggttttagttttttggttattatgggtgatttttgcgttttattttttttcgttgtgggggaggggagttttcgtttggaatttttcgtgagtaagggttttttggttttattattttttcgttaaggggagaggggaggaggtcgcgtagaggaagtggggggcgttattttggggagggcgtattttttttttttattggtttttgtttttttaagtagtttattttttttgtcgtttttgttttttattttattttattttagcgtttttattttttcgttgttgtgttttttacgttttagatttagtagtgattgtgcgtttttttttagg

SEQ ID NO: 374 - DNA, 6130 bp, Artificial Sequence
  chemically treated genomic DNA (Homo sapiens)
  unsure (4414)
tttgggggagggcgtatagttattgttgggtttggagcgtggggaatatagtagcgggggggtgggagcgttgaagtgaggtgggatagggagtaaaaacggtagagagggtaagttatttagagagataaggattaataaaggaggaggatgcgttttttttaaggtgacgttttttattttttttgcgcggtttttttttttttttttttgacgggggagtggtaaagttaaggagtttttgtttacggaggattttaaacggagattttttttttttatagcgaggggaagtgggacgtaagggttatttatggtagttagagagttgggattttatttttattatcgttattattgtatatattcgaggggaagggaggaggtttttgtcgttgttttttgtattttttatttttttgtcggtcggaatagggcgcgcgttatttttatcgtttttttcgttagaatttcgcgaaagatataggaatcggttttcgggcgggggcggtcgagtttagggttttttaggcgcgtttttcggagaaggtcgggaggcggagggaagcgggagacgttgtgagaagtcgaaggggagagagtgtttttggtttcgtttgttcggttcgaagagaggtatagttagggtgttaagtgattggtagttattgtcgggaggagtcgattagggttcgggaaagtaagggaggtagttggcgtgggtgttttagtgaaaggttaggtttcgggagttttagtttcggagtattttgtagattgttgtggggatcgggatgtttcgatagggcggtttcggtgtgtttagattcgggagcggtgggggagggggacgcgttcgggcggtatttttagtatttagtaagttagtatttttcgtatgtgcggtttgatttttcgttgtacgtattggaagtaggaggcgcggggtacgtagcgtttttttaggcggagtaggttttgtaggatacgttggttttttagtagtcgcgggttcggttcggttcggggcgcgtgtcgggtgttttcgtaatatagtagttttatattcgggtagcgaataggtagggcgggagtgcgggttcgcgagttttaaggtaggcgacgggtcggagagcgcggggcgcgggtttggcgttggcgttggtattgcgcggcggatttttagttcgttcgtcgttcgcgcgcgcgcgtcgtttttttgataggcgtttcgtttttcgcgacgatgtagtaatcgtggaatgttcggacgtcgtaacgtttcgaggggcggggttgcggcgtttcggacggaaagggttggttgagcgtttttttttttttttcgcggttttattgggtcgttgagcgtaagtcggtcggttttcgggtattttaggttttttggattatcgggtgtagagaattttttaggaggtgggttttttatttatttacgggtttttttattttgtttttcggattttagttatttaggaaataatttttttttaaaggttatttatttatttatttattcgttaaattttattttatcggttgtttgttttaaggaatgcgataaataatgttagagttagtttttagtgaacgttgttcgaaagttttacgatgtaatgatttattatatttttacgaaaattcggaaatcgaggtaattgttatttagttggttcgtggtagagttaggattgggaagttggtttttttgttgtagattttgtgttttatattattgttagttaaattgtgattttagatttgtttcgtgcgtggttatcgtttgggagttggttagaaatgtagatttttaggtttatttttaatttgaattagaatttgtattttaattagatttttgtgtattttaaagtatgagagttttagtttaagttagtatataatagaacggaaaggttatggagttatggttttattttgttaagttgtttgtttaggtttggataagtttttaaagtcggttttagtttttgtttggagaaattgtggacggagaaattagatttttattgaattagttttttgtatagattttgtgagatttatcggttgtattttttttattttttaaatttttggttattttgtagttttatcggaagttagattttatttgacgaagaggtcgaaaaagatttttaataatgttttaaatgggaggaggttatgaggatttttgttttattggggtttttttgatttaggagatattaaggaagtgtttaattattttttgttaattattttttttttttttttttttttttttgagacgaagttttattttgttgtttaagttggagtgtagtggtgcgatttgggtttattgtaatttttatttttcgggtttaagtaattttcgagtagttgggattataggtacgtattattatgtttgattaatttttgtatttttcgtagagatggggttttattatgttggttaggttagttttgaatttttgatttcgtgattcgtcggtttcggtttttaaaagtgttgggattataggcgtgagttatcgttttcggtcgaattatttttttttatattataaattgtattgtagtttttatattataaaatatttttttatattgtagaaaattttaaaaatataaataagttataaaaaaaggaaataattatttgtaatttgttatgaaataattttttaatatattaatgtttatttttttaatttttgttttatgaataaatatatattttaaatggaattattataaattgttttgtaagttttttttattaaaaaaatattgttaatatttttttatgttattaaatattttaggatataatttgtaatagggatataatatattattaggtgaatgtataaaatgtattttggtaaatttgtattggtggaaatttaaattatttttagtttttttttattagatataatattgtaaaatatttttgtggtaatatttttgtgtatatttatgattatttttagaagtgaattaatttttagaagtggaattttttaatttaaggttatgaaatattttaaggtttttgatatatttttaattgttaaatttttttgttgaatagttaaattaattttttttattattattatatatttattttttaaaataattttgttaattagagagtgaaagtggtttattagtaataataaatttattttggtatattattagatatttatattttttatgtatattatttatttatgtttttagtttatttatttatagggatgtttgtttttttttattgatttataagtttttattattttttaaagatattaattttttttatattttttgtttggttttttaattttggttataaaaatttttgatataaattaatttttaaaattagtatttttaaaattttttatttatagtaatatggtattatgtataaaaatgttttattagtttagtattttgggaggttgaggtaggaggattattggaagttaggagttgaagattagtttggataataaagtaagatttttatttttataaaaaataaaaaaaaaaaataagttgggtgcggtggtataagtttgtagttttagttattagggagatcgaagtaggaggatcgtttgagtttaggagtttaaggttgtagtgaattataacggtatatgattttttttaatattttgttattatatattttgtaaaaataaaattttagtttattgtttttattaatttttggtttacggtggatttttttttttttaataaatagaagggttttttgtgtttttttttgttttttggttttttttgtttttttgatataaagttttgtttttgttattaggttggagtgtagtttattgtaatttttgttttttggttttaagtgatttttttgttttagttttttgagtagttgggattacgggtgtatattattatgttcggttaatttttgtatttttagtagatacgggattttattatgttggttaggttggtttcgaatttttgattttaagtgatttgtttgttttagttttttaaagtgttgggattataggtataaattatcgtatttggtaaattagttgttgatttattaattgagggagggttatatagattgattagttttgaaagttggatgtgaatttgtagtatggggacgggagtttttggtgagtaggattttaggagagatatttttgttttatttttggatggaatagttatgtttagagttagattatttttgatttttagggtaaggattggttattggggaggatttagttagaaaaagttaataaaatggtaaattggaggaggggtgggaatggaatgttataggcgtaataanaaattttaaggaggaaagatatattttttttttttttttttttattattaaaatatttttatttgggttaggtacggtggtttacgtttgtaattttagtattttgggatgttaagacgggtggattatttgaagttaggagttcgagattagtttggttaatatggtaaaattttgtttttattaaaaatataaaaaattagttaggtgtggtggtggatgtttgtaattttagttatttcggaggttgagtaggagaattatttgaattttggagttagaggttgtagtgagtcgagatcgtgttattgtattttagttagggtaataagagcgaaattttgtttttaaaaaaaaaagttcgtatttgagaagtgagaggttgaataaggtgatgggtgaggtttattattttatagtttatatgttatggtttagttatttttagatttattgagatgttggggagagttaagcgagttatggggttgagaataggggtgttaaatagggttttggagttagagattgtttttagtttaaatttggttttatagtttatgattttgagagaattattggaatttttttgtttttttttttatttagtggggataatataatagttttataatgatgttttgaaaattaaataagtagaaaatgttttatttgtgtttggtataaagtaagtatttagagatagtagtttttgaaatgattattattatttttttttttaaggagtattttttttgttatgaatatgtatttataatttttttaagaaaagtaaaagtttgagtagtaagagttttatttttagaattgtatttttagtaaattttgaagatttggtttttaacggtaaacgtatggtttagcgtatggagaggattttttagggtttggagttatatttttttgttattttatttttttattgtgtgaatttggttaagttaaattatttttttgtgttttagtttttttttttaaaaatggtgataatagtagtatttttttatagagtggttgtgaggaggaaatgggttgatttgtttaaaatatatagaagagtggttggtacgtggtgaatttttttttaaaaagttagttgtgattgcgggatttaaaagtataaagttggtcgggtacggtggtttatatttgtaattttagtacgttgggaggtaggggtaggtagattatttgaggttaggagtttgagatcgtttggttaatatagtaaaattttatttttattaaaaaaaaaatataaaaattagtcgaacgtagtggcgtacgtttgtagttttagttatttaggaggttgaggtaggagaattgtttgagtttgggagatggagattgtagtgagtttagatcgtattattgtattttattttgggtaatagagatttgttttaaaaaaaaaaaaaaaaaaaaaaaaaaaaagtagtaaattaaattatatataatttagtttttttttttgagaattaaggagttatttcggtgtttatagtattttaggttattattatgagtatttgtaatatttgtataatattttatattaatttttaaaattttttgtttgtttatttttattagtaaaaattgagtatttttcggttgggcgcggtggtttatatttgtaattttagtattttgggaggtcgaggtgggcggattatttgaagttaggagttt

SEQ ID NO: 375 - DNA, 5453 bp, Artificial Sequence
  chemically treated genomic DNA (Homo sapiens)
aagttttgttttttggtttattttattgttttgtgattttgtatgtaaattttgataattattaatttttttaaatttaatgtttgagagttttataaaattaatatatttatttattaagtagtttatgaaattttaatggggttttttttgtgttaagggtacgtatattgtgaagtaaagttttataaagttaaataaatttttttttatatttttaatgatttttagaatatgttttaaagaagttttttttgagagttaagggtaggttatgagtaagaaatagaattggttttgagtatgtttttgtatttatttagttgattgtgggttaatttttatttatttttattattttatagagttgatttattttttttataaattttttgttgtggtttagtgtaaatgttgtttagtataaatatgagagtttgatgttggtaataagttgtttaggtgatttattgaaaaatatgatttaggttaggtgtagtggtttatgttttgttaatattagtattttggggagttaaggtaggttgattatttgaggttaggagtttaagattagtttggtcggtaggtgaaatttcgtttttattaaaaatataaaaattagttaggtaatgtgatatatatttataattttagttatagggaagttgaggttagagaattatttgaatttaggaggtagaggttgtagtgagttaatattgtgttattgtattttagtttggttaacggagtgagattttatttaaaaaaaaagaaaagaaaaatataatttattttttttttttattatttaaaaatttattgttaggtatagtggtttacgtttataattttaatattttgggaggtcgaggcggacggattacgaggttaggagtttaagattagtttggttaatatggtgaaattttatttttattaaaaatataaaaattagttgggtatggtggtaggcgtttgtaattttagttatttaggaggttgaggtaggagaattgtttgaatttaggaagtggaggttgtagtgagtggaggttatattattgtattttagtttaggcgatagagtaagattttgtttaaaaaaaaaataattatttgggaaaattattttagtaaaagaaagtttagggttaggtcgggtgtggtggtttatgtttgtaattttagtattttgggaggtcgaggcgggtagattatttgagattaggagtttaagattagtttagttaatatggtgaaattttatttttattaaaaatataaaaaattagttgggcgtggtggcgggcgtatgtaattttagttatttaggagtttgaggtaggagaattgtttgaatttgggagttagaggttgcggtgagttgagattgtattattgtattttagtttttttagtttggataataagagaaaaatttcgttttaaaaaaaaaagtttaggattattattttgtttttagaaatatattcggatttaggtagtgaagagtggtatgagtaatattgtgagttaatagttagaaattttaatatcgaattgtggatgtatatttgagggtaatttttattatagttgttgtcgtgaaagttagaatgaagaaaatttgttattgttatagaatttgtgagtataggtatggtaaaaggtacgttagtgggaattgttgttataggatgagtttttaaggagagtattatagatttttggtgaggtttatagttaaatagtttgtatttttatttagaggttaggtatttaaatatatgtaattagtaaattgtttaatttgtttaagttttcgtttttttttttagtattatatagtgggatagttaggattaaattagtgtattatttattattttgtaataaatgattttaaaattaagtggttaaatttttaatttttttggtttttttgggttaggaatttagaagtagttttattgggtagttttgatttagtgtttaatgcggttgtaattagaagttattgaggttatagttatttgaaggtttggttgaggttggttgatttatttttaagatggtttatttatagagttgataagtcgatgttggttgttggtaagaggttttagtttttttttatatggttgtttgagtgaatttatgatatggttggtttttattagagtaaataatttaagtatgttagttaatagtatttttttatgttttagttttataaattatattttagttatattttattggttatatagaataatttgttttattgtgggagattatataataggattaatatcggaaggtaaggattattatggttattttataagttggttaatatagatgtatggaagtgttttaaattgaaaaatgttttgtaaatgtgtaatgttatttttttttttttttttttggtttaaagtgtttaaatgatattttatatatatagtattttattgttttagaatattatttaaacgttgtttttattattttattttaaatgttttagaatgggaatttatttgttagtagtacgttgtaatatattgattattaatttatacgttatggtatatttggggattttaagttttataacggtattattagatttagtttattagtttttttttttttttttttttttttttttttttttttttttttttttgacggagtttttatttttgttgtttaggttggagtttaatggtgttatttttgtttattgtaattttcgtttcgcgggtttaagtgatttttttgttttagtttttttagtagttgggattataggtgtttgttattatatttaattaatttttgtatttttagtggagatggggttttattatgttggttaggttggtttggaatttttgatttaaggtgatttatttgtttcggtattttaaagtgttggattataggtgtgagttattgtatttgtcgtttattagtttatttttataagtgaggttaaattattattttaatgatatttgttagaagaaattatgataatagtattattaggtatgatttgttttaggagagatggtgttttttttgtaatgtgtgagttttgtttagatttaagtaatgataagggattgaaagataatggttaatatatagtaaatatttaattgttaaatattattttaagggttttgtaggtgtgaggttatttaagttttggaataattttttgagtagattttattagggatgaagaaattggaaataaagtaagtaatttgttttagttgtatttagtggttgaatattgatagggttattatttaaatgtaagtagtttgattttagagttaaaaaaaataattaaattattggttttggtattttgttattttttttaatatatttttgaaatttaggatttttaatttttagaaataataaatataggttgggcgtagtggtttatatttataaatattagtattttgggaggtcgaggagggtggattatttgaggttaggagattgagattagtttggttaataaggtgaaatttcgtttttattaaaaatataaaaattagttgggtgtggtggagtaggttagtaattttagttaatcgggaagttgaggtaggagaatcgtttgaatttaggaggtagaggttgtagtgagtttagatcgggttagcgtattttagtttgagtaatagagtgagattgttttaaaaataaataaataaaggtagggggaggggggtatatttttatgttgatagttgttttggtttagaaatttttaattatttattagtagagttatttggattattgtaatagttttttaataggtttttttttttttttttgttttttaaaatttataatatagttttttaatagtaagagtgaattttttaaaagtgagttaggttatattatttgtttgttttaatttttttagtgggtttttagtgatgatttttttgtattattttatttgaaatttttatttttgtttttgttttgatttgttattttttatttgttttattatttttatagtatttattatttatgtattataatatatatttgatttgtttttttatttttttttattggaaggtagggatttttgttttttgttattttagattttataatggtgtttggtatatagataatatttaatattagtattttaagagagagaaaaatgaaaaaggaaaagtatttaatatgtttttgaataaatgaattagtgtgtttgttatgataatttatgataattaaggggttgggtatttattattgttaagttaattgagtattgttttaattaattgagttaatgtttaagttttttgtatgttttatttaatatttataattttttgtgatgtagtttattattttttttattttatcgagtagaaaattgaggattagaagttgatttttatagtacgttttagttgagttggattttgtttttttgggtttgtttttttataaagggattggattaagaatatttttgattagttcgtaagaatttggtattcgttttagtaatttgagatagtagggtttggcgtttatagtaattacggcgataggacgcgttcgagtaagaattaaaaagcgagaataggtataaggttaaattttttatatttatagatatttattaaatttcgaatatggaatattaaattagaacgttgattagtttttggtaatgtagaaaatatttaagttaaaacggtaatagagtgatatagtagttattgaagatgttttattttaggtatcgataggcgttacgtgacgggtggggaacgttaatcgtttgggtttagcgtagtttttttcgtttattacggaagtgaggcggggatattaaagcgacggagttcggtggacggaagtgggtgttggaggttttaaggtagttttaaattcgtgttgttttgggagttcgtttttttcggttggagtcgggttttacggcgtcggatggttttggacgtgaagtttcgggtaaagcgttatgagaagttggatttttttggggagggataggtgaggttttttggaaggacggggagggttttaagcggatagtttcgcgtcgtttttatttttgcgggttttttcgtggaggttagaggtttggtttggttgttcgttttcgttgggggaaatcgtttagacgtatttgttgtttattttttatattttgggggtgaatttttgaggggtttttttttgttgaagagtagtttggagttggacggagattgattcgttacgtttttagtcgtcgcgagtttgtttaggaattttgggttttttgtttcgcgaaatgtaaaaatgtaaaaaggtaaatataaaaatttttataaatttatgttatttttatttttttttttagt

SEQ ID NO: 376 - DNA, 5453 bp, Artificial Sequence
  chemically treated genomic DNA (Homo sapiens)
attagaaagaaaaatagaaataatataagtttatgggagtttttgtgtttgtttttttgtatttttatatttcgcgaagtaaagagtttagagtttttgagtagattcgcggcggttggaaacgtggcgggttagttttcgtttagttttaggttattttttagtaaggagaggttttttagggatttatttttaggatgtaaagaatgggtagtaagtgcgtttggacggttttttttaacgagaacgagtagttaagttagatttttggtttttacgggaaaattcgtaaaggtggaggcggcgcggggttgttcgtttggggtttttttcgtttttttagagagttttatttgtttttttttaaggaagtttagttttttataacgttttgttcgagattttacgtttagagttattcggcgtcgtaaagttcgattttagtcgaaaagggcgagtttttaggataatacgaatttaaagttattttaaagtttttaatatttattttcgtttatcgggtttcgtcgttttagtattttcgttttattttcgtggtgggcggaggaagttgcgttaggtttaggcggttggcgttttttattcgttacgtgacgtttgtcggtgtttgaagtggggtatttttaatggttgttgtgttattttgttgtcgttttaatttgggtgttttttatattattaggaattggttagcgttttaatttggtgttttatgttcggggtttggtaggtgtttgtgaatgtagaaagtttggttttgtatttgttttcgttttttggtttttgttcgagcgcgttttgtcgtcgtggttgttatggacgttaaattttgttattttagattattgagacgagtgttaagtttttacgggttggttaagagtatttttggtttagtttttttatgaagaagtaggtttaggaaaataaaatttaatttaattgaaacgtgttgtgggaattagtttttagtttttagttttttattcggtaaaatggaaaaaataatgaattatattataggagattgtgggtattaaatgaaatatgtagaaagtttagatattaatttaattaattgagatagtgtttaattaatttagtagtaatgagtatttaattttttgattattataaattgttataataaatatattaatttatttatttaaaaatatattgagtgtttttttttttttattttttttttttttaggatgttgatattgagtgttatttatgtgttaagtattattgtagaatttgagatagtagggagtaaagatttttgttttttaatgggaggagataaaaaaataagttaaatatgtgttatgatatataggtgataagtgttatagagataataaagtagataaaggataataaattagggtaggggtagggatggaggttttaaatagggtggtataagaaagttattattgaaaatttattggagggattggagtagataagtgatatgatttgatttatttttaaaaggtttatttttgttgttgggagattatattatagattttgagggataagaaaaagaaagaaggtttattagagaattattgtagtaatttagatggttttattagtggataattaaaagtttttgagttagagtagttgttaatatggaaatgtgtttttttttttttgtttttgtttgtttgtttttgagatagttttattttgttgtttaggttggagtacgttggttcgatttgagtttattgtaatttttgttttttgggtttaagcgatttttttgttttagtttttcgattagttgggattattggtttgttttattatatttagttaatttttgtatttttagtagagacggggttttattttgttggttaggttggttttaattttttgattttaggtgatttatttttttcggttttttaaagtgttggtatttgtaagtgtaagttattgcgtttagtttatatttgttatttttaagagttgaaaattttaagttttagagatatgttgaagaaagtagtaaaatattaaggttaataatttagttattttttttaattttggaattagattgtttgtatttgaatagtggttttattagtatttagttattagatataattagggtaaattatttattttgtttttagtttttttatttttaataggatttatttaaaggattgttttaaggtttaaatgattttatatttgtaaagtttttagaataatgtttgatagttaagtgtttattatatgttagttattattttttagttttttgttattatttgggtttaggtaaaatttatatattgtagaaaagatattattttttttgaggtaagttatatttagtgatgttgttgttatagttttttttgataggtattattgaaataataatttaattttatttgtagaaataagttagtgagcggtaggtgtagtggtttatatttgtaatttagtattttgggatgtcgaggtaggtggattattttaagttaggagttttaaattagtttggttaatatggtgaaattttatttttattaaaaatataaaaattagttgggtgtggtggtaggtatttgtaattttagttattagggaggttgaggtagaagaattatttgaattcgcgaggcggaggttgtagtgagtagagatagtattattggattttagtttgggtaataagagtgaaaatttcgttaaaagaaagaaagaagggaagaaaggaagaaaagagagagagagaagttagtgagttaaatttgatgatgtcgttgtgagatttgaggtttttaagtgtgttatggcgtatgagttgataattagtgtattatagcgtgttgttgataagtaaatttttattttgggatatttaaaataggataatgaagatagcgtttagatgatattttgagatagtgagatattgtatatataaaatattatttgagtattttgaattaaaagaaaaaaaaagaaaatagtattatatatttgtaaagtattttttagtttaaagtatttttatgtatttgtattagttagtttgtaagatggttatgatgatttttgtttttcggtattaattttgttgtgtggttttttataatgaaataggttgttttgtgtgattaatagaatatggttgaagtgtgatttatgaggttagaatataaaaggatgttgttgattggtatgtttggattatttgttttggtgaaagttagttatgttatgaatttatttaggtaattatgtggagagaaattaaggttttttgttaatagttagtatcggtttgttagttttgtgagtgagttattttggaggtggattagttagttttagttaagtttttagatgattgtagttttagtggtttttaattgtaatcgtattaggtattaaattaaaattgtttagtgaagttgtttttgaatttttgatttagagaaattagagaaattaagagtttagttatttaattttggggttatttgttataaagtaatagataatatattaatttgattttgattattttattgtgtagtattggaaagaaaaacggaaatttggataaattaagtaatttgttgattatatatatttaagtgtttaatttttaaatgaaaatataggttatttaattgtaagttttattagaagtttataatattttttttgggagtttattttgtgatagtaatttttattggcgtattttttgttatatttatatttataaattttgtaatagtgatagattttttttattttgatttttacggtagtagttgtagtaaagattgtttttagatatatatttatagttcggtattaggatttttaattgttggtttatagtattatttatattattttttattatttgaattcgaatgtatttttgaaagtaaaataatggttttgggtttttttttttgagacggagttttttttttattgtttaggttggaaaggttggagtgtaatggtgtaattttagtttatcgtaatttttggtttttaggtttaagtaatttttttgttttagatttttgagtagttgggattatatgcgttcgttattacgtttagttgattttttgtatttttagtagagatggggttttattatgttggttaggttggttttgaatttttgattttaggtgatttgttcgtttcggttttttaaagtgttgggattatagatataagttattatattcggtttggttttgggtttttttttgttaaagtaatttttttaaataattgttttttttttagatagagttttgttttgtcgtttaggttggagtgtagtggtgtgatttttatttattgtaatttttattttttgggtttaagtaatttttttgttttagttttttgagtagttgggattataggcgtttgttattatgtttagttaatttttgtatttttagtagagatggggttttattatgttggttaggttggttttgaatttttgatttcgtgattcgttcgtttcggttttttaaagtgttgggattataggcgtgagttattgtgtttggtaataaatttttaaataataaaaaaaagaaatgaattatgttttttttttttttttttttggatggagttttatttcgttgattaggttagaatgtagtggtataatgttggtttattgtaatttttgttttttgggtttaagtgattttttggttttagtttttttgtagttgagattataggtgtgtgttatattgtttggttaatttttgtatttttagtagaggcggggttttatttgtcggttaggttggttttgaatttttgattttaggtgattaatttgttttggttttttaaagtgttggtattaataaagtatgagttattgtatttggtttgaattatgttttttaatgagttatttgaatagtttattgttagtattaaatttttatatttgtgttgaataatatttatattaggttatagtaaaaaatttataagagaagtagattaattttgtggagtagtagaaataagtaaaaattaatttatagttaattgagtaaatatagaagtatatttaaagttaattttattttttgtttatgatttatttttaatttttagggaggatttttttaaagtatattttagaaattattaaaggtatggaagagaatttatttagttttgtgaggttttattttataatatacgtatttttggtataggaggggttttattaaagttttataaattgtttaataagtaaatatgttgattttatgaggtttttagatattaagtttgagaaggttaatggttattaggatttgtatataagattataaaatagtaaaataaattaaaaaataagattt

SEQ ID NO: 377 - DNA, 8676 bp, Artificial Sequence
  chemically treated genomic DNA (Homo sapiens)
  unsure (5391, 5679, 5739)
acggtattaaatgaagttttagaaaagttttgtttttttgagaattgtaatttttttgtttgtttttttttattttagtgatgtaaaagagattattattttaagtgaagtaatttaggaatggaatattaaatattttaagtttttattgatatgtgggaattaagttatgaggatgtaaaggtataagaataatatagtggattttggggatttggggggaagatgggagggggtaaaggataaaagataataaatacggtgtaatgtatattgttcgggtgatgggggtattacgattttataaatttttattgaagaatttatttatgtagttaaatattatttatattttaataatttattaaaaaaatgaaataaataaataaaaaaaggttttttgttttgttttgtttttttatttttttgatgtatgaagatttgagttttgtagttatttttttttttatttaggtgtaaagggtttataagtgttttgttttttatttgtataataaatagtattaaagttttgatattaaaggatgaattttgtagttaggttttttgggggttttcggaagttattaattgttgtgttaaatttgtatatttaagatgtagtagtttgtggtagaagcgttttttaataacggtgggaattttattaggtagagttttggttatttattattatttggttgtgggattttggattttttatatttttttttacgtattttttatattattttatttgaagataagtatagtttttaggtttaaatttagtggaattatttaggaatataaaagttggatgttagttgttataaattaataataaaagaagagaagaatttagaatttattttttttttttattttaggagttaataaaataaagtattttatttttttatggagtacgaaaggtaaattatagtgtttggtttttttttggaaggaataatttaagttgaataaatgattttttattttaaaatgtgaatgtttattaattaaatattattttatagaaataatagttaggtatggtggtttatgattataattttagtattttaggaggatgaggtaggaggattgtttgagtttaggattttgagattagtttgggtaatatggtgaaattttatttttattaaaaatataaaaaattagttaggtgtggtggtatatatttgtagttttaggtatttaggaggttgaggtgagagtattacgtgagtttggggagggtgaggttgtggtgagttatgattatattattgtaatttagtttgggtgatttgagtgagattttgttttataaaataaaaataaaaataaaaatgagtaataatagttggttaatatacgttaggtattatattagaagttttataatatttatttagtatttagaagaattatataatgttaattatttataatttgtagatgagaaaattatattttagagaggttaaggaatttaaagatatatagttagaaaaagtttagttaaagtattaaattggggttgtttgaattgaaagttttggttttttaaaagagaatttagggagttattggagtattatgggtaggttttattttttttataaaaaatttattaggatgtttagaaaaagtagagtggatttatttttttattttttttgtttttttagttttttatatattttttttattattatttgtttacgggttaaaggtttttttttttttattttggtgaaattggttttttatatataggtggaaatttcgggatgtttggtgttatttataaacgttttttacggattaaaaatatttttggaatttaattttaatttaatttagtatttataaggtatttcgtagtttaaacgtttgtggtaggtattgtataaaaaaaagtatattattgtttttagattatttaattattatttttattaagtgtgtaagtagatatgttttgatatgttttttagtgtatttaaaataattttaaatttttattgtagtaagatttgttttatttaagagtaaagtaattttattttaaaattaggtgattttaggtatttttttaaaggtatgatattttattgtatttttatgatttcgttgatgtgttgtaaatagtttttaatatttgaaaattttaggttgtttttttataatgtgggtggttttttgtattgatggtggtttttgtttattattatttttaaaattttgttttattttttaaggaattatatttgttaggttagaatatttttgttttaggtagttataatggatagaggaatttttagtagtttatttttgttttgtaatttagaaatggatttaaagaggaagttatagtttagtttttttaagttagtattttttgttttttggtttttttgattatcgggttgttttgggttttgaattaaaatataggaagaaaaaagggaaagttagtgaatgtattttagtaaatgatgttttgtttttaggtagttgtgtttggaaagattttgtttaatattttatgtgtatattttggggaaaaaaatggtatatgttttagaaattttattgtttataataatgtaggtagttagtttttcgttttaaatatagatagatatatgtaatatttaagattttgtagagaggtagttagtatttattgtttaaaaaggttttaaaaagaattcggattgttttttttttttttgaatttgtgtgttaaatgatagggattaatattcgttttttttttttgtaaaatttagaaagatatatgaaagaatttagaaatgtattttttaaagggatttagtgtagttattttaaataatttatgtacgtatatatatatatatatatttttcgagtatatattttttttttttttatttgtgtgtaattagtagttataatgattgaaatttatttttttggattgtgatatttaagtaaattttgtatttagaaatcgaaatgtttagagtttcgtataagttgttcgtttgggttattaatttatatagtcgtcgtttagcgtttcggtacgcgtgtttattttgtgtaaaagtaaaagttgtttatgttattagttcggttttgagtttgtatgagaaattagcgtagttttcgagttacgggagaaaatacgatttgttgcggagtttagtgatttgaaattgtagtagtgattcgagatttgtttttttttcgacgtcgttttataattttttcgttttatttaggattcgttttttcgagagtagttatttaggtaattttcggaaggtttgttaggagtttttttttgaaacgtttttcgattttattttttgaaatttagtaggcgagagttacgatagattttaggattttttgagcgttgttcgtagttttacggtaggagtagttttagtgtacgagatttggcggtggttgaaaagttcgtttaaacgtacgtattatttttttgcggggttgcggattgcgggttgcggtttttgttcgttcgtttttttttcggggtcgtatattttcgtatttggtcggtaggtggcgcggttggtttacgatgagttgcggtcggggttggagaggtttttttattttttagcggtcgttcggcggggaattttaaggttttttaggaaaattcggttttgttttggagggagttagaggaggggcggtttgggaaggggaagggaggttttattgttaggaattagtgttttgttagcgtttggggaaatgtatcgagtggcgttggggatcggtttttgggataatcgttgcgttgcgtttcgtcggatcgtttttaggtggcgcgtttacggttcgggtatcgggaaaagattatagttcgatggtgttagtcgtttcggggtcggagtagtcgggcggggttttgcgggtttttttgttcgtcgttttttttcggggtagggagggttgtttcggttaggtcggagcggagagtcgtagtagcgtttcgggtagttttttagtttcggtttgttttgtttgtgcggttgtaagttttcgtatttatatttaagttttttatttttattttatcgtttttagagggttaggttcggttttagggattgtttttaattttgttttcgggaaatttataattggttttttgtagtttaaggttatttcggggcgttttgggttttgggcgaggtttacggcgtgtgtagggggacggggttagcggggatttttttattgttagaaagttattcgtttagtttttggagatagtgacggagttttgttgcggattggacgttgggattaagtaggttttcgttttttaggtatttggggagttagggaagaagcgagtgatagagttataaaatttttcgtaaagagtattttagagggggaagcgttataaagataaaatagggtaaggtggtagagggtggcggtggtaggcgcgagtttgtagtttagttcgggcgcgttggacgtagatacgtcgatttttttaaagaagtaatcgtaggttagtttagattttttttattttaataaaagagcgtttttttttattttaaatcgttcgtggtgggagaaaaggtttttaattttttttttggtttttttcggttaatttcgagtttttttaaagttttttcgtcgtttaggggttcgattttcgaggtaacgtgggggatttcgttggtttttttcggtaggcgggggcggggatcggtcgtgttcgttttttagagtttcgggagatcgcgcgtttcgtggagttcggagggttgtaattttggggcgggtttgttcggtgaaggcggggttcggcgttttgtttgcgtcgttattggcgcgggttcggattggcgggtttacgttatcggtcgggttcgtttttttggtaatgtttttagttcgttgtttttttaatttaagtatttattttattgggatagaagcggtaggagtagcgttggtatcggcgaattatggttgggattttttatttcgttttattttcgtgttttttcgggatttgcgacgttgttataggttttagggtatattcgcgaatgaaggtaagagcgggacggtttttttgtcgtcgtggatagcgagtagttatcgcgggtgaggggttttatgagcgtagcgttaggtggtgtatggggagttagtgtgaatgatgcgttcgattttgagaacggggttgacgtatgggatcgcgagcggtagtagttaacgcgtatagttgtacgagcggtgatcgtgtagcggcggtttgttaagttgtaataaagttaagttatagtattatagatagtcgtcgagcgtttaatgatgaangtaatagttggattagtttagtgtgaatggtgcgtttcgattcggagaagggggttgaggcgaggggatcggcgaaggggtagcggggaattcgcggatagtttgtttcgaggcggtgattcgtgtacgcggcgggtttgtttaagtttgtaattaaaggttaaagtttattagtattcgttagagaggttcgttcgaggcgttttgaggggatgtacgggagataacgtcgggatttaaaaaaaaaattataagaattacgtttttttttgagttagttcggggganggggaaaacgtagtttggagtatagtgaaggtttggtgttttcggattttagcgaaagtntttcgagttttggtttttgtaaagtttttcgagttttgcgtttttcgggatcgggttgcggggtttgtttcgtacgtacgatacgatggcgtcgttcgttaggcgtagtgatttgatttttagtattcggagttagatattttttttttcgttaagtttagcgtttcgagggtgcgattgcgggtttgagggggtagtttttcgtttcgtagatttggggaattcgtcggtaagttgaacgtagtcgagttttagtttttcgttttagaattgtatatagtttagagttaacgtgcggggtcgacgggatcgtttgggtgtttagttttttgtgtattcgttcggacgtgttgggaggattgtatgtgtttgtgtgtttgtgtcgggaggtggggcggggcgggggggcggtgattatttagtttttgagaaatttagggagaggcgaattgtgtgtgtgtgtgtgtgtatgtgtggtgtgtgtgtgtatgtttgcgtgtgtgtgtatgtttgtatgtgtggtgtgtgtgtatgtttgcgtgtgtgtgtatgtttgcgtgtgtgtgtttgtgtgtgtgcgcgcgcgtgtaattgcgtgtatgtaggtgcgcgaatgtttgcgtggaagcggacgcggaggattgtatgtttgtgcgtagatgttttgagtgtgtgcgcgtgtgttcgagtgtatgttcgtgttttgttcgagcgtatgttggtgttttggtttgcgtgtatttagttttatattcgttttttatttttttttttttcggtatttatttatttattcgttcgtttattcgtttatttatttatttatgtatttatttattttttcgtgtattcgttcgttcgtttatgtatttatttataatgtatttatttatatatttgttcgttcgttcgtttatttatttttttatttatttatttatttatttatttatttatttatttatttatttatttatttatttttttatttttttagatattcgtttatttatttttgtgtaattatcgttttttttgtttcgaaggagggagttaaaaattaatttagttttggttgggtagtcggtattcggagttttttagacggaggttttgagagatttatatatttgtttatagatatcgtttgggaggaaaggggttttttttcgttttttggattttttattttttttcgacgtggtttttggtggttttggtgttatttcggtcgtcgtcgtttttcggtttttagggttatttatttttttgagaggaatcgtggatttcgcgtttttttggttattttatatatttgttaggacgttttttgagatttttttcgttttagatgtagagattgtttttttttttttttttaaattttttttttttttgggggggggagaaaaatttgggagtttaagataaaaaggttttgagagttttaggttaatgttgaaggggagggagggaggtttgtttttttttttttttttattttttttttaaaaattaatttattttgttgttttttatttttattacgttttttttttttttttttattttttttttttatttttttttttttttgtaaattgggttttattgttttttttgtgtttttaatttattttatataaatttaaatggatgtagcgggtttttttttagggatagagagaagagaatggttgcggtgggggttggcggtggggagaggagaggagggaagggggcgggaattttaggcgggagcgatttagggaaggttttatattttaaaattattaatagattttaggaatttagatttttcgggaaaagtaggggaaagagattgatttttaattttattgattttgaggtgaaatgagagggaaagtgggtagaatttaggggtttgggggtaagtttgagtgttggggtgcgtatgagtacggatggcggttttttatttttattttttttttagtttgaagagttagtttggttgattaaattaataatttagtggtttttttgaggtgggtttttcgatttttaggattgtagatttcggtgggaaagagaggttttgaatttattgcgtttttttggatgttttttttatttagcgtttttttagtttgagcggggtatcgtagttcggtgggttgtttttttttttttttaagttttgacgtatttaggtgtagtataagtatattaaagtcgttaggtagtattttatatttaaaatttaagttagtgattttttacgggtggaagacgagtttttgattgttttttaatatattttgagaaagagagaatattttcggtacgtttgtattttgattttgtacgtttggtattttttttttttgaaattttgatatttaaaaaagtagcggatattatatttagggattatttatttggttgtggaagggaaaatgttagggagagtttttttttgattttttggataggatattttttgatagaagagagaatttatttgtggttttgttattttgatgagttatgtggttatttgaaatttgtaaaaataaataattttagtagatattagatagagatgaatgtagattttgttttggagtgtaattgttttatatagatgtatttatttttttgaattgtattttagattttttatttattttttttagaaaaatgaattaagtgagttttaggatggaattttaaatgttaagtaagttgaataaataagaatttgtagatttaaagagggggagaagattaaatgagtaatgattatttatataagtgagtttaagtttaggttttgattagtgttggatatgtatagttttagtatatatggaaacgtttaggtaaatggtttttgtgttattggttttttgtaattggaaatttatttattttttttttgttttttgtagt

SEQ ID NO: 378 - DNA, 8676 bp, Artificial Sequence
  chemically treated genomic DNA (Homo sapiens)
  unsure (2938, 2998, 3286)
attgtaaaaaataaaagaaaaatagatgaatttttaattgtaaaaagttaataatataaaaattatttgtttgagcgtttttatatgtgttgaggttgtgtatatttaatattgattaaaatttaaatttgggtttatttatgtaaataattattatttatttgattttttttttttttttaaatttgtaggtttttatttatttaatttgtttagtatttaaaattttattttaggatttatttgatttatttttttaaaaaggatgaatagagaatttgaagtataatttaaaaagataaatatatttatgtagagtagttatattttagagtaaaatttgtatttatttttgtttggtatttattagaattatttgtttttgtaagttttagatgattatataatttattagggtgatagagttataagtgaatttttttttttattagagagtattttatttaaagggttaggaaaaggttttttttaatatttttttttttataattaagtaaatagtttttgaatatggtattcgttgtttttttaaatattaaagttttagaaagagggaatgttagacgtgtagaattagaatgtaaacgtatcgaaagtatttttttttttttaagatgtgttgggggataattagagattcgttttttattcgtaggaaattattggtttgaattttaggtatggagtgttgtttaacggttttagtgtgtttgtgttatatttgagtgcgttaaagtttggggggaagggaggatagtttatcgagttgcggtatttcgtttaggttagaagagcgttaggtaaggggaatatttaaagggacgtaatgaatttaaaattttttttttttatcgagatttgtagttttgggggtcgaaaggtttattttaaaggaattattgggttattaatttgattagttaggttggttttttaggttgggggaggggtgggaatgggaagtcgttattcgtgtttatgcgtattttaatatttaagtttatttttagatttttggattttgtttatttttttttttattttattttaaagttaatggagttaaaaattagttttttttttttatttttttcggggagtttgaatttttggggtttgttaatgattttaaaatgtagagttttttttgggtcgttttcgtttggagttttcgtttttttttttttttttttttttttatcgttaatttttatcgtaattatttttttttttttgtttttagagaaaagttcgttatatttatttggatttatgtaaggtggattagggatataaaggaaataataagatttaatttataaaaaaaggagggagtagaaagggagggtaaaagagagaaaaggaaacgtgatgggaatagaaagtaataaagtgaattaatttttaagggggaggtgggggaggggaggggaatagattttttttttttttttttaatattagtttagggtttttagagtttttttgttttgggtttttaagttttttttttttttttagaaaaagagggggtttaaaaaaaagaaagaaaatagtttttatatttggggcgagagaggttttaggggacgttttaataagtgtgtgaagtggttaggagaacgcgggatttacgattttttttaggggaatgaataattttagggatcgaggggcggcgacggtcgagatggtattagaattattagaagttacgtcggaaggagatgggagatttagagggcgagagagagtttttttttttttaagcgatgtttgtgggtaggtgtataaattttttagagttttcgtttggagggtttcgggtatcggttgtttagttaaggttaagttggtttttggttttttttttcggaatagagaaaacgatgattatatagggatggatggacggatgtttggagagatggaaagatgaatggatggatggatgggtggatggatggatagatgaatgggtggatggatggagggatggatggacggacggacggatagatatatggatggatgtattatggatggatgtatggacggacggacggatgtacggagagatggatggatgtatggatggatagatagacggatggacggacggatagatagatggatgtcggaaaggagaagaatgagagacggatgtgagattagatgtacgtaggttagagtattagtatacgttcgaatagagtacgagtatatattcgaatatacgcgtatatatttaggatatttgcgtatagatatataatttttcgcgttcgtttttacgtaggtattcgcgtatttatatatacgtagttgtacgcgcgcgtatatatataggtatatatacgtagatatgtatatatacgtagatatgtatatatattatatatgtagatatgtatatatacgtagatatgtatatatatattatatatatatatatatatatatatagttcgtttttttttgggttttttagaaattaaatgattatcgttttttcgtttcgttttatttttcgatatagatatataggtatatataatttttttagtacgttcgaacggatgtatagaaaattgagtatttagacggtttcgtcgatttcgtacgttagttttaaattgtgtgtaattttggggcgaaaagttaaaattcgattgcgtttaatttgtcggcgggttttttaagtttgcggggcgaagagttgtttttttaggttcgtaatcgtattttcggggcgttgggtttggcgaggagaaaggtgtttgatttcgggtgttagaaattaggttattgcgtttgacgagcggcgttatcgtatcgtgcgtgcggagtaggtttcgtagttcggtttcgagaagcgtagggttcgggaaattttgtagaaattagagttcgaaangttttcgttagaattcgggagtattaagtttttattgtgttttaggttgcgttttttttntttttcgggttggtttaggagaggacgtggtttttgtaattttttttttaaatttcggcgttgtttttcgtgtatttttttagggcgtttcgagcgggtttttttggcggatgttgataaattttggtttttggttataaatttggatagattcgtcgcgtgtacgggttatcgtttcggggtaggttgttcgcgggtttttcgttgttttttcgtcgattttttcgttttagttttttttttcgaatcgggacgtattatttatattgggttaatttagttattatntttattattaggcgttcgacggttgtttgtgatgttataatttggttttgttataatttgatagatcgtcgttgtacggttatcgttcgtgtagttgtgcgcgttaattgttgtcgttcgcgattttatgcgttagtttcgtttttagaatcggacgtattatttatattggttttttatgtattatttggcgttgcgtttatgagattttttattcgcgatggttattcgttgtttacgacgatagaaaggtcgtttcgtttttatttttattcgcgggtatattttagaatttgtgatagcgtcgtaaatttcgaagagatacgaaaatagggcgaaatagaaaattttagttatggttcgtcggtgttaacgttgtttttgtcgtttttattttagtggaataaatgtttaagttaggagagtagcgggttgaagatattgttaagggggcgggttcggtcggtgacgtgagttcgttagttcgggttcgcgttaatggcggcgtagatagggcgtcgagtttcgtttttatcgagtaggttcgttttagggttatagtttttcgggttttacggggcgcgcggtttttcggggttttagggggcgagtacggtcggttttcgttttcgtttgtcggagggagttagcgggattttttacgttatttcgaaggtcgagtttttggacggcggagggattttggaaaagttcggaattgatcgaggggagttagagaagaggttggaaatttttttttttattacgggcggtttaagatggaggaaaacgtttttttattgaaataaaagaagtttaagttgatttgcggttgtttttttaggagagtcgacgtgtttgcgtttagcgcgttcgggttgagttgtagattcgcgtttgttatcgttattttttgttattttgttttgttttgtttttatggcgtttttttttttgaaatattttttgcggggagttttgtggttttattattcgttttttttttggttttttagatgtttggagagcggggatttatttggttttaacgtttagttcgtagtagggtttcgttattgtttttagagattgaacgaatgattttttagtagtaaggaagttttcgttggtttcgtttttttgtatacgtcgtggatttcgtttagggtttaggacgtttcgagatggttttgggttgtagggaattagttgtggatttttcgggggtagggttgggggtagtttttggaatcgggtttagttttttgggagcggtggggtagaagtgaaaggtttaagtgtgggtgcggggatttgtagtcgtatagataaggtagatcgggattgggaagttgttcggagcgttgttgcgatttttcgtttcgatttagtcggggtagttttttttgtttcgggagaagacggcgagtaggaggattcgtagagtttcgttcggttgtttcggtttcggggcgattggtattatcgggttgtggttttttttcgatgttcgagtcgtggacgcgttatttaagagcggttcggcgaagcgtagcgtagcggttgttttagggatcggtttttaacgttattcggtgtatttttttaggcgttggtagggtattgatttttagtaatgaggtttttttttttttttttaggtcgttttttttttgattttttttagagtagggtcgagtttttttggggagttttggggtttttcgtcgggcggtcgttgggaggtggaggagtttttttagtttcggtcgtagtttatcgtgagttaatcgcgttatttgtcggttagatgcgggagtgtgcggtttcggaggaagggcgagcggataaagatcgtaattcgtaattcgtaatttcgtagagaggtggtgcgtgcgtttgggcgagttttttagttatcgttaagtttcgtgtattagggttatttttatcgtggggttgcggatagcgtttaagaggttttggagtttgtcgtgattttcgtttgttggattttaaaagatggaatcggaaagcgttttaaggagaaatttttaataaatttttcgggggttgtttgagtggttgttttcggaaaagcggattttaaataaagcgggagggttatagggcgacgtcgaggagaggataggtttcgagttattgttatagttttaggttattgggtttcgtagtagatcgtgttttttttcgtggttcgagagttgcgttggttttttatgtaaatttagagtcgagttaatgatatgagtaatttttatttttatataagatgagtacgcgtgtcgaggcgttgggcggcggttgtgtgagttggtggtttagacgagtagtttgtgcgagattttgggtatttcggtttttagatataagatttgtttaaatgttatagtttaaagaagtggattttagttattgtagttattgattgtatataagtaaaaagggaaaaaatatgtattcgggggatatatgtatgtgtgtgtgcgtgtataaattatttaaaataattgtattaaatttttttaagaaatgtatttttgggtttttttatgtgtttttttgagttttatagaaaaagaagacgaatattggtttttgttatttggtatatagatttaaaagagaaaagagtaattcgaattttttttgaaatttttttaaataatagatgttggttgtttttttgtaggattttgagtgttgtatgtatttatttgtgtttgaaacgggaaattgattgtttgtattgttataaatagtaaaatttttaaaatatgtattatttttttttttaggatatgtatatggaatattaaataaagtttttttagatatagttgtttgaaagtaaggtattatttgttagagtatatttattgatttttttttttttttttttatgttttagtttaggatttaaggtagttcgataattaggagaattaagaagtaggaaatgttaatttggaaaaattgaattataattttttttttaaatttatttttgggttgtagaatagaaatgagttgttgaaaatttttttgtttattgtgattatttagaataaaggtgttttaatttagtagatatgattttttgaagagtaaggtaaaattttaaaaatgatggtggataaaggttattattaatgtagaaaattatttatattatgggaagataatttggagtttttaaatgttggagattgtttataatatattaacggagttataaggatataatggaatattatatttttaaaaaagtatttaaaattatttaattttaaaataaaattgttttatttttgagtaagataagttttattatagtaaaaatttggggttattttgaatatattaagaaatatgttaaaatatatttgtttatatatttaatgaaaatagtaattgaataatttgaaaataatgatatatttttttttatatagtgtttattataaacgtttgagttacgaagtattttgtaaatgttgaattgaattaagattgaattttaaaggtgtttttaattcgtaaaagacgtttgtaaatagtattaagtatttcggggtttttatttgtatgtggagggttaattttattaaagtaaagagaaaggagtttttgattcgtagataaataatgataaggagggtgtatgaaagattggagagatagagagaataagaagatgaatttattttgttttttttaggtattttggtggattttttgtgaaaaaaatggaatttgtttatagtgttttaatgattttttgagtttttttttagagaattagaatttttaatttagataattttaatttgatattttagttgggttttttttagttgtgtgtttttaagttttttgatttttttgagatatggtttttttatttataaattgtagatagttaatattatatggtttttttaaatattgaatgaatgttatagagtttttggtatagtatttggcgtgtgttagttagttgttattatttatttttatttttatttttattttatgagatagggttttatttaggttatttaggttggattgtagtggtgtgattatggtttattatagttttattttttttaggtttacgtgatatttttattttagttttttggatatttagaattatagatgtgtgttattatatttggttaattttttgtatttttagtaaagatggggttttattatgttgtttaggttggttttaaaattttgggtttaagtaatttttttgttttatttttttaaaatgttgggattatagttatgagttattatgtttggttattgtttttgtaaaataatatttaattaataagtatttatattttgaaatgagaaattatttgtttagtttgaattgttttttttagaaggaaattaagtattgtgatttatttttcgtgttttatgagaaaataagatgttttattttattaatttttagagtagggaagggaaataaattttaaatttttttttttttttattgttgatttatgatagttgatatttaatttttatatttttaggtaattttattggatttggatttagaggttatgtttgtttttaaatagaatagtgtaaaaaatacgtgaaagaaggtgtgaggaatttagagttttataattaagtggtaatgaataattaaagttttatttaatgaaatttttatcgttgttagaaaacgtttttattataagttattgtattttaaatatataaatttgatataataattggtggttttcggaagtttttaggaaatttaattgtagagtttattttttgatgttaaggttttgatgttgtttgttatgtaaataagaagtaggatatttatgagttttttatatttgagtgggaaaaaaaatggttgtagagtttaggtttttatgtattaagaggatgagagagtaagataaagtaagaggtttttttttgtttgtttgttttatttttttaataagttgttggggtataggtggtatttagttatatgagtaagttttttagtggagatttgtgagatcgtggtgtttttattattcgagtagtatatattgtatcgtatttgttgttttttattttttgtttttttttattttttttttaagtttttaaagtttattgtattatttttatgtttttgtatttttatagtttagtttttatatattagtgagaatttaggatgtttggtgttttatttttgagttattttatttagaataataattttttttgtattattgaggtgaggaggggtagataggaaggttgtagtttttaagggagtaaggtttttttaaaattttatttgatgtcgt

SEQ ID NO: 379 - DNA, 5887 bp, Artificial Sequence
  chemically treated genomic DNA (Homo sapiens)
  unsure (1002, 1038, 1060, 1064..1065, 1077..1078, 1087..1088, 1103)
  unsure (1107, 1109..)
agatgttatttttttttttttttttttttttttttttgggtggtggggagataggttttttttttgttttttaggttggaatgtagtggtatgattttagtttattgtaattttcgttttttgggtttaagtgatttttagttttcgtagtagttgggattataggtatgtattattatgtttggttaatttttgtatttttagtagagatggggtttcgttatgttggttaggtttggtttggaatttttgggttttagtgattcgttcgtttcggttttttaaagtgttggggttatagatatgagttattatgttcggttcggaaagatgttatattttttaatttgtagattagttttttgaaattattttaagtttttaaattatatatagaagttaatatgtagattaatttttgttttatgaaataattgtgttgtttataattttttaggaggttgaaacggaatagtattatagtttttttttggtagagttgaaagaacgtggttataatggattttttagttttaagtttagagttaggataatgttagaataagaaaggaaatatgttgatggttgtgtaatattttttaagatagaaaagtaagttattttattttttaagaaagaacgttttatttagtattatgtagggatgggggttaagggtgtggaaattaattggtaaatgagagaatgaggtatatatattattattgaagtaaagaatattgtttgatttagggggtttttgtttgtttttaattattagaaataattttgttttggagatatgtttaaagtattgttgtttttttaggtgtttattagggtttaatttttaattgttaattgaaatattatgtagttaaaattttttttatgacggtatagggatttttaaatttatattttagaaaagaattgtttaaaaattataaggtagaatattttaatataaaatttaaatagaagatgattatattttttttnagttgtaaaaatattttaagttgttatttgtattanataataggacgtgagagtaatntttnnaaatggattgtnngggaagttnntgatgtttgaaacgntggnannggatttttcgtaatgtgatttaagtgttatcgtatttgttaaggaagtttgggaaaattgcgttttttataaagttaattttttggtatttttaattttgtgtgtgtgtgtgtgtgttgtttttgttttagatttattttggtttagaaatatattgttgaatttaattagttagttatggtaaattttgaggggtttgaagttatgttgaatagagttatgataaaagataatattggggttgtagtattgttagaatttcggaaggaatcgattgaaatgtcgtgtgagtgttttttattttttgtaaaattgattagttttgattagatatttttaaaagaatagaaaatagaaattttattgtgtatttatggttttgtttaatatttgaagaaatttagtgagaagttgttttttttaaaatgtatttttttttttttattataaagtttaatatgagaaagtattgtttattaaagtattagaagttttgaaaagtattaaaaaatttttttttttttttttgtttttaagaattttttatataaataaatgttgaagtaaatattaattaaaataattgtttaggggtaagaattttatatatttttgtaattttttggtagtaggatattttgtaagttaatttttttttttgatatttatttatatatttatttatttatttatatttttatttatttatgtatttatttatttatttatttatttatatttttatttatttatttatttatatttttatttatttatttgtttgtttatttattcgtttatttatttatttggcgatttattatttatttatttcgtttttatttattatttatttgattatttttttttttttttttttttttgagacggagttttgttttgtcgtttaggttggagtgtagtggtgcgatttttatttattgtaagtttcgtttttcggttttacgttattttttcgttttagttttttaagttagttgggcgttcgttattatgtttagttaattttttgtatttttagtagagacgggattttatcgtgttagttaggatggttttaattttttgattttgtgatttattcgttttagttttttaaagtgttgggatgataggcgtgagttattacgtttggtttatttatttttttttatatttattcgttgaattttttttgtatatttttgttttgggtttaggaagatgaataaaattgagtttttgtttagatgtgattataaaattatagtttagtttggttgtgttttagtagaagttcgaagaggaggaggttgatgttgtttgagtgatgagggcgtttgaattagattttaaagagggaggttttcgggagggaaagaaggaaggagggatgttttaggaaaaaggataagtgtttaagataggaaaataataggtattttgggaggatgggaggaggaggtttatgttttttaggagaggaagttggagagaggtagtggttggagggtagaggtttagtttattttgttttattttgggaatagaggggagttattagaggaagttgggttgatagttgtcgtacggtggagttggaaggtgtttgttggatgtgtatttttgagaagggggttattagtttaatattttagattttagtaggggtggcgggatgtttttttttttgtagttatggggttgggtaggtggatattggtttcgagtttggttttttgatttttcgttaggtttattgggaaggtagagtttatttattcggacgggtttagttttatgtttattattttttttttgtagttttgaggatagattattatttatttcggtgtttatatatatgtttagttgtttttttggtatggatttattttttattatttggaaaaaaaattttttttttttaaagtttagtttagagggatttttttttagttttttattatttgaggggagttattttattgtaggggattttttagtttttggtttagattttttttatggtagttttaggggtgtaagttacgggttgttagtgtttaggtttcgttgtggtgtatgtgagggtttggtatttttaaggggaaggggttgtagagtttataatttttttttatttcggggttttaagggagggttggtaaagtaaagattcggtggtagttatagtagtagataggcgaggcgttgttttttgagggtggttggagggttttagtgttttagtttgtatagtgggtttggatgtgtggtttaaggttttttttgttttggattcgtagtgaagtggtgtttggaagggtttggttaggagagagggatagaagaagggagaggttagagattattgatcggtgattatattgttcgtgtgaggtcgaaatgagattttggtgtgtagtaggtgtcgttttggtgttgcgttttagggtggtttggggttaaggattttttgggttttattttattttcgttagttttagggcgggattttggggttttagggagttagattattgttgttttaaattttaagggacgtgttggacgggaggggtttgggggtagaagagtgggttgtgtttttaggaggatagggatttgggggagggataggacgtagttttgggtttttggttatgtagttttttttttttgttgttttaggatggtttcggtaggatgtatttgttagagttttagatttagattttttttggggtttgtttttatttatatcgggattttattatatatatatttatgtgtgaatatacgttagtatgttcgagatatataaatatgtatgtatgtttgtatatacgtaggaagttatatatattatttagatataggtatatatagatttatatatttaggtttatagttatagatgtatatggaggtacgcgtgtgtatatatatatatatatatatatatatatatattattttacggggaggagggtgtgggggtagtagggttgagttttgtaggatagaaggtttagttcggttagtttatagtttttggttgatggtgggttttagttagatgaggcgggtttatttgtatgtttgaggaagagttttgtgagaagatttgggggtgtttagggaggtttgggtagggagagttcggaggaggttggggtagttagtagggtttgtgagggtgcgagaagttgaggagcgaaaggatatttgtgaggtgatattacgtggtttgggaaggggcgaggtttttggtagagagtaggtaggagggggcgaggtttttggtagagagtaggtaggagggggcgaggtttgcgtggtgcggggaggatttgggatgtgcggattttttgggaagtagcgggtgtaggttgtagtttaggagggagggttttaggtagtagtattgtaggggtcgtgatgtggaggtgatatattttagcgtttttttttcgtttttttatgttagtcgtttagtttatcggggttagaggttggggttaggttcggggtcggtgtgtagttgaggatgggggttgtggggtaaggtagggtgcgtttgtgggagaggttcgtggttgttttggcgtttgggagttggtgttgtttacggcgtatatggtgaggttaggttacgcggtgttggttgagaatttgagttgtttcggttttgtaggggtttgcgtttgcgatgtagaatgtttagttatgttttattaacgtcgtgttaagttatagtttagtattacgttgattttgttttttattttaggtttggtgagtggttattttatgattttttcgattttgaatattacggaggagttatacgttatcgatatcggtgatagtttgtttattttttgtaggtattgggttttttttttattggtaggttagagaggttgtataagtttaaggtaggaggtggtggttgtgggtttagatggtagtttttttttagggtagagttagggtagagtggtttcggggtcgtgtggttttttaggttgtgggtgatttcggttttttttagttttaattatatatttttattagtatttttttttttttttttgagatggagttttattttgtcgtttaggttggagtgtagtggtgcgatttcggtttattgtaagttttgtttttcgggtttacgttatttttttgttttagttttttaagtagttgggattataggtgttcgttattacgttcggttaattttttgtatttgtagtagagacggggttttatcgtgttaagtaggatggttttgattttttgatttcgtaatttatttattttagttttttaaagtgttgggattataggcgtgagttattgtgtttagtttattttattagtattttatatggggttttattattttgtattttatttttgatattttatattgattttaggttattttttaggttatttgtatttatttttagttattttgggagtatttattggggttttagagatgggtatttttttatttttttagttgtgatttaaggtttgtgtttgtttataggttagtttcgggagtttggtagaggttcgggggtcggggagtgttttgttttgggtacggtttgtagtgtgcgtttaaattttgggtagttttatgttttgggtaagataaatttggtgaggttcggtttgagggaggttttttagggatagtttttatgggttgtttttggggtttatttgattatttttgttttttgttagg

SEQ ID NO: 380 - DNA, 5887 bp, Artificial Sequence
  chemically treated genomic DNA (Homo sapiens)
  unsure (4778..4779, 4781, 4785, 4800..4801, 4810..4811, 4823..4824)
  unsure (4828, 4850, 4886)
tttggtagaggataggagtggttaggtgggttttaggggtagtttatggggattgtttttgagaagttttttttaggtcgagttttattaggtttgttttatttagagtatggaattgtttagggtttgggcgtatattatagatcgtgtttagggtagggtatttttcgattttcgggtttttattaggttttcggggttggtttgtggataagtataggttttggattatagttgggaaggtggggaggtatttatttttggggttttagtgggtgtttttagggtggttgggagtggatgtagatgatttgggaggtggtttggggttagtgtgaggtgttaggagtggggtgtagggtgatgaggttttatatgaaatgttgatgggatgggttgggtatagtggtttacgtttgtaattttagtattttgggaggttgaggtgggtgggttacgaggttaggagattaagattattttgtttaatacggtgaaatttcgtttttattataaatataaaaaattagtcgggcgtggtggcgggtatttgtagttttagttatttgggaggttgaggtaggagaatggcgtgaattcgggaggtagagtttgtagtgagtcgagatcgtattattgtattttagtttgggcgatagagtgagattttattttagaaaaaaaaaaagaaatgttgatgggggtgtgtggttgaggttggggaggatcgaagttatttatagtttgggagattatacggtttcgaggttattttgttttgattttgttttgggagggggttgttatttgggtttatagttattattttttgttttgggtttgtgtagtttttttggtttgttagtgggagagggatttagtatttgtaggagatggataggttgttatcggtgtcgatgacgtgtgattttttcgtgatgtttaaggtcgggggggttatggagtagttatttattaggtttggggtgggagatagggttagcgtggtgttgggttgtgatttggtacgacgttgatggggtatggttgggtattttgtatcgtaagcgtagatttttgtagggtcggagtagtttaggtttttagttagtatcgcgtggtttggttttattatgtgcgtcgtgagtagtattagtttttaggcgttaagatagttacgaattttttttataggcgtattttgttttgttttatagtttttatttttagttatatatcggtttcggatttaattttaatttttgatttcggtgagttgagcggttggtatgaaggagcgggggaggggcgttggagtgtgttatttttatattacggtttttgtagtgttgttgtttgaggtttttttttttgaattgtagtttatattcgttgttttttagagggttcgtatattttaggtttttttcgtattacgtaggtttcgtttttttttgtttgttttttgttaggggtttcgtttttttttgtttgttttttgttaggggtttcgtttttttttaggttacgtggtgttattttataggtgttttttcgttttttagtttttcgtatttttatagattttgttggttgttttagtttttttcgggttttttttgtttaggtttttttagatatttttaggtttttttatagggtttttttttagatatataaataaattcgttttatttggttgaaatttattattagttagagattgtaggttggtcgggttgggttttttgttttgtaggatttagttttgttgtttttatattttttttttcgtgaggtggtgtgtgtgtgtgtgtgtgtgtgtgtgtgtgtgtatacgcgtgtttttatgtgtatttgtaattgtaggtttgggtgtgtgagtttgtgtgtgtttatgtttgagtggtgtgtgtggttttttgcgtatgtgtaaatatgtatgtatgtttgtgtatttcggatatgttggcgtgtgtttatatatgagtgtgtatgtggtgggatttcggtgtgggtgggagtaggttttaggggaggtttgggtttggaattttggtagatgtattttgtcggggttattttgagataataggaagggagggttgtatggttagaggtttagggttgcgttttgttttttttttaggtttttgtttttttgggggtatagtttatttttttgtttttaggtttttttcgtttaatacgttttttggggtttgaggtagtagtagtttagttttttgaggttttagggtttcgttttgaagttaacgggggtggggtggagtttagggaatttttgattttaagttattttgggacgtagtattaggacggtatttgttgtatattaagattttatttcggttttatacgggtaatgtggttatcggttaatgatttttggtttttttttttttttattttttttttttggttaaatttttttaggtattattttattacgggtttagagtaggaagggttttaaattatatatttagatttattgtatagattgggatattgaggttttttagttatttttagaaggtagcgtttcgtttgtttgttgttgtgattattatcgagtttttgttttgttagtttttttttggggtttcgaggtggaagggggttgtgggttttgtagttttttttttttgggggtgttaagtttttatatgtattatagcggggtttgggtattggtagttcgtagtttgtatttttggggttgttatgagaggagtttgggttaggggttgggggattttttgtagtgaggtggttttttttaggtggtgaggggttaagaaggaatttttttgagttgggttttgaaggagggggattttttttttaggtagtggaaagtaagtttatgttaggaagatagttgggtatgtatgtgggtatcggagtgggtggtggtttgtttttagagttatagaggagggatgatgagtatggggttagattcgttcggatgaatagattttatttttttagtggatttagcgggaggttaggagattaggttcgaggttagtgtttatttgtttagttttatgattgtaggagagagaatatttcgttatttttattgaggtttggagtgttgagttggtggttttttttttaggagtgtatatttagtagatattttttagttttatcgtgcggtagttgttagtttagttttttttgatggtttttttttgtttttaagataaagtaaggtgggttgggtttttgttttttagttattgtttttttttagtttttttttttaggaggtatggattttttttttttatttttttaaagtgtttgttgtttttttgttttgaatatttgtttttttttttgggatatttttttttttttttttttttttcgagggtttttttttttagggtttagtttagacgtttttattatttaggtagtattagttttttttttttcgagtttttgttagaatataattagattgaattgtggttttatgattatatttgaatagaggtttaattttatttatttttttaagtttaagatagagatgtgtaaaggagatttaacgggtggatataagaaaggatggatgggttaggcgtggtggtttacgtttgttattttagtattttgggaggttgaggcgggtgggttataaggttaggagattgagattattttggttaatacggtgaaatttcgtttttattaaaaatataaaaaattagttgggtatggtggcgggcgtttagttaatttgggaggttgaggcgggagaatggcgtgaagtcgggaggcggagtttgtagtgagtggagatcgtattattgtattttagtttgggcgatagagtaagatttcgttttaaaaaaaaaaaaaaaaaaaagaatggttagatggatgatggatggaaacgggatggatgaatgatgaatcgttagatgaataaatggacggatgagtggatagatagatgggtggatggaagtatgggtggatggatggatggaagtatgggtggatgggtgggtgggtggatgtatggatggatggaagtatgggtggatggatgggtgtgtgggtggatattaggaaaagaagttagtttatagaatattttgttgttaaaaaattataaaagtgtatggagtttttatttttgagtagttattttaattaatatttattttaatatttatttatatgaaaaatttttaggagtaaaaaaaaaaaaaaaggttttttaatgttttttaaggtttttaatattttaatgggtaatgtttttttatgttaagttttgtggtagagaaaaagagatatattttaggaaagataattttttattgagtttttttaggtgttagataagattatgaatatataatgaaatttttgttttttatttttttgaagatgtttagttagagttggttaattttataggaagtgaagggtatttatacggtattttaatcgatttttttcgaagttttagtagtattgtaattttaatgttattttttgttatgattttgtttagtatagttttagattttttagaatttgttatggttagttgattaaatttaatagtgtgtttttgaattaaagtaaatttaaaataaaaataatatatatatatatatatagagttgggaatattaagaggttagttttgtgggaaacgtagtttttttaaatttttttaatagatacgatggtatttaaattatattacggaaaatttnntnttancgttttaagtattannagttttttnnataatttatttnnaaangttgtttttacgttttgttatntgatataaataataatttgaaatatttttataattngaagaaaatgtagttattttttgtttaagttttatgttggaatattttattttgtaatttttaaataatttttttttaaagtatgggtttaagaatttttgtatcgttatagagggaattttaattatatggtattttaattaataattgggagttaaattttagtaaatatttgaagaaatagtagtattttaagtatgtttttaaaataaggttatttttgatgattaaaaataaataaaaattttttaggttaaatagtattttttgttttagtaataatatatgtgttttatttttttatttgttaattagtttttatatttttggtttttatttttgtataatattgagtaaaacgtttttttttaaaaaataagatgatttatttttttgttttgaagaatattgtatagttattaatatgtttttttttttgttttgatattgttttagttttagatttaggattgaagaatttattatagttacgtttttttagttttattagaaaaaaattgtaatattgtttcgttttaattttttgaaaagttgtaaatagtatagttattttataagataaaaattagtttgtatattaatttttatgtatagtttgagagtttgaaataattttaaaggattggtttgtagattaaagaatgtaatattttttcgggtcgggtatggtggtttatgtttgtaattttagtattttgagaggtcgaggcgggcggattattagagtttaggagttttagattaagtttggttaatatggcgaaattttatttttattaaaaatataaaaattagttaggtatggtggtgtatgtttgtaattttagttattacggaggttgagaattatttgaatttaggaggcggaggttgtagtgagttgagattatgttattgtattttagtttgggggatagagaaagagtttgtttttttattatttaaaaaaaaaaaaaaaaaaaaaaaaaaaagtaatattt

SEQ ID NO: 381 - DNA, 17918 bp, Artificial Sequence
  chemically treated genomic DNA (Homo sapiens)
ttgatttatttttttcggttttttaaagtgttaggattataggtatgagttatcgtgtttggttatgattaattttttgtattttttgtagagatggggttttgttatgttgtttaagttggttttaaatttttgggattaagtgatatgttcgttttggttttttagaatgttggatttataggtgtgagttaatgcgttcggtttgttatttttattttttttaattttttttttttttttttgagatagagtttttattttgtcgtttaggttggaatgtgttggtatagttttggtttattgtaatttttgttttttaggtttaagttatttttatgttttagtttttatagtagttgggattataggtgtgtattattacgtttagttaatttttgtatttttagtagtgatgaggttttattatgttgattaggttggttttgaatttttgattttaggtgatttgtttgtttcggttttttaaagtgttgagattataggtgtgagttattacgtttagttagtttgttttttttaaagaatttttagtttgttaataattatgtaaaattatttatataattttttatataattatataagttatttatatttaaaaatatttatttttatatatttgtatttatatattttggtttatatattgtttaattttgtttttttttttttttttgagacggagtttcgtttttgttgtttaggttggagtgtaatggtattattttggtttatcgtaattttcgttttttagtttgaagtagtttttttgttttagtttttcgtgtagatgggattataggtatgtgttattacgtttagttaattttgtagttttagtagagacggggtttttttatgttggttaggttgttttcgaatttttaattttaggtgatttatttgttttagttttttaaagtgttgggattataggcgtgagtttttgggttttgttaattttatttttttttttatataattttgtatttgtgtgttgtttatttttttatttttagagtttgaatattttgaaatattttttaaaattttttaatgtgtaatataagataagtatttagtaaattgttgttaatgatttataaaagtttagtaataaaattaagtattagggtagattaaatggtttttagtttttttttattgatttttttttattgatgataataatagttagtatttttttagtattattgtgttaggtattataagaaataattcgtaggttttttgttgtttttaatttttatagtagttttgtgaaatgatgttttatttttattttatagatgaggaaattgaggtttggagagaataaatgatttgtttagggtttttttattaaatttttttgattttgaagtttatatttttaattgttttagtttaagaaagttgttatttgttgtttttttttttgagatggagtttcgttttgtcgttatgttggagtttagtagcgttattttagtttatattaattttcgttttttgtgtttaggtaatttttttgttttagttttttaagtagttgggattataggcgtatattattacgcgtagttaatttttttgtatttttagtagagacggggttttattatgttggttaggttggtttcgaatttttgattttaagtgatttacgtattttggttttttaaagtgttagaattataggcgtgagtttttgcgtttagtttgttatttgtttttaaaagttttgtttgtttttaaagaatgttatattggaggagtgttgataatttagttagttttagtttatattatagagataattggtttgtggtagttaagtgtgtatagtgatgttgttttttagaaggaaaaaaaataaaaataaaattttaatttaggaagaaatgtttaaaagagttatttgatttattttttgtttttatatatgttttttgaagtattagttgaagaatttgtttatttttaggaatgtattttattttgatataaaattagattttataattttgatttatttgtgttagttgttttagattttagatgatagtgttaaatttttttattagtgtgtttttagttttggaattattaaataagtttgtttattaagtaatgttaggaattggttagttttttggaaatagaatttgttaatttgataaattagtttttataatagcgttattttatatagaattagaaatgatttttttagttatatttgtggatttgatttgaaaagtggtgtgtgtatgtgtgtgtttgtatgtgtatttatatttatttttgtttaatatttgagttgaaagaattgaaaatttttaatatttagggtggttaatgttgttattgataattttttgtatttcgtttttaggagtattgttggatgttttttagaaaatatttaaatttagttataattttttttgtattgattttaatttattattatagttggtttaattttatatatatttaataatatttaagttatttaatatataaatttatatatattatatataagttaatttttttagtttagatgttatgttttagtttttaaagtttggttgtgaggataaaaattaaaataaaaaattaagttttttttttgtttttgggatagggttttattgtcgtttaggttgaagtatagtggtatgattatggtttattgtagttttaattttttgggtttaagtgatttttttatttaagttttttaagtagttgagtttatagcgtgtattattatgtttagttaattttttgtattttttgtagaatgtagttttgttatgttgtttagtttggtttcgaatttttgggtttaagtaatttatttgttttagttttttaaagtgttgggattataggtatgagttattttgtttagttaggtttttttttttaaagaagttatagggaaattgtagaaggtataaaataattgatgggatatatatgtgttaatttgatagatgtttttttgtagatatttattttttttttatttattattttttttattgtatgttttttatattatagttatgttatttttatatatatttttgtatatgttttgaagtggaattatatgggaagttatgtttttggtggtttttttgtaagttttaaatttaattttatttttttgaataagtaaaaatttttttataggtaattttgtttttttttgtatttcgttagagggtatatagggtattagagtagatttcgtttaggaagaggggagaggtaaataaggtgaggggttaggtacggtggtttatgtttgtaattttagtattttgggaggttaaggagggaggatcgtttgagtttaggtgtttgaaattagtttgggtaatatggtgaaattttcgtttaataaaaaatataaaaattagtagggtatggtggtgtgtatttgtagttttagttattttggaggttgaggtggaggattgtttgagtttgggggtggaggaggttgtagtgagttgtgattgtattattgtattttagtttgggtaatagagtgaaattttgttttagttagttagttaattagttaattagtagtgggagaagagatttgagtagttttattttttatattttatgttgttcgtttttttttatagggtattagaatatttttaagggatagtgataaagggtagaagataggtattttttttgggtggaattttttgtatttgttttttttaaggtgtgttttaagtttttaatgggtttagttgttattaaagtaagtgtaataatttattttttatgttttttttacgattaatagatttatttatttttaatttttaaatgttatttgaatgggtaaagattttttaaaggatttgggaaaaatttgtataatatggaattggattggtttgtgttttgggttttggttagttgtttttaatgtatgagaattttagtattttatgttattttaagaaaaggggattaaaagtaatgttagtaaggtggagataatgtattgtttggttagtttagggaggaaaaataatagaattattttttgatttttttatgggaagtagtaggtttataaatttgtaaagagttgtgggggttgttggtggtggcggtatttaaatgttaggtttgtaaaataatttttgtttaaagtagttatttgaggtttttatttggtattttttaaagtgtgtttttttttttatgatgttttaagaataagtttgggattgatattgtgttataattttttttttatggatttatttttttatttagtattatattatattgtattgtgttttttattttaattttttatttattttttttggttaagtttttttggtattggattaattgttttgtttgagcgtgttttttttttgtaatgaattggtaaatattgttgtaggaaatttgattggagggttattaagaaattattaaaggttaggtatggtggtttatatttgtatgtaattttagtattttgggaggtcgaggtaggaggattattggagtttaggagttggagattagtttgggtaatatggggagatttcgtttttataaaaaataaaaaaattatttaggtatggtggtgtatgtttgtgtttttagttatttaggaggttgatgtgggaaggttatttgagttttagagttggaggttgtagtgagttatgattacgttattgtattttagtttgagtgatagagtaagattttgtttcgaagaaaaaaaagaatttattaaaatttaaattgttatagtttgattttttgggttgtatttgattatagttatagggtttgttattttatttgggtagaattttttgagtattagttatatagtttgtgaaagagttttgttggtttgtatttaagtgttttagtttatgtgtttttttttattgtagacgaataggaggtattgaatttaattatgaacgatttggtggttttttagatgaatcgacgttatcggatgtttggatatgagattatgaagaataaagatataggttatttaaataggtaggtgtgtgtgattttggtagagttaagtgagatttgttggggaggggtttttaaatgggaaatatacgaaaagttaaggagattatattattagggttgaatgtttttgattttttttttttatagtttgttaaatgggaagtaatatatattaattaggtatggttaaatggtaagtgatattgggaggtcgaggtaggcggattatttgaagttagtagtttgagattagtttggttaatatggtgaaattttgtttttattaaaaaatataaaattagttaggtgtggtggtttatgtttgtagttttagttatttaggaagttgagataggagaatcgtttgaatttggaaggtaaaggttgtagtgagtcgagatagtattattgtattttagtttgggtaagatagagtgaaattttgttttaaaaaaaaaaaaaaagttatatatgttatgtagttatggatttatgatttggagttttaaagttttgtgtaagtattttatttgttatggggatagtatttatattcgttttttttttttattgatatttggtaaatatttaatttagatttatgatttttaagttagaaggtttttagttattttatagtatatagttaggaaaaattaattaatttggtattagtttatgtaaaatataattaagaaggtaaatttattaattaaaatgttatttagtatattttgaaggtaataatgagtgattttgttattattgtttatagttattttattttattaattttattgatagtgtttgttttattgagagttgtatgtttttttaggaaaatattgtttattttttttaatatttaaatttgtgtgttattgataattttttttttatttgtagtgttatttatttgttttttgggtattttgttttgtagagaggagtgaatgatggggagtttttttatttagtgggtatttagtgttgtgttagttagttatattgggtatgtttgatgaaaatttgtgtatgatatttttttttttggttttgtttgttattagttaattttttttttttttatttgtattttgtttattaattttttagaattggtttttagagatagtataaggttttaaaattttttttgtttgtggtttgttagatagagttttttagagtattttttgtttttaggaattttagggattttaagggaagaggagtttttttgttttatgttaaaatagaaggattagtttaaaaagttgtttttgttgttgttattttatagtattggaggtataaatagataagggtttatttttatattatttttatatgttatttagtttgattgtgtgagtttttttttgttataatttatttgtatttaaagttatttttcgaaggagtattttattagaagtgagtttttttttttttgtttgagtttaatgattttatttttttttttgtttttttatgtagtgtgtgtttgttaatattgttttagttagttgatttttttttagattggattattagtatgaatattagttagtgggtgaaaaggggaagtttttttgaattggaaggtttaaaaggacgaggttgggaaaaggaggggcggaatggttattgatggttttttgaaggaggatttttttttaggattttttttgtttagagtttaaaagttatgatgagggaagttttgattttttgttgtgtttgttgttgcgttggtagagtgaagttagtggttatgaaggtagaagtttaaaaaggattgattgttaggaagtaattttaataagaggtattagatttttggatttatgatttattttaatgttgttaaatttatgttgtacgaaggatataaattattaattttagtttttttgtttttaaagaaaaaatataatagtagtagtttagtttttttgaatagttttatagtaataataagtttatgtgtaggggttagtgagaaaaagaaatttttggtaaggatttagattatttgttaaagttaaaatgtatttttaaatttgttatttatgttgtaatagtagaatttattttttagataagttgttttagtggatttgtaaaaagtattggttattcgtgatttgtgtttagtgtttttagttattattttttataatagtattatttataaatagtttttattagtgttgtttaataaattttttgtgatgatagaaatgttttatatttttgttgtttaatgtggttttgtagttattagttatatgtggttgttgagtaattaaggaattaaattttaaattttatattattttaattaatttagatagttatatgtggttagtggttattgtattggatagtatgattttatgtattatgtaagggattgttgatttattgggtaagaaattatgtatatgtttggagatgtgtagatatttattggtatgtttattttttatatacgttatgagtttttgtatattgtgataagttaataatgggaattttatttaagatttttgttttaggaagaatgtgaagatgtggaattagaatagttgtttagaaattgaagtttaaagttttatgttaatatgggtaaaaggggaaataaaatgttaagatagtttttttttttaatgaagttaaggttatagaatggtttgttttgggaagtgtagtagatgttttgtttttgattaagagggatattttttagtaaaattttgaaagtagaaaaagataaagttttagtaaatgtatttttaggaaagatagggtaagaggtagtgcggggaagatgttggggagaggtatttatagtttagtataatgaaaggagtttggtgatattaataattatttaatatcggattttataatttatagagttatatatttattattattattgtagtttttgttagtttaggtttgagatagaatgaaatagttttttttattattagtttttttgttagaaagtttatgtttaggaagagagaggaatgaaagattaaaatttaatttaaatggtgaagagttgttaaatttggttaagaaatgtttaattggattatagatttaaattatagagttttagttgaaagaagttaagtattttggttagttggaaaggttgtttatttaagggtggaatggggttggtagaggtaaatagttttttattatgagaatggtagtgttggttataaggtagagtcgagattggtatagttttatggagtttaagtttggtttagtaaggaaagttagaggagttgtgggtttattaataggattgtttgggtgtcgaggtttggaagaattgaaaaatttaatttaatatttttgtttagtaagatttgagatatttttttttttaagtaaataagtttggtaagtaattgaaaaagagaatggatttgagaataaataggtagttatggaagtatatgggtagtgagttattaataattttttaggaggtagattttgtattttttgtattttaggagtatagagaatattgtatattaggagtatttgttgtatttttttttttgtatattgggtttttggaagtttatagcgtggttagagttgattgaatatttttagatgtgtggtatattttacgtgtggttgggttttatggatagttttgtaggttatgatgtgtagtgtttttttagtagttattaatttatagtgagttattaatgggtgttagttttttgtgggtttgataatttagtatagtgaaaagagtgttggtttgtggttgaatatgttggagaagagtttgtttggttatagggatatagttacgtagatttagtatgtgttttttatgtgttaagtggagtttttagttaagaaggtagttatattagtagagggtgataaggataatgatattgatttgtttgttagcgataatgaggaggaagataaggaggtagttcggttgtgggagaagtggttgaggtggtatgtggagaagaaggttaagaagattgcgttggtggttaagttttttatttcgttggatattaagttttgggataatgagattaatatagtttaattggaggtttgtatgcgttttatttagttggacgggttggtttaggggggtttttaagttggtgtttatgggttacggtattcggaagttgtagatttagtgtgtggtgggggacgataaggtggggataaattttttggaagaggagattattaagtttgagagcgtgtgtagagtgtcgatgttgtagtttttaataaggtttgaagttttagagtgtgtgtgcgtgtatgcgtacgtgtgtaagtgtgtgaggttttgttattattaaaaattgagattaattaaaaaaaaaaaaaaaaaaagagtattggtttaggagttatagagttgttatttatttattaatgtaggattttataatttatagagtgtttttaataatagttaatattaatgttataagtatgtgtataaggtttatatagtttttatataaaggtattgagtagaggtaggaagtaaatttaagttttttgatttttagttatcgtaattttattatgtataagttatataatttttttgaagtgagtttttttatttgaaatatagatttaatatttattgtgtttattttttaagattgttgtaagattatagatagaatgtgaaatattttgtatattgtaaaataaatgtataaatgtgaagttgtagtggttatgttattttttatgttttggtattgtaggtgtgagttttggggaaagtttttaattataattgtttatagtgttgtggaattgaaaggattaaggtttttttttttttatgggattattattattgtttatttgatgatttttgtaaatttttgaagttagtttaatttttgaaaattttagtggaggaagaaatggaatttttatttttatggatttttgttttttttgaattttattaaaatggtaggtagatatttgaatagagtttgggttttggatttaattttttagatgtttatgagtgggtgttttagaatagaaaagttgttttttttatgataggtataagtagggtagggttttggttattatttttagaggaagagaattttaggatttgtttttttagtagggttagtgattgagtagattgttttttgtttttagtgtgaaagatttggttttttaggatttttttttttttttaagggttgttgataagatgggttggttagtttgaaaataagatataaaataatatataagtttggtattatattttgtaagaagattgttttataatcgttttttttattgattttttataattttttagagttatgtttaaaaataaaattttaatttttgttgtatttttttttttttttatttatttattttttttggtaaaataaggattgtaattttagaaatgtggggaggtattaaaggtatgtagtaaatgtagggagagaaattagtatagaattagagcgaggataagaagaatgatgggtaattgaggttttttttaggttaagttagtttataaatttttggttaataaattttgatttttttggatttttgaaagttttttgggttatatgtttagttgttgagtttagattttgagaaggttatttttgttttagtgttattgttagttatttttgttgtttttgttgagtttttgaatttgtagtttaattcgatagttcgtattgttttttttttgagcgtggttgttattattgtttttatcggattgtttgtggtggggaggggatatgaagttgtttagatttgaatttttgtattagaattttttttttagtagttgatatttttatttagtttaatatgtgtttatggttacgttttttagatatataaaagaaatgtatgtcggttaggagtggtggtttatgtttgtaattttaatattttgggaggtcgaggtaggcggattatttggtttggttaacgtggtgaaattttgtttgtataaaaatataaaaattagttgggtatgatgataggtgtttgtaattttagttatttgggaggttgaggtgggagaatcgtttgtatttgggaggcggaggttgtagtgagtcgagattattgtattttagtttgggcgatagagtaagattttattttagaaaaaaaagaaaaaagaaaggtatgttatattttttgtattttaggaattatgtagttttattgggaagtgaggattatatgaaaaaaagaaagtatgatatgattatgttttattgtgtggtatagagagtaagtgttatagaaggttaggaaaatgaaagatgagtttgggttagaggagttatggagttattttaggtggaagggtatttgaattaggttgtgaaggaagtataaatagttaggtagaacggaggaagggtggtattttaggttaggaaatagaatgattaaaggtttaggggaagaagtaaatatggtttgtattaggaaataaggtgagttttgatttggttttaaaggggggtttttgtggggaataaatagtgtgagatgattaggtaaattgaatgagtttaaattttagagggttttgagtgatagtagagaatttagattttattttatagataatgggtattattgattattttatgaataaagaaggaatatggtgaaaaaggtgattgagatggttggaattgtagaggaacgtagagtgggttggaaatggggagttgaaatgtatttttattttgattttgtattgatttttttttttgtatttgttatatatttttgatgtttttttatatttttggaattgtagtttttattttgttaaagagagtaagtgaatgaaaggaaaaaaaaatataataaaaattaaaattttatttttaagtatgattttggaaagttgtaggagattagtggaagagatgattataaagtaatttttttataaaatataatgttaggtttgtgtgttgttttatattttatttttagttttatatatttataaatgtataaagatataatgttttatattttattgattttgggattaaggggaaagggttttattgaaggtgatgttagggagaatgggaagtagagttttatatcggaggtttttgagaggagaattgaaatttgttttttggttgtgaggaggaaaaggaaggaaagaattaagtattatttagagatgtaattgtgtagttgggagtatagtagtattaatgttagaaatagtgatattgagttaggtatggtgatatgcgtttgtagtttaagttgtttgggaggttgaggtaggaggattatttgaatttaggagtttaaatttgtagcgtatagtgattgtgtttgtgaatagttattgtattttagtttgggtaatatagcgagattttatttttgaaaagaaagtaatagttgagaagggagattagtttaggagagtagttgatatagatatatatggttagattgagtttgagattatagtgggaaaaaattttaagagtgtgtgaggtatgtgtatgtgtgtacgttgatttttgtaggtttataatttgttatttgtagttttgagatttaaatagtattataaattaaaggggtatttttagtttttagtttttatttattattttttaatttgtagtagatttatttggtaattagatttgttttgaatagatatagggtaatttatggtttttttttattttatttattgtgaatatttatattttttattgtaaaaattaggatagtttcgataaaaagtatgtattttgttaataaatagattttaaattttagtgatttaatatagtatttttagtataaggagggggagaatagtgttgtttagagttatttaggaatttggattgagggagatttttttgttttaggatatgtgtttgttagggaagagagtatagaatttgattttgtttttagtttttggttagaattagggataaattttttaaattaatttttaagaggtttaggaaatatttgagtattttgtttttattatagtagtattgttttagatattttttattttattgtttggggaggtattatatgatttatagaatatttattatattatttttttaaatttaaaatatgtattttgaaatatttttggttttaagaattttggttaaaggataatagatttgtattattatttattaattatttgtatattaggtattgttttaattattttatttaattatatgatttaatttttttgataatttcgtaaattggatattattatttttattttatagatgaggaaattaagttataggttaagtatgaggttgtagtgttattatttttttttttttttttttgagatggagttttgttttgttatttaggttggagtgtagtggcgtgatttcggtttgttgtaatttttattttttgggtttaagtaatttttttgttttagtttttcgaatagttgggattataggtgttcgttattatattcggttaatttttgtatgtttagtagagacggggttttattatgttggttaggttggtttcgaatttttgatttcgtgatttgttttttttgattttttaaagtgttgggattataaggttattacgtttagtttagtgtagttaggtttaatggtaaaaattgtaattatttttgtattaatttaagttcgaggttatatagttaggaagttgtagagttaagatttgaagtaggtagttggattttagtgttatatttttaataattatatattggttttagatacgtggtaagtagatgagttttgttttagtgattggggttatatatagagattgaggaattatttatttagaggtttattgagaagttgtatgtagagtaggagaaagttagaagttagaagtcgtaaggttgaggaatggttatgtgtttggggaggggtgggagagggtatgaataagaggaattagtaaagaagtagaagtggttagagtggtagtaggttttttgtgttgggatagagttatagaagttggaaatagagttggttatttattagtgtgaaatgttttagagaggataagaagaatggttggtcggaaggtattgaattaaattatttttatttgaattttttttatttatggtttattatggttaatttgatgggtgaaatttagatttagggatttagaagatttgggtatattatgtggtttatggaagtttgtaaggttgttatggtattaaagaagtatttttgtttatattgttttttagttataggtttggttagttttaagtagtagtgatttgtggtttggaataaaagtttaattttttttttgaataaatttatgtagagtagtgtttaggttatggttcgttatgaaataaatttagtttttttatttttataaaggtattgaggagatttttttattagtatatttaaatataatgttgttttagggttggggtagtggtttatatttgtagtttaagtattttgggaggttaaggcgggtggattatttgaggttaagagtttaagattaatttggttaggggtgaaattttgtttttattaaaaatataaaaattatttaggtatggtggtgtatgtttgtaattttagttatttgggaggttgaggtaggagaattatttgaatttaggagatagaggttgtagtgagtcgttatatttggtttaaaatttttaaaaatgaaaaaaaaaaaaattaaataaaaataaaaatttgaggaaatatgtgagtaaattatggattttagttgatatattaatattgattaattaattgtaataaaaagaaatatattatattaatgtaagatattaataataggggaaattggttgggtgtggtggtttatgtttgtaattttagtattttgggaggttgaggtggatagattgtttgagtttaggagtttgagattagttgggtaatatggtaagattttatttttataaaaagttataaattagtttagtgtggcgatatgtgtttgtttgtagttttagttatatgggaggttgaggtaggagaattaattatttgtgttcgggaagttaaggttgtagtgagtcgtgatcgtattattgtattttagtttgggtggtaggagtaagattttgttttaataataataataataataataggggaaattgtataaaggggagaaggatatattagaattttgttttgtatgtttagtttttttgtaaatgtaaaatttttttaaaaataaaatttattaattaaaataatagagttatagtaaggtatgttgggttgtaggtaggaataggtaaaaggatgtataatttttttataggggtagataggattataaattttatagagtatttgggatattttagatttagttgaggaaatagtgtgggaagttggagattatatattagagtatggtaattttgttttagaggatttttgttatggtaattgtttagaattttaggggaacgagaaaaagaagatagtgaaaaattgtttttagtgtttgtgtgatatttaagttgtagtatagtatggtagttaagagttaggtttttagggtttaaattttatttttttttttataagcgatatgatttgattttgggggaatttatttaattttattgtaatttagttattttttgtaaaatagggataataatggtatttgttttgaggattagtttaattaatatatgtaaatatgtttagaataatgtttggtttgtggtaaatgtttaataaacgttagttattattattattattaatggataaagtggtttatgtgttattttataggataagaaggttatattagggttgtatattttttgagatagggttttattttgttatttagattggagtgtaatagtattgttttagtttattgtaatttttgttttttaggtttaagcgatttttttgttttagtttttcgagtagttgggattataggtgtgcgttattatttacggtatattttttgtattttaagtagagatgaggttttattatgttggttaggttggttttaaatttttgatttttagtgatttgttcgtttcggttttttaaggggttgggattatagttgtgagttattgtgtttttggtttttaattgttattttaaatgaataaagtaaatttttttagttttaattttgaatatggtaaatattaatagatataatttatataagtaaaagttttttggggtttttaataatttttatagtgtaaattagaattatttttgtaatttattgaattggaagagaagtttagttttttaatattttgggaaaagggagttttttaggtatttatttttttttttaaatttatttttttttttgttgtttgtttgttatgtgttttttatttttaaatatttttaagtttttttttttttaagttatagtttattaatttgttttttttaaaataatttttttttatcgattatgattttatttttttttttatttttattatttgttggttttttgtttattttatttttttttttttttatatttgtttttttgtaatattttttttttttttttgttattttttaaatttttttaagttgtttgtttgtttttttgtaatatttttttttttttaatttgttttttgttattttaatatttttatttttttttattttttatatttatatttttgttttttaatttatttaattatttaataaatattattaagtataaatattatatgttattttttttgtttggtattggggatatagaaatatgatagatttcgggaggtcgaggtaagagaatcgtttgaattcgggagacggaggttgcggtgagtcgatattgtgttattgtattttaatttgggtgatagagtgatatttcgttttaaaaaaaaaaagaaatatgatagatttgatttttgtttttttgtagtttataggttatttatgatggttattttggaaaaggttgggaatagtgtataagattttattttatttttagtggggtagttttgggagggttttgggaaattaatgatagtggtattagtggtagtagtagtaaaaattaaatattgtatgtttattatgtgttaggtattttatttatatttagttgttgtaagaattttgtaaggtatgtttaggtttattttatagatggaaaaattaagatttatagaggataagtaatttgtttgtggttatatagttagaaagtattagtagtaaaattttttttttgtttttagttatattagttaataaggaaatgtattttggttaggaggtgatagagtgggagaaatttttagagttaattgtagaaatagggtgtgtatgaagttagaaatagtatgttatagtatagtaattgagttgggtagttatttagggattttattttaagagttttgttgtttttgatgttagaattggaagttttaatttattggaaaggaatgtttatgtttatttgggaagagaagttggattaggagttattagggatgtatgtttaatgttgttaacgaattgtttaaggtttatttggtaatggtaggagtgatatattttagagaattttttaatttgtttattattttttttggtaga

SEQ ID NO: 382 - DNA, 17918 bp, Artificial Sequence
  chemically treated genomic DNA (Homo sapiens)
tttgttaaaaagaatgatagataggttagagaattttttggaatgtgttatttttgttattgttaagtaagttttgggtagttcgttagtaatattaggtatatatttttgatggtttttggtttagtttttttttttagatgggtatgggtatttttttttaatgagttaaaatttttagttttaatattagggataataaagtttttagggtaagatttttaggtggttgtttagtttagttgttatgttgtgatatgttgtttttagttttatatatattttatttttataattggttttggaagttttttttattttattattttttgattaggatatatttttttgttggttgatgtgattgaagataaaaaagaaattttgttgttgatgttttttagttatatgattataggtaagttatttattttttgtgagttttagtttttttatttgtagagtaagtttaaatatattttgtagagtttttataataattaaatgtaagtaaaatatttgatatataatagatatgtaatatttggtttttgttgttgttgttattggtattattattattgattttttaaaatttttttaaagttattttattgggggtaaagtaggattttatatattgtttttagttttttttaaaatgattattatgagtagtttgtaaattgtaggagagtagagattaggtttattatgtttttttttttttttgagacggagtgttattttgttatttaggttggagtgtagtagtataatatcggtttatcgtaattttcgtttttcgggtttaaacgatttttttgtttcggtttttcgaggtttattatgtttttatatttttagtgttaggtaaaggaaatggtatataatatttgtgtttaataatatttgttaagtggttgaatgaattgaagaatagaagtataaatatgagaaataagaggaagtagaaatgttaaaatgataaagaataaattaaagaggaagagatattgtaaaagggtaaataaataatttgagggagtttaaaaaatgatagggaaaggagagagatattatagaagaataggtgtagaggaaaagaaaggtaagatgggtaggaaattagtaaataatagagataaaggagagaatgaagttatagtcgatgaagaaaaattattttgaagaagataaattaataggttgtggtttggaagaaagaggatttaagagtatttgaagatgaggaatatatagtaaatagataatagaaaagggagtgagtttgaaaggaagggtagatgtttaaaggattttttttttttaaggtattaagggattagattttttttttagtttaatgaattataagagtggttttaatttatattgtaaaaattattaaagattttaaagagtttttgtttatgtggattatatttattggtatttattatatttaaaattaaaattgagaaaatttattttatttatttaaaatggtaattaaaggttagaggtatagtggtttataattgtaattttagttttttgggaggtcgaggcgggtagattattggaggttaggagtttgagattagtttggttaatatggtgaaattttatttttatttaaaatataaaaagtgtgtcgtgagtaatggcgtatatttgtaattttagttattcgggaggttgaggtaggagaatcgtttgaatttaggaggtagaggttgtagtgagttgagataatgttgttgtattttagtttgggtgatagagtgagattttgttttaaaaaatatatagttttgatatagtttttttattttgtaagataatatatggattattttatttattaataataatgataatagttaacgtttattgagtatttattataaattaagtattgttttaagtatgtttatatatattaattaaattgatttttaaaataagtattattattatttttattttatagaaaataattgagttataataagattaagtaagtttttttaaggttaggttatatcgtttgtaaaggaagaggtaggatttgaattttggaagtttgatttttaattattatgttatgttataatttaagtgttatataggtattgagagtagttttttattattttttttttttcgtttttttgaaattttaaatagttattatgataagagttttttaaagtagagttgttatgttttgatgtgtggtttttagttttttatattatttttttaattggatttggagtattttaagtgttttatgaagtttgtagttttgtttgtttttgtgggagggttatatatttttttatttgtttttgtttatagtttagtatattttgttgtagttttattattttaattaataaattttatttttagaagagttttatatttatagaaaaattgagtatatagagtagagttttgatatattttttttttttttgtatagttttttttattattattattgttattattgagatagggttttatttttgttatttaagttggagtgtagtggtacgattacggtttattgtagttttgatttttcgggtataggtgattgatttttttattttagttttttatgtagttgggattataaataggtatatgtcgttatattgggttaatttgtaattttttgtagagatggggttttgttatgttgtttagttagttttaaatttttgggtttaagtaatttgtttattttagttttttaaagtgttgggattataggtatgagttattatatttagttagttttttttattattaatattttatattagtatggtatatttttttttgttataattaattaattaatattgatatattaattaaagtttatagtttatttatatatttttttaggtttttgtttttgtttaattttttttttttttatttttagaagttttaggttaggtgtggcggtttattgtaatttttgttttttgggtttaagtgatttttttgttttagttttttaagtagttgggattataggtatgtattattatgtttgaatgatttttgtatttttagtagagataaggttttatttttggttaggttggttttgaatttttgattttaagtgatttattcgttttggttttttaaagtgtttggattataggtgtgagttattgttttagttttgggataatattatatttagatatattaatgaaggaatttttttagtgtttttatggaaatgaaggaattaaatttattttataacgagttataatttaagtattgttttatatgaatttatttagaaagggaattaaatttttgttttaaattataaattattgttatttaagattaattaagtttgtgattaaaaagtagtgtaaataaagatgtttttttgatgttatgatagttttataagtttttatgaattatatgatatgtttaaattttttgagtttttaaatttgaattttatttattaggttgattataataagttatagataagggaagtttagataaagataatttgatttaatgtttttcggttagttattttttttgttttttttgaggtattttatattggtgggtggttaattttatttttaatttttgtgattttattttagtatagggaatttgttattattttgattatttttgtttttttgttggttttttttgtttatgtttttttttatttttttttaaatatatgattattttttaattttgcgatttttgatttttggtttttttttgttttgtatataattttttagtgggtttttaaatagatgattttttaatttttatatgtagttttaattattgaagtaaggtttatttgtttgttacgtatttgaggttaatatgtagttgttaagaatgtagtattggagtttaattgtttgttttaaattttggttttataattttttagttgtgtaatttcgaatttaggttggtgtaaaagtaattgtagtttttgttattaaatttaattgtattaggttgggcgtggtggttttgtaattttagtattttgggaggttaaggagggtagattacgaggttaggagttcgagattagtttggttaatatggtgaaatttcgtttttattaaatatataaaaattagtcgggtgtggtggcgggtatttgtaattttagttattcgggaggttgaggtaggagaattgtttgaatttaggaagtggaggttgtagtaagtcgagattacgttattgtattttagtttgggtgatagaataagattttattttaggaaaaaaaaaaaaaaagtaatggtattgtagttttatatttaatttataatttagtttttttatttgtaaagtgagaatgatagtatttaatttacggaattattaaaagaattaaattatataattgggtaaagtgattagaatagtatttgatatataagtggttggtaaatggtaatataggtttattattttttagttaaaatttttggggttaaaagtgttttagaatgtatgttttggatttagaggggtagtatggtagatgttttataaattatgtgatgtttttttaggtagtggagtggggggtgtttgagatagtattattgtggtagaggtagaatgtttaagtattttttggattttttaaaagttagtttggggggtttgtttttagttttgattaagagttaggaatagaattaagttttatatttttttttttggtaggtatatgttttaggatagaggagttttttttaatttaggtttttaagtaattttgggtaatattgttttttttttttttgtattgggaatattgtgttaaattattgagatttggagtttatttgttaatagagtatatgttttttatcgaagttattttaatttttgtaatgaaaagtatgaatatttataataagtagaataaagaaagattataaattgttttgtgtttatttaggataggtttggttgttaaatgagtttgttataaattaaaaaataataaatagaaattaaaaattaaaaatatttttttagtttgtagtattgtttggattttagaattgtagataatagattatggatttgtaaaaattaacgtatatatatatatatattttatatatttttgaggtttttttttattgtaattttaaatttaatttagttatatgtgtttatattaattatttttttaaattagtttttttttttaattattattttttttttagagatggggtttcgttatgttgtttaggttggagtgtagtagttatttataggtataattattgtgcgttatagatttgagtttttgggtttaagtgatttttttgttttagttttttaagtagtttggattataggcgtatgttattatgtttggtttagtgttattatttttaatattggtattgttgtgtttttagttatatagttatatttttgagtaatgtttgatttttttttttttttttttttttatagttagggagtaaattttaattttttttttaaagattttcggtataagattttgttttttattttttttgatattatttttagtgagattttttttttttgattttagagttaataagatataaagtattatatttttatatatttataaatgtataaagttgaaaataagatataaagtaatatataagtttggtattatattttgtaagaaggttgttttataattattttttttattgattttttataattttttagagttatgtttaaaaataaaattttaatttttgttgtatttttttttttttttatttatttattttttttggtaaaataaggattgtaattttagaaatgtggggaggtattaaaggtatgtagtaaatgtagggagagaaattagtatagaattagagtgaggatatattttagttttttatttttaatttattttgcgtttttttatagttttaattattttaattattttttttattatgttttttttttgtttataaggtaattagtgatatttattatttatggaataaagtttaaattttttgttattatttaaagttttttgggatttaggtttatttagtttatttgattattttatattgtttgttttttatagggatttttttttaaagttagattaaagtttattttgttttttgatataagttatgtttgtttttttttttaggtttttaattattttgttttttgatttggagtgttatttttttttcgttttatttaattgtttatattttttttatagtttagtttaagtgtttttttatttgaaatgattttatagtttttttggtttaggtttattttttatttttttggttttttatagtatttattttttgtattatatagtgaggtatagttatattatatttttttttttttatgtagtttttattttttagtaagattgtatgatttttggggtatagggaatatgatatatttttttttttttttttttttttgagatggagttttgttttgtcgtttaggttggagtgtagtgatttcggtttattataattttcgttttttaagtataagcgatttttttattttagttttttaagtagttgggattataagtatttattattatgtttagttaatttttgtatttttgtatagatagggttttattacgttggttaggttaggtgattcgtttgtttcggttttttaaagtgttggggttataggtatgagttattatttttgatcgatatatattttttttgtgtgtttgagaagcgtgattataggtatatgttaaattgaatggaggtgttagttattgagaaaaaagttttagtatagaaatttaggtttaagtagttttatgttttttttttattataggtaattcggtgagagtagtagtgatagttacgtttaggagagagatagtgcgggttgtcgggttgagttatagatttagggatttagtaggagtaataggaataattgataataatattaaagtagaaatgatttttttaaagtttggatttaatagttgaatatgtagtttaaaaagtttttaagaatttagaaaaattaggatttattaattaaaggtttatgaattaatttgatttgaaaaaggttttagttatttattattttttttattttcgttttgattttgtattgatttttttttttgtatttgttatatatttttgatgtttttttatatttttggaattgtagtttttattttgttaaagagagtaagtgaatgaaaggaaaaaaaaatataataaaaattaaaattttatttttaagtatgattttggaaagttgtaggagattagtggaagagacgattataaagtaatttttttataaaatataatgttaggtttgtgtgttgttttatattttatttttaaattggttagtttattttattaataatttttgaaagagaagggaggttttgaagagttaggttttttatattgaaagtaaaagatagtttgtttaattattgattttgttgggggaatagattttggaattttttttttttagaaatgatagttaaggttttgttttgtttgtgtttattatgaagaaagtagtttttttgttttgaagtatttatttatgaatatttggagggttagatttagagtttagattttgtttaagtatttatttattattttgataagatttaagggaaataggaatttatggaaataaggattttatttttttttttattgggatttttagaaattaggttagttttagaaatttgtaaagattattagataaatagtaatgataattttataaagagagaaaaattttaatttttttagttttataatattatggatagttgtagttagaagttttttttaaagtttatatttgtagtgttagaatataagaagtgatataattattgtaattttatatttgtatatttgttttataatgtataaaatattttatattttgtttatgattttataataattttaagaggtagatatagtgagtattaagtttatattttagatggaaaaatttattttagaaaggttatatgatttatatatggtaaaattacggtgattaggaattagaaggtttggatttattttttgtttttatttaatatttttgtgtaaaagttgtgtaaattttatatatatgtttatagtattgatgttaattgttgttgaaagtattttataaattataaaattttatattaatagatgagtaataattttatgatttttaggttagtattttttttttttttttttttttggttggttttagtttttaatagtggtagggttttatatatttgtatacgtgcgtatgtacgtatatatattttaaggttttagattttgttgaaagttgtaatatcgatattttatatacgtttttaaatttggtaatttttttttttagaaagtttgtttttattttgtcgttttttattatatattgaatttgtagttttcggatatcgtagtttatgggtattagtttggaggtttttttagattagttcgtttagttggatgaagcgtatataggtttttaattgggttatattggttttattgttttaaggtttgatgtttagcgggatggaggatttgattattaacgtagtttttttggtttttttttttatatattattttagttattttttttatagtcgggttgtttttttgtttttttttttattgtcgttgataaataggttaatgttattgtttttgttattttttgttagtgtggttgtttttttggttgggggttttatttggtatatgggagatatatgttggatttgcgtggttgtgtttttgtggttaggtaagtttttttttagtatgtttagttataggttagtattttttttattatattaagttgttagatttatagagaattaatatttattgataatttattgtgagttaatgattgttaaagggatattgtatattatggtttgtaaaattatttataggatttagttatacgtaggatgtgttatatatttaagaatatttagttagttttaattacgttgtaggtttttagagatttaatatataaaagggagaatatagtaaatgtttttagtgtatagtattttttgtatttttagaatatagagaatatagaatttattttttagaaaattgttaatagtttattgtttatgtatttttatagttgtttatttgtttttaaatttatttttttttttaattatttattaagtttgtttatttagggaaaaggatgttttaagttttgttaagtagagatattaaattagattttttagtttttttaggtttcggtatttaaataattttgttaatgaatttatagtttttttggttttttttgttgggttaagtttgagttttatgaagttgtgttagtttcgattttgttttgtagttagtattgttatttttatagtgaaaggttgtttgtttttgttagttttattttatttttgaataaataatttttttagttagttaaaatgtttagttttttttaattgggattttgtaatttgaatttgtaatttaattagatattttttaattaaatttggtaattttttattatttaaattaggttttgattttttatttttttttttttttaagtatggattttttggtagaagaattggtaatgaagaaaattgttttattttattttaggtttaggttaataaaaattataataataataataaatgtgtaattttgtgaattataaaattcgatgttaaatgattattaatattattaggttttttttattatattaggttataaatatttttttttaatatttttttcgtattattttttattttattttttttagaaatgtatttgttgagattttgtttttttttgtttttagaattttgttgaagaatattttttttggttagaagtaaaatatttgttatattttttaggataggttattttataattttgattttattaagaggaaaagttattttagtattttatttttttttttgtttatattaatataaaattttgagttttaatttttaaatagttgttttagttttatatttttatattttttttaaaatagaaattttaggtaggatttttattattagtttattataatgtatagaaatttatgacgtgtgtaaggaatgaatatattaatgaatatttatatatttttaagtatatatataattttttgtttaataaattaatagttttttatatagtgtataaagttatgttgtttaatataatagttattagttatatgtggttgtttaaattaattaaaatgatataaaatttaaaatttagttttttagttgtttaatagttatatgtagttagtggttataaaattatattggatagtagagatataaaatatttttgttattatagaaggtttattggatagtattgatagaggttgtttatgaataatattgttgtgagaaatggtgattagaagtattgaatataggttacgggtaattaatgttttttataaatttattaaaataatttgtttgggaagtgaattttgttgttgtagtatgagtagtagatttaaaagtatattttggttttaataggtaatttggatttttattaaaaattttttttttttattggtttttgtatatgagtttgttgttattgtggggttgtttagaagggttgagttgttgttgttgtgttttttttttaaaaataaaaaaattgaggttaataatttgtatttttcgtgtaatataagtttgataatattgaagtaaattatggatttaaagatttagtattttttgttaagattattttttaatagttaattttttttaggtttttgtttttataattattgattttattttattagcgtagtagtaggtatagtaaaagattaagattttttttattatggtttttaggttttaagtagaaggagttttaaaaaggaatttttttttaaggaattattagtgattatttcgttttttttttttttagtttcgtttttttgggttttttaatttaagaaagttttttttttttatttattaattgatatttatgttaatagtttagtttggagaaagattagttaattggagtaatgttagtaagtatatattatataggaagataggaaggaaagtgaggttattaggtttaagtaagggggaggggatttatttttggtaaaatgttttttcgaaaagtggttttgaatataaatgagttatagtaagggagaatttatatagttagattgaataatatatgaaaatagtgtaagaatgggtttttatttgtttatatttttagtattataaggtaataataataaaagtagttttttaaattaatttttttgttttaatatgaaataaaaggatttttttttttttggggtttttaggatttttaaaggtaggaaatattttggaaggttttatttagtagattatagataggaaaagttttagggttttatattatttttaggaattaattttgaagaattggtaaataaggtgtaaatgagaagaaaggaggttagttgataataaatagaattaaaagggagaatgttatatataaatttttattaaatatgtttaatatagttagttgatatagtattggatatttattaggtaggaaagttttttattatttatttttttttgtagaataaagtatttaggaaataggtaagtggtattataggtgagaagaagattgttaatgatatataagtttaaatgttaaggaaaataggtaatgtttttttaaagaagtatataatttttaataaaataggtattattaataaggttaataaggtaaaataattgtaaatagtaataataaaattatttattattgtttttagaatatattaggtgatattttaattaataaatttatttttttaattatattttatataagttaatattaaattaattagttttttttgattatatattgtaaggtagttaaaaattttttgatttagggattatgaatttgaattaaatatttgttaaatattagtaaaggggaaaaacgaatatgaatattgtttttataatagatgaaatgtttatataaggttttaagattttaaattatagatttataattgtatggtatatataattttttttttttttttgagatagagttttattttgttttgtttaggttggagtgtagtggtgttatttcggtttattgtagtttttgttttttaggtttaagcgatttttttgttttagttttttgagtagttgggattataggtatggattattatatttggttaattttgtgttttttagtagggatagggttttattatgttggttaggttggttttaaattattgattttaggtgattcgtttgtttcggttttttaatattatttattatttaattatatttggttggtatgtattattttttatttaatagattgtgaaaggaaggggttaaaagtatttaattttggtaatgtagtttttttggtttttcgtatattttttatttgaaaatttttttttaataaattttatttagttttgttagggttatatatatttgtttatttgagtgatttgtgtttttgttttttatggttttatatttaggtattcggtgacgtcggtttatttggagggttattagatcgtttatgattgagtttaatgttttttgttcgtttgtaatgaaagagagtatatggattaagatatttaaatatagattagtaaagtttttttataaattgtataattaatatttagggagttttgtttaggtaaaatgatagattttgtaattataattagatgtagtttaaaaggttagattatggtaatttgaattttaatggattttttttttttttcgagataaggttttgttttgttatttaggttggagtgtagtggcgtgattatagtttattgtagtttttaattttggggtttaagtgatttttttatattagttttttgagtagttgggaatataggtatgtattattatgtttggatgatttttttattttttgtagagacggggtttttttatgttgtttaggttggtttttaatttttggattttagtgatttttttgtttcggttttttaaagtgttaagattatatataggtgtgggttattatgtttggtttttaatggttttttaatagttttttaattagattttttgtagtaatatttattaatttattgtagggaagggatacgtttaaatagggtagttggtttagtgttagagaaatttaattaggaaaaatagatgaaaaattgaagtgaagaatatagtataatgtaatatggtattgaatgaaaagatgaatttatagagagaggattatggtatagtgttagttttagatttatttttaaagtattataaggaggagagtatattttaaaaggtattaaataagggttttaggtaattgttttgaatagaagttgttttataagtttagtatttgaatgtcgttattattagtaatttttataattttttataagtttataggtttattattttttatggggaagttaaagggtagttttattgttttttttttttaagttgattaagtaatgtattgtttttattttattggtattatttttaattttttttttttgaaatagtatggagtattagagtttttatatattgaaaataattggttaaaatttagaatataaattagtttaattttatgttgtataaattttttttaggttttttaagagatttttgtttatttaaatagtatttggagattgaaaatgaataaatttgttgatcgtgaagggaatatgagggatgagttgttatatttgttttggtgataattgagtttattggggatttggggtatattttaaaagaagtaaatataaaagattttatttaaagagagtgtttattttttattttttattattgttttttggaaatattttaatattttgtggaaagaaacgaatagtatgaaatgtaggaagtaaaattgtttaagtttttttttttattattgattaattgattgattgattgattgaaatagggttttattttgttgtttaggttagagtgtagtggtgtaattatagtttattgtagttttttttatttttaggtttaaataattttttattttagtttttagagtagttgggattataggtgtatattattatgttttgttaatttttgtattttttattgagcgagggttttattatgttgtttaggttgattttaaatatttgagtttaagcgattttttttttttagttttttaaaatgttgggattatagatataagttatcgtgtttggttttttattttatttgttttttttttttttttagacgaaatttgttttggtgttttatatgttttttgacgaggtatagaaaaggataaagttgtttataaagaggtttttgtttgtttaggaaagtaaaattagatttaaaatttgtaggaaaattattaggagtataattttttatatgattttattttaaaatatatataaaagtatgtatgagagtgatatagttgtaatatagaaagtatgtagtaaaggggataatgaatgaggagaaagtgggtatttataaaaagatatttgttaaattaatatatatatattttattaattattttatattttttataatttttttatagtttttttaaagaagggaatttggttggatagggtggtttatgtttgtaattttagtattttgggaggttgaggtaggtggattgtttgagtttaggagttcgagattagattgggtaatatggtaaaattatattttataaaaaatataaaaaattagttgggtatggtggtgtacgttgtaggtttagttatttgagaggtttaggtggaaggattatttgagtttaggaggttgaggttgtagtgagttatgattatgttattgtattttagtttgggcgatagtgagattttgttttaaaaataaaaagggaatttggttttttgttttgatttttatttttataattaaattttaaaaattagagtataatatttaagttaggaagattggtttatatataatatgtataggtttatatattaaatggtttagatattattaaatatatataaaattgggttaattgtaataataaattgggattaatataaggaggattatgattaggtttaagtgttttttgaggagtatttaataatatttttaaaagcggaatgtaaggagttattagtaataatattaattattttaagtattgagaatttttagtttttttaatttagatattgaataaagatggatgtgaatatatatataggtatatatatatatatattattttttaagttagatttataagtatgattgaagaaattatttttaattttgtataagatgacgttattataagagttggtttattaggttgataaattttgtttttaggaagttaattaatttttggtattatttaatgaataaatttgtttagtagttttagagttgagaatatattagtggaaaagtttggtattgttatttgaaatttgggataattgatataagtgaattagggttatagaatttaattttgtgttaaagtaaaatatatttttagaggtagataggttttttaattgatattttagaggatatgtataaagataggaagtaaattaagtggtttttttaggtatttttttttggattgaggttttgtttttgttttttttttttttaaaaagtaatattattatgtatatttggttgttataagttagttatttttgtggtatggattgagattaattgaattattagtatttttttaatgtggtattttttaaaaataaataaaatttttaaaaataaataataggttgggcgtagaggtttacgtttgtaattttagtattttgggaggttaagatgcgtggattatttgaggttaggagttcgaaattagtttggttaatatggtgaaatttcgtttttattaaaaatataaaaaaattaattgcgcgtggtggtgtgcgtttgtaattttagttatttgggaggttgaggtaggagaattgtttgaatataggaggcggaggttggtgtgagttgagatagcgttattgaattttagtatggcgatagggcgagattttattttaaaaaaaaaaataataaataataatttttttagattgaagtagttaggaatatgaattttagagttagaaaaatttggtaaggaggttttgagtaaattatttattttttttaaattttaatttttttatttgtaaaatggagataaagtattattttataaagttgttgtgggagttaaaagtaatagaaaatttacgaattattttttatggtatttaatatagtaatgttaaaaaaatgttggttattattattattaatgagaaaaggttaatggaaaaagattggaggttatttaatttattttaatatttaattttattattgaatttttataaattattaataataatttattgaatatttattttgtattatatattagaaagttttaaaagatattttaaggtgtttaaattttagggataaaaagataaataatatataaatataaagttgtatgaaaaaaaagatagaattggtagggtttaggggtttacgtttgtaattttagtattttgggaggttaaggtaggtggattatttgaggttaggggttcgagaatagtttgattaatatggagaaatttcgtttttattaaaattataaaattagttgggcgtggtggtatatgtttgtaattttatttatacgggaggttgaggtaggagaattgttttaagttgggaggcggaggttgcggtgagttaagatggtgttattgtattttagtttgggtaataagagcgaaatttcgttttaaaaaaaaaaaaaaagatagaattagataatatataaattagagtatataaatataaatgtataaaaataaatatttttaaatatgagtagtttatatggttatataagaggttatatggatgattttatataattgttaatagattaaagattttttaagaaaagtaagttggttgggcgtggtggtttatatttgtaattttagtattttgggaggtcgaggtaggtagattatttgaggttaggagtttaagattagtttggttaatatggtgaaattttattattattaaaaatataaaaattagttgggcgtggtggtgtatatttgtaattttaattattgtggaggttgaggtatgggaatagtttgaatttgggaggtagaggttgtagtgagttaagattatgttaatatattttagtttgggcgatagagtagagattttgttttagaaaaaaaaaaaaaggattgaagaaaataagagtgataggtcgggcgtattggtttatatttgtaagtttaatattttgggaagttaaggcgggtatattatttgattttaggagtttgagattagtttgggtaatatggtaaaattttatttttataaaaaatataaaaaattagttatggttaggtacgatggtttatgtttgtaattttagtattttgggaggtcgaggagggtggattag

SEQ ID NO: 383 - DNA, 5184 bp, Artificial Sequence
  chemically treated genomic DNA (Homo sapiens)
aaagttgagggatgggaaggaagaaggtaaaaaaatgaatatttatggttatttaatagattttttaaaaatttagaattaacggtttgaaagtttgatttttgtttaagttatagaaaataaatgggatatgttgtggtggtggggttatttaaattttaggtaaattgttagggtaagttgttgtttagtgtgttttttttttttgattgggtattagtgttatttatagtagaggaatatgagaaatgtaaattttagttaatgatatttagtatagtgtggtgggttgaattattttttttatatatatatttatttatattttaatttttggaatttgtgaatatgttattttttagggtaaaaagtattttgtaggtattattaagttaagaattatgagttagtaagattattatgtattatttagatgggtttaatataattattatggttttaataagaaggaggtaggaggataaagttaataaaagatgatatgataatagaagcggtgattggaataaattgtttatgagttgaggaatgttggtagtttttggaagttggaagaagtaaggaatggattttttatagtttttttaggagtatttagtttaattagaattttgatattagttttttaagatttattttggatttttgatttttagaaatgtaagagataaagttgtattttttaaagttttatgagtagtaataggaaattagtataataagggaaataaatttattttgagtgttaatatatttattttttattttagttttgttattaatttgttatgtgattttaagtatattttttaatttttttgtatttgggttttttaagaaatataatagtttggagtagagaagagataaagtagagtttgaaaattggtggtatagaatttggaattggtttgttaaatatgttgtaaatattttgaaaggttaaggtaggtggattatttgaggttaggagtttgagattagtttgattaatatgttgaaattttgtttttattaaaaatataaaaattagttagttatggtggtgtatgtttttagttttagttattcgggaggttgaggtaggagaagtattggaatttaggaggtggaggttgtagcgagtagagattaggttattgtattttagtcggagtgatagagtgaaattttgttttttaaaaaaataataattaaaaatatatatagtcgggtatagtggtttatgtttgtaattttagtatttggggaggtcgaggtaggtagattatttgaggtcgggagtttgagattagtttagttaatatggagaaaatagtttttattaaaaatataaaaaaatatttgggtatggtggtatacgtttggtattattgtattttagtttggtgatagagagggattttattttaaaaaaaaaaaaaaaaaaaaaaagtttgtagaataaggatataaagaaaatatttttgtatatttgtataatgtatttgtgttttaaggtaggtgttattataaaagggtcgaaaagttaaaaaaattaaaagtttatatagtaaaaaagttatagtaagttaaagttaatttattattgaaaaaggaaatttttgaataaatttagtttagtttaagtgtagtgtttataaaggttatagtagtgtgtagttatgtttaaggttttaatatttatttattattgatttattgatatttattgtaagttttatttacggtaagtgttttatataggtggataattttttattttttatattatatttttattgtattttttttaagtttagatatgtttaaattataaatatttattattgtattatagttgtttatagtatttagtgtagtatattttgtattgtttgtacgtttgtagtttaggagtaatagattatattatatagtttaggtgtgtagtaggttatattattcgtatttgtgtaattatattttatgatgtttatataataatgaaattatttaaggatatatttttttaataatatttttattattaaatggtgtgattataatgattatttagtgagttatgagataaaagagataagttcggtattttaggtttgtattgcggataatatttatttcggtatgaaggattttagagattatgttttggaggtagtgaagtatgatatgatatgattattattagatggtattatttttaatttataattgttttaagatgaagatttttattttagagtatttatagtagatgatggagtggatgtgtattgttttgtttattaagtttgttttttttttaaggaatagttttttttttttaagagaattgttttttttttttattttaattatgaggttttaattaatttttatattttattttttttgtttttattgattagtttagggtgaatttatttaatttaatttttggaatttttaaagttgggtttaagagatagggatattttttttgtggtgataaggttataaagtaagaagattggaaggattattttttttttatgtggaagtaattttgttggtttttttttttttagattttaattgtttttgaggattttttgtattatttttgtgttgttattatgtgaaatattatagtatttttttagtaaagtttttttttcgtaaaaattagtttaagtttggtttttattttttgtaattaaaattgaatagtaattttatatttgtagtgattttttgatatgttaatttttgttttaaagttatattttttttgttattatttttattttattttttttaagaagagttagtttaatttttatgttgttaatttttttttgttttatttgagtttatttatgtttggaatatttggtcgatgttttttgtttttttattagtagtgtttttagttgttttattttaaagtatattaaaatgttgtttattaagagttattattagagaattttattgagtgggttaagagtggggtttaggaatttgtatttttaataaaatatatgttggttgattcgatttgtagttagatggaggtattattaggttaaatggtttataaaatttattagtttttttgttttttgttttattttttttttaaatttttattttaagtttaggggtaaatgtgtaggtttgtttatataggtaaatgtgtgttatggatatttgttgtgtagattattttatcgtttaggtattaagtttggtatttattagttatttttttcgattttttttttgtttttattttttattttttaaagtttattaatttgaagagtaggtaaatgttttatttaagagtgtaaatgaattgttttatttttagttaagtttgagtattatttagttttatttattttaaagaaagtagaattattagaggtttggaagtgtgttatagtggttttaggttgtcgagagaattatttagaaggggtttgaggtgattttattatttgcgggtgttgtagaggtagatttggtttttttcgtaagttgtttttgattttttttatgttggggatagatgaggtagaggttatttgtttttttttaaattttagaattatattataggtttgtataattttttttaaaaagtgttttttgtttttttttaaagtaattatttttaaaagagttgggtatagtttttttaggggtagtattagtgttgaagtgtggggggaaattgttttaaattttttaaataatgttatttttggagtagtaaaattgtttttttttttttatgagagatgataagtatgttttagtaattattttttgaaagcggatgttcggtgagagaaggatttgatttgttgaagggttagttaagttaagttagttttttttttattttttttttggttggaggttttgatggtggtgatggtggttgaattgaatttatttagaaaattgttaaaggtttttggatttttaggtgtgtcgttttatatttggtttgttatagtaggtgttttaaggtttttttttgttaagatttttttgttttattttatgatgttttttttatgtgtgtgtgtgtgtgtgtgtgtgtgtgtgtgtgtgtgtgttttatttttatttttaataaatttgtggattttggggtttaagattgagtgaagttagaaggattagagttaaaagaattttgttatttggttaatagtattttttattttttgatatatcgattttttttttagatttttttttttttgttatttttttttttttaatatatatatatttttttttttttttttttttttttttttttttttttgtttttttttttttttttttaatatatttaatgagtgttttaaacggtgataaatttgtatgtgttttttttatgattaaatttttgggttttttgttaattttttgtagatggttttaaattgtaggtatttcgtaaggggattttacgtttgtagttttggttggaacggttagggtggaggaggatggtggggagtggtggtgttttcgttttgggagaaggcgaagtaatttttaggaggaaacgggcgttttttttttacgcgttcgagcgagttttgggttttggtttcggaattttatttagtttttttttattttttgggaaaagttagtcgttatatataggtatacgtaggtttcggcgtcgcgttttaaggagagtagtatttatagttaattgttatggtaatttcggggttcgttttatttttttatttagtcgatttttttttttttttttgtattgtagttaatcggtttgtgcgcgttttaggagcgcgttataaaatttgtgttgggcgtgatcggtaagtatcggattagggggaaggcgagtagtgttaatttatagcgaagaaagtttcgtttggtaaaagcgagaggggaaagtttgagtatgtagagtgtgtagagtacgagtttttgttttcgaaagtagtgtttttgtttgatttttttgtttttttattttttgggataggtaagtggtatatttttaagatgtttttaagttattttgttcgttttggtggtttttatttggttatcgggtttattgcgttttttgttttagttgagtggtttttttttgtttcgtttgtttttagg

SEQ ID NO: 384 - DNA, 5184 bp, Artificial Sequence
  chemically treated genomic DNA (Homo sapiens)
tttgaaggtaggcgagataaggagaaattatttagttgggatagaagacgtagtgagttcggtgattaaatgggggttattaaggcgggtaaagtaatttgggggtattttaagggtgtgttatttatttgttttaggagatggagaagtaggaaggttaggtaaaggtattgttttcggagataaaagttcgtgttttgtatattttgtatgtttaggtttttttttttcgtttttattaaacgagatttttttcgttgtagattggtattgttcgttttttttttggttcggtgtttgtcgattacgtttagtataggttttatagcgcgtttttgggacgcgtataagtcggttggttgtagtgtagggaggaggggggagatcggttgggtggggaagtggaacgaatttcggggttgttatggtaattggttgtgggtgttgttttttttagggcgcggcgtcggggtttgcgtgtgtttgtgtgtggcgattggttttttttagagggtggggaggggttgggtggagtttcgaggttaggatttagggttcgttcgagcgcgtgggaaggaaacgttcgtttttttttggaagttgtttcgtttttttttaggacgaagatattattattttttattatttttttttattttgatcgttttaattagggttgtaagcgtggggtttttttacgggatgtttgtagtttggggttatttgtaggggattggtagaaggtttaggggtttagttatgagggaagtatatgtaagtttgttatcgtttagggtatttattgaatgtgttgagagggaggggagagaagtaagggaggaaaggagagaaagaggagaaagagaaaagtgtgtgtgtgttggggggaggggagtggtagggggaagggaatttagaaaaaaaatcgatatgttaggaggtggggaatgttattggttaaatggtaaaatttttttgattttaatttttttagttttatttagttttaaattttaaggtttataggtttgttagaaataaaagtaaaatatatatatatatatatatatatatatatatatatatatataaagaaaatattataaaataaaataaagaaattttggtagaagaaagttttgaagtatttgttgtagtagattaaatgtgagacggtatatttgagagtttagaaatttttgatagttttttaagtgggtttagtttaattattattattattattaaaatttttagttagggaagaaatgaggaagaaattggtttaatttggttgattttttagtaaattaaattttttttttatcgggtattcgtttttaagaaatgattgttggggtatgtttgttattttttatgggaaaaagggagtagttttattgttttaaaggtgatattgtttgaaggatttagaatagtttttttttatattttaatattggtgttgtttttaggagaattatgtttagtttttttgaggatagttgttttggaaaaaaataaaaaatattttttaaggaaaattatataggtttgtgatgtaattttagagtttaaaaagaaataaatggtttttattttatttgtttttagtatgaaggaaattaaaggtagtttgcggaaggggttaggtttgtttttgtaatattcgtagatgatgaggttattttaagttttttttagataattttttcggtagtttgaaattattatgatatatttttaagtttttaatagttttgttttttttgaggtaaatgagattgagtagtatttaaatttaattagagatgaaatagtttatttgtatttttgagtaggatatttatttattttttaaattgataggttttggagggtggagggtgggagtagggagaagatcgggaaaaataattaatgggtattaggtttaatatttgggcgatgaaataatttgtataataaatgtttatgatatatatttatttgtgtaaataaatttgtatatttatttttgaatttgaaataaaagtttaagaaaaagataaaataaaaaataaaaaaattgataggttttgtaagttatttggtttaatgatgtttttatttggttgtagatcgaattaattagtatgtattttgttaaaaatatagatttttgagttttatttttgatttatttagtaggattttttggtggtggtttttggtagatagtattttaatgtattttgaaatggagtaattagaagtattgttaatggggaggtaaagagtatcggttaagtgttttaagtatgaatagatttagatagaataaggagaaattggtaatatggagattgggttagttttttttggaaagagtggggtgggagtggtgatagggaaaatgtaattttaagataaggattaatatgttaagaagttattgtaagtgtaaaattgttatttagttttgattgtaagagatggaaattaaatttgaattagtttttgcgaaaagaggattttattggaaggatgttgtgatgttttatatagtgatagtataggaatggtatagggagtttttagaggtaattgggatttagagagaggagggttaataggattatttttatataagggaaaaatgatttttttaatttttttattttatgattttattattatagaaggaatgtttttgttttttaggtttaattttaaaagttttaggaattaaattggatgggtttattttggattaattaatggggataaggaaggtgaagtatggggattagttagaattttatggttggaatggagagaaagagtagtttttttgggaagaaaggattgttttttaaaaagaaagtaagtttggtgagtaaaataatatatatttattttattatttgttataaatgttttaggatgaggatttttattttaaaataattgtaaattgaaagtgatattatttgatgataattatgttatgttatgttttattgtttttaggatatagtttttgaaattttttatgtcgggatagatgttattcgtagtgtaggtttgggatgtcgagtttattttttttattttataatttattggataattattatagttatattatttaatgatggggatattgttggagaaatgtgtttttgggtgattttattgttgtgtgaatattatagagtgtagttatatagatgcggatggtgtagtttattatatatttaggttgtatgatatagtttattatttttaggttataaacgtataaatagtatagaatatattgtattgaatattgtaggtaattgtaatataatggtaagtatttgtgatttaaatatatttaaatttagaaaaggtgtagtaaaaatatggtataaaagataaaaaattgtttatttgtgtagggtatttatcgtgaatggagtttgtagtgggtgttagtgagttagtggtgggtgaatgttaaggttttggatataattgtatattattatagtttttataaatattatatttaggttaagttaaatttatttaaaaatttttttttttaatgataaattaattttagtttattgtaatttttttattgtataaatttttaatttttttaatttttcgatttttttgtaataatatttattttaaaatatagatatattgtatagatgtataaaaatattttttttatatttttattttataggttttttttttttttttttttttttgagatggagtttttttttgttattaggttggagtatagtggtgttaggcgtgtgttattatgtttagatatttttttgtatttttagtagagattgttttttttatgttggttaggttggttttaaattttcgattttaggtgatttgtttgtttcggtttttttaagtgttgggattataggtatgagttattgtgttcggttatatatatttttaattattatttttttgggggatagaattttattttgttatttcggttggagtgtagtggtttaatttttgttcgttgtaatttttattttttgagttttagtgttttttttgttttagtttttcgagtagttgggattagaggtatgtattattatagttggttaatttttgtatttttagtagagatagggttttaatatgttggttaggttggttttaaatttttgattttaggtgatttatttgttttggttttttaaagtgtttataatatatttaataggttaattttaaattttatattattagtttttaagttttgttttattttttttttattttaagttattatattttttagaaaatttaaatatagagaggttagaggatatatttaaagttatatagtaaattagtgataaagttggaatagaaggtaagtatattggtatttagaatagatttattttttttgttatattagttttttattgttgtttatagagttttaaaaaatataattttattttttatatttttggaggttagaagtttaaaatgagttttaagaggttaatattaaggttttggttgggttggatgtttttaagggggttatagagaatttattttttgttttttttagtttttagaggttgttagtattttttagtttataggtagtttattttaattatcgtttttgttattatattattttttattgattttatttttttgttttttttttattaggattatgatgattatattgggtttatttaaataatgtatgataattttgttaatttatgatttttaatttaataatgtttgtaaagtgttttttattttaaaaggtagtatatttataggttttagggattaggatgtagatgggtgtgtgtgtgggggaaataatttagtttattatattatgttaaatattattgattaaaatttatattttttatatttttttgttgtggataatattaatatttaattaaggaagaaaagtatattagatagtaatttgttttggtagtttgtttagggtttgagtagttttattattatagtatattttatttattttttgtaatttaaatagaagttagatttttaaatcgttggttttgaatttttaaaaaatttattaagtaattataaatatttatttttttgttttttttttttttattttttagtttt

SEQ ID NO: 385 - DNA, 15161 bp, Artificial Sequence
  chemically treated genomic DNA (Homo sapiens)
  unsure (12708, 12711..12712, 12715, 12734, 12793)
ttatttagttgttttgtttttttatttttaagttaatgttttttttattatttaagttattttgtggttatttttttatatagttattaaataatttgaaagttgggaagttatgttttttttaatatagatttaaatttattaagtgttttataaatatttaattggtttattattttttttgttttagaggtttatttattgtaaggtttttttaaataataagtattatagagtattttaattaagaatttattatgatagattggatttggtttaaattaagatttaaataataattaataaatattttatttaattagtgttttttatataaaagatttattggtgttggatgtaattttgatgaatatattttatagtttataaatagtttggttttagttttaatagatatatgttattaattttaatgtggttttatatattatgagaagttatttattttataattatataaaaaaagtaatgttttttttgttttatttattaaaatttaattgaaatagagatataaaaattagttagggttaggtgcggtggtttatgtttgtaattttagtattttgggaggtcgaggtgggaggattgtttgagtttaggagttcgagattagtttgatatagcgagattttgtttttattaaaaataaaaaaaaatagtcgggtatggtggtatatgtttatggttttagttattacggaggttgaggtagaaggattgtttgagtttgagatgttaaagttgtagttagttgtgaatgagttattgtattttagtttgagtgaggttttgttttaaaaaaagaaaaaaaattaagttatttagcggtaaatttttaattgaaaaggtgaattatatgtgatttggatatattataggagaaatagagtaataagaaataaaatatttatagtatattgttttatttgaaataaatatttatatattgtatatttttttttattaaatagttattttttggtatttattttagtgagtaggatggggggaggggggagtaataaaagagaaatatttttatttgtgtagatgatttgtttttattgtaataaaggtaattggttttgtaatttaattataagaaaaaaaggttatagataaattttttaataattaaatagttattatttgtggtagttgtttatttagttttaattgttttatagttaatagttttaaatagttagttaatttttttaattattagatatttattttttaattattttattttgaaagatacggatgtattatggagttagtttaagataaattgagagagagagaagagagagttggttggggttatcggggaggttattgattaagggtagggaaggaggtatttatttatatttgttttataattttgggggattaaattggttgaggatatgttttatggtttagttataattttggttatttttatatgtataatgaaatgaaattaaaattaaattttaagaataaattttggttttgtttggttgtattatttaggtttggttttgtattgagagaggtggttttttaatgatgtatatatgtttttgtttggttttttaatttttttgaattgagttgattataaaagtttaatgtatgcgatataaagaatggttgatttttagatataattagtaaaattttaatttattattatttaagatttattaaatatttgattgagaagaattatatttatggaaggatagtttaatgaatgttgatttatttatttaaaagttattttggattaagttagagtagtaaaaaattatatattattttttttatattttgttatttaaatttatttatttttatattagattggttattggttaatattgataggtatataagaaaaatatttttatgaaagtttttgttgcgtttattaatcggagttattaggttgttgtttattgtgtttcgaaatgttttttttaaggataatttatagagatagttttttggttttaatttagagatggttgggtttttttgagtattggtttgtttttatttgataggtatagatattatttattagtaaaaataaaataataattttattaagatttttaaattatgatgtttaaattttttgtaattaggaagtttagataaataataggagtttttttttatagagatttttggaattatttaaggatattaatatgtatgatttagatgtttttttaagttttatggtgtgttggtaaatgtttaataattattatttagaaataagataggaaaattgttatttatgattggtaagattataggtgatttttgtattttttttttttatttttttaattttttttaggaaatatattttattttgaagggggtgagggtggtggttaatatttgggattatggtgagttgttttagaaattatcgggttattaagtaatatttaatatatgtattagttttattttaaaatttgaagtattttgaatttttaattattttggagggatattttatagaaaagttggttgaggttttagtgataaagtttttttttatagtggtttatttttgtttaagattttaggtattggaaaatttggtgggggtggagaaggtaatattagtaggtaagtattcggaattatttttttattttttattttttttttttacgatttttaaaattttgttgagatcggtttttttttgttttatttgtggtgattttttttcggatgtttattttttttttgtgtaattttttttttgggtgttttttgtttttaaatatgtttgcgtatatttgaattttaattgtggatagggtttaaagtttttttttatgggatttatgggttttatgaaaattagaggttaagtaggtatttaagtaggagtatttacgtgtttttaggtattttgttatatttaaagaggtttatggaagagatttgggtaagtggtataattttataagttgttatatttaagttttagttttagtttagttaaaatatttatttcgattgtaattgattttttttttggttgttagaaaattgagagttatatgtgtagtttatttttagtaaattaataggattttatattatgtattttgtatataaaattgttggtttaattttattttttatatttacggtttttttttgttttatttttttttgtatttatttttaatttattttgatgtatatatttatgtaaattacgttaaatttttttttttggaataaagtagggtgtaaataaatttaataaaataataaagagtgatgatgagttaggtttttatttttgaaggttttaaaacgaattggtagtgatttgtgaaaattatagagaattgttcgtttatttttatagattattgaagtttgtgaaaattattttagttaggattattattatagtttgttgtttgttgtgtttataatcgatgtataaatttaattttgaaatggagagaaaaatagggggaaaaagatattaggaaattttagttttatgttatttggatattagaaagtatttggttggataaagtttttttttttttatagtatatgtttgttttagtattttagtttatatttacggagagggagaatatagtaattgttaagaatgtagattttagtattgtatgttttgttgtttatttgtgttatttgggttaggttttttaatcgtttgtgtttcggtgaattttatttataaagtagagataataatagtatttattttatagggtagttgtaaggattaaatgaggtaattcgggtgtaatatttaaaatagtggtagagtatatatagggatttgaataaatgttagttattattagtgatatgtgagtgggggaagtatattgttttggatttgaggtaatattaagtttgagtttttggaaaaatatttgtggaataagtaagggttggttattttttaaaatcggataaaagatttggtttgtttagatttttagcgtgattgtttttttttttgtttttttagaggtagtattacgtgatggaaatatttggtgggtgttgtgggtataaagataagttaatgtgtttttattttttaggagttgagtcgagagtaggagaaaaatgtataaataattattaggtaggatgattaagtaatatattggaggtagtaatagaaatatatcgtggaaaaaaaatatttacggcgtggatgaagatatgagatgtgtgaaagcgttagatataggtagttatttgtatttatgtaaaattggattattgttgatttttataaggtttattttaacgttttttttaattagaatttttgtagaattaattttttagaatcgtcggggataaagatttttatttgtaatgtcgaattttagtagagtaattttttttgttttttatacgcgtaaattcgggttttaaacgttgtagttcgcgtttttcggttaacggaagaaatacgaggaattgtttgtagatttaggggatgaagttaaaaaacggaaagcgaggtcgaaagggcgtaattattacgtttggaggaggttagtgaagtagagaaaggggaaggttagttttgttttagcgcgttttgcgtaatcgggatttttttcgcgcggtaaagtcggggaatttttttggcgtttgcgttatcgcggcgagattcggcgtcgtggacgtggagagagggcgacgtatttgcgcgaagacggtagcgggagaagtcgttttagtgcggttgcgcggcggtttaggcgtcgaggggagtttcggcggggagcgtatcgcgcgtttgcgcggagagttgcgtgacgcggcggcgcgtaagggacgtgcggagtgagtggcgttgcgggtggggtcgtcggcggcgttggtgagttttgcggagttgggcggtgtcgaggaggaggaggtggcggtttgggtttgacgcggttttgttcgagggggttttttttgtttatttatttatttttcgtgggtgttttcgagtgtgcgcgcgttttcgttattcggcggggagggggtggggggagggttcgggaaaagggggagttggagtcggggtcgaaacgtcgcgtgatttgtaggtgagagaacgtcgagtcgtcgtcgtagttttcgtcgtcgagaagtttttgttttcgttgttgggaaggagagtttgtgtcgataagatggcggacggggagttgaacgtggatagttttattattcggttgttggagggtgagtgcgcgtttggtcgcgggatagagggaggtcgggtatcgtcgtcgatttttgcgtttttttttgtcgtcggaacgcgaggggatttttttttcgtttcgagacgagtttttgggagcgcggcgcggcggacgaatcgaggagggggcgaggaggttttgggcgcgggggagcggtttttgggagcgcggttaggggagatcgggggagagggggtcgttttcgcggattttcgggggttaggttcgtcggtcgaaggttgtgcggagcgggtttgcgggagatagtttttcggaaaggtcgtcgggtttcgcgcgtcgtggtgttcgttttcggtgattcgaggatggggagaggatgtttgttattgggttttgtgcgttcgtggaattattgtttttttttgttttttttgtgtattgtttttggttgttttcgattgtcgtttcgggagtgaattttacgtatatatatataaatttgtttttaataggattgtttcgtttgttttgtatttttatataatgttatatagaatggattttttttaaagagaggataaaattagcgggaattaatttatcgtttgttatttggtttaaaaaaattgtaagataagatatttgattaggttgaagatgtacgtaagaaatgtgatgtatgtagatgggtttgttgaagggattggtttttgtatttgatttgagtagagtttaatttttgtataaatttagtgaaaatttatttttaaagtttgttttgtattcgaaaggtatttgtaggtttacgtagtatttgaatttttcgggtttaagtgtttttattgaatagttttatgttggtgggaaggtaaggggggaaaacgaagaggtggattagtcgggagttaaatgtattgatttattgtaggatattatttaaagttaaatgtagttttttgttaaatagtttttttattttaaagttttcgttattaataattgttttgtgagtgtgtagaaaagtttttaattttttttaaataatttagaggtttttttgttagtcgtcgtttagcgattgtatatgtattgtttgtttttaaattattttaagataattgttagagtgaagtagtatgtatttatatttggaaaattattaaagaatattgtaatgggggaggggtaattttttttttttaaagtatgtgtcggtattttaaatttaagttttgtgagtatttgttttgtaattaaatattgtgtatttgttttagatgtgaaagttatttagtagttttaagattgaataggaagtaaaagttttattaggaatttttatttatttttttttttattattaagttatttttgggaggttttttggtgtttgtagttagtgtttattatttaagattttgttttagatgtgaatattttgttgggtttttgagaaatttgttttgaaaataattgtattttgtaattgttttatgagggaaatatagttaatttaaaaatgtgtatgttttgtttatatttgggaagtagaggtttatttttttttattttttttttatttttattttttgagacggagttttattttgtcgtttaggttggagtgtaatggtacggttttagtttattgtaattttcgtttttcgggttcgagcgattttttcgttttagttttttgagtagttgggattataggtatttcgttattatgttcggttaattttttttgtatttttgtagagacggaggttttattattttggtttggttggttttgaatttttgatttcgtgatttattcgttttagttttttaaagggttgggattataggcgtgagttatcgcgttcggtatatttttatatattttaaattttgtttgtaaatttaaatattttaaaaatatgtttgtattttaatttatttatattttattttattttttatatattttgtaggtataaaatagatttatgttttaaaatgtttgtatttttttaaattagacgtatttttatatgattataggtatttaaattttacgagtgggttgtgtaaggttattagaaaagatattgggggaaaaataagtgattttatttgtttttgtgaatttaaattaaatatttggtttgtataatttgttttttttttttgggggggcggggggggcgggtaagaattgtagtttagatacgttttttttttaatttagtaagcgttagtaagttgattttttttttgttaggtattagtaattttaagataagatatagtttttttatttaaggagtttttagtttaaataagtgttttttaggtttttttagttttttttttgttttatgtttagtatatattttattagtatttttttattttatagaagtatatttagtttgatagtgtttttaagggatttttaaatattttaggttttttagtttttttttagatttagatttgttgaaagatttgtttagagtagatttgaattttttagtaaataattatttttaatttttaaagaaaattttgtttatttggatttttagtgatattagatgttagttagtgatattttgtaaagttgtttagtaagaataattatggttagtgtttttagtgttaaatgaacgtgtaagtaaaaatttggtaagaatttttttgtattaggggaaaatatttagtaggatttgattttattttaaaatgttgattgtagttttataatatatttttgattgtttttttttttttattgtattaaatcgtagattagttatatatatttttggtgattatattttatgagttgttttttgttttttttttttaggtgggcgtattattgataagttttttttgttttttgtttttttgagacggagttttgcgtttgttatttaggttggagtgcggtggggtgatgttggtttattgtaatttttgtttttgtaggtttaagcgattattttgttttagttttttaagtagttgggattatagtatgttattacgttttggttaattttgtatttttagtagttttattatgttggtttggttggtttcgaattttttatttttaagtgatttattcgtttcggttttttaaagtgttgggattataggtatgtgttatcgcgtttgattttgatatgatatttttaaagagttttttaggttattttaatataaatatgttatttaatgtaaaatagaaatattgattttattatttggacggtgtatattttttcggtatgtttttttggattaatttttgtttagaattaaaaattaaagatttttattttattttttgtagtgattttgttggttatatttttgtggtttattatagtgttttgattatttaaattgaagttagtttgtatgagtattttggaaaattcggtaaaagttttttatttagatgagtggtttttaaagaggggtgggaaatgggagtatagtagaattatttggggaattttatttaaattataagtgttaagtttattttggaggaagtgaagtggaatgagtagaatttaatgtatttgggaggaggttagtatggaaaattgttgttgggtgaataagagtgttagttttgtttttaattatagttttgatttaggtatttaaaaattgggatgtgttagttgatatagtatgtttattatgtgttatatatgtgataatatgaaattgtttagaatttgtttttttttgattatgaaagggtagtatttttttaagaagttttttgtaattttataatttagagataatcgttgttgaaattttgatatatttttgtttaaagatatttaatatattttgtaaaatttatatgttttatattattagaatattttttatatagttttatgagttaattttttatgtagtattatattatgaatatttttttttgttattgaaatgtttttaaaaatatcgaaaagcgatttgttgtgtgatagaaaagttttttttaaagtattttttaatatattattacgaagttgaatttgattattataatatgagttgtagaatattagtattgtgtaaagttttatagtaaaatgtgattgtgttatatttttggtttatttatagttttatgaaaatcgtgggatgtgtttgtatttgttttgttttttaaatttattttttatttaattttgatttgttagatgtttgaatttgtgatattgtttgtgattttttagtgcgtatttttttttttttttttgtgaaataggtatagtatttttaagatttagttaggttgatagacgatatttttaattttttttatttaagataggttggaatgtagtggtttgattatggtttattgtagtttcgattttttggttttaatcgatttttttgttttaatttttttagtggatgggattataggtatatgatattttggttggttaattttttttattttggtagagacggggtttttttatgttggttgtttagtttggttttgaatttttgtgtttaagtaattttttagttttggttttttaaagtgttgggattataggtgcgaggtgttgcgtttagtttgtagtgtttttttgaaggttaaaaaaatgaatggatttgaaaaatgaaatcgattaatgaaagtatattaaagttttttattttaaaatgatagttttatttagatataatttatatattatatagtttgtttatttagaggatatgatttttagtatattatagagttgtgtagttattattatagtgaattgtataatatttttaaatatatatattttttaaaaaattttgttttcggtagtagatattttatttttttttattttttttcggtttttattaatttatttttttttgttttttagatttgtttattttggacgttttatgtaagtgaaattatataatatgttgttttttgtgattggttttttttaatgtttttaatatttatttttgttgtagtatgtattagtattttattttttttatggttgaataatattttattgtatgtatatattatatttttaatttatttattagttgatggatattttgttttttttcggttattgtgaatatttgtagtgttgttattaatatttgtgtagaagtttttttttgtgggtatatatttttaatttcgttgggtatatagttgggagtgagatttttaggttatatggtagttttatgtttaattttttgatgagttgttaggttgtttaaggtttttttattgattaaattgtttaattttgatttagtaatttaaaggttaggtggttggaaagaagtgttagttgttgtcgataatttttatttttgtagggaaggtgttttgtgtggatgtgtagttagatttgttagaaaaaagagtatgttggggagtgggggagattattcgaggaatattttatttttttgatttttttggatgagatattagaggagatataaggtcgtggtatattttttaattgatttagagattaggtgtttgttttttttgaattaagtttagtaagtaagggaaattgatagtttgaagaagtagtttagaggtgtttttattttgttatttgaatgtagatttggagtttttttggtaaatatttaaatttaagatgaagattcgttgggatttaatatattatttaaattgagtttagagataaagttatattaagagttaggattagtggggaagatagttgtatttagtaggttttttttttttttattttttacgtttattatttttaaaagagtatatattttaatgttatgtatttttaattttttttaattaattttttttttttttggaggtagggtttggttttgttattcggttggagtgtagtggtatgaatatggtttatttgtagttttaattttttgggtttaagtgatttttttattttagttttataagtagttgggattataggtatgtattattaattaaaaaaaattggtagatatagaattttattttgttgtttaggttagttttagagttttgggattataggtatttagttttatttttaaatatttttaataggtaaagtaatataggtatgaaggaatgttaagatttttagaaatattgatttaaattttgttatgtatttttgaaaggttattttcgaatgttggtggtatatagggaggtaaggggaagaaatagtttgtaaatgttagtaggtttagtagtggtgtggtagatggggatttttagtggagttttttaggatttgtgattggatatagattgatatttttaggtagtagttattgtttttagtagttttaaatagttattttaaggtttatttaagtataaataattagtagttagtttttttttgatttgatagaggaagttagtttttggtttagatgggtatttgttatatagtaggaaaaagggcgggggtagttgttttttattttgtttttgtattatttatatgtggagtatagtgatttgtgagagtatgtataattttcgtgaatattattggttttagaatttttttttgttaaatttatttgtatttgtgtaaagataagtggagatattgatgatatgtgtatattttagagggaatagcgtttgttttttgatgtatgtttatttttgtataattgggaggttttaatatagtatattttattataaaggaattttattttaagaatgttaattagaatatttttaagtaatagaagtttttatttggttagttgtaaggtgattaaaatatttttttggtttgagtatagttatatgttttgttaaatgatgttttggttaatagtggattttatgtaaggtagttagtggttttgtaagattagaatggaattgaaaaatttttgttatttagtgatattataggtataatgttatagtgtagggcgatatttttttttttggtaaggttggggttaatttttttgtttgttcggtgtgttaaaagattatcgggttcggggggtgggttttgttcgtaattttcgtttttttggagggttaagtcggtgggtttttttaggttcggagttttagatttattttggttatattgttgaattttttttttttttaaaaatttaaaaaaaaaaagggtttgtggttagtttattttcgttatttttcgtttttcggagggttaggtaggagaattttttttattttggaggttgagggttttattaataaaaaattttttttttgtttttaattttggggaaaaaattaggtttttttttttaaaaaaaaaaaaaaagtataatataattatatagagtacgttatatttgataaggntgnnttnaattatcgagtaggttgtnaaaaaattttaattaattttttgcgtaatagtggtttttattttaggtttgagtggtgngacgcgatttcggtttattgtaatttttattttttggttttaaggagtttttatgttttagttttttaagtagttgagattataggtattcgttattattttcggttaatttttgtatttttagtaaagatagggttttattacgttggttaggttggttttaaatttttgattttaggtgatttatttatttcggttttttaaagtgttgggattataggtatgagttatcgtatttggttatatttttttttttttaaattaaaattttttatatttaaaattaaagttgagatgtttttttggtgttagaaaaatttaaatatgtattagaagtaggtaattgatgtttgagaataagtattaatgaagttatattagtttttataataaaagtagttttgttgattattgttttgaattttagggatagttttataaattagtatatttgttaaagtatatttgaatgttgtttgtgttttttgtttattgttttttttttatttttatattaatatattaatggaatatatagtttttgtatgtggaggtttttttttttttaaagttttttattgatttggtaaaggaattagtaatttttagtaagaaatatgtggaattttattttattttggagatggggttttatttttatttaggttggagtgtagtggtacgattttagtttattgtagtttttgttttttggggttaagtgaattttttattttaatttttgttttgagtagttgggattataagtatgtattattatgtttagttaattttttgtattttgggtagagatggggttttatcgtgttgtttagggcgattttgcgtttttgagtttaagtgatttatttattttggttttttaatgtgttgggattataggtgtgagttatcgtgttcggtttttatttttattttgtagagatagggttttgttttgttattaagattgaaatgttttagtgttattatagtttattgtagttttaattttttggttttaagtaattttttattatgttaggttaattttgttttttaaaaatattttttgttgatatagggttttgttttgttgtttaggttggtttcgaatttttggttttaagtagttttttcgttttgattttttaaagtgttgggattataggggtaagttattgtttttagtttattttttttttttaaatgtttttttatttaagattaaatgagagtttagttgtaaatttaaggttaaagggagttaggggagatggtgatgagaggaaatgattataagttgagtttagtggggtaaataaggaatttttttgtttttttatgtaatattttgtttttttttattttataagttattggaaattatattattttatggtttagtaatgtaaagatgttttattttatttaaatagtttttagaggttttaatataatgatttattgggaatgtaacgataagttaatttttaatatatagttgatattttttttgtattttttttgattagaaagtagagataggagttgttaaaattttggggattgttggtaatattttaagaaagtgtgtgaagttaaattatttattgataattattatttaatttttttttttttatagtatattgtttttaatgaggttgttttgatattttattagatgcgagataagtaggttagattttaaagggtgcgggttttgaaatgtttttttgtgtgtgttttttttgttgttgttttttttttgtttgtttgttttttttttatttgagacggagtttcgtttttgttgtttaggttggagtgtaatggggcgattttagtttattgtaatttttgttttcgggtttaagcgatttttttaatttagttttttaattagttgggattataggtatgcgttattacgtttggttaattttgtatttttggagagatggggtttttttatgttgattaggttggttttgaattttcgattttaggtgatttatttattttaattttttaaggtgttgggattataggtatgagttatcgtgttcggttttgaaattttttaagtttttttggttattaggttttaggttggttataggatagtaaaaaataggattgtattttattaatagtagatttgaggagtattattaggaattagtaataatgaaaatagaagttagagattatagaataatattattttaaattatgggattaaatagggtaatttgttgtttgtgtgatttttttgatttttaaagtatgggtatgattttttttgaaagattattatgagtaaattttagaaaattgattgttttatttatcgtttgttagt

SEQ ID NO: 386 - DNA, 15161 bp, Artificial Sequence
  chemically treated genomic DNA (Homo sapiens)
  unsure (2369, 2428, 2447, 2450..2451, 2454)
attgataaacgataaataaaatagttagttttttaaaatttatttataataattttttaaaaagagttatgtttatattttaaaaattagaaaagttatataggtagtaaattattttatttggttttatggtttaaaataatgttattttatgatttttgatttttatttttattgttattggtttttgatgatgttttttaagtttgttgttgatgaaatgtagttttgttttttgttgttttgtgattaatttggggtttagtagttaaagagatttaaaagattttagggtcgggtacggtggtttatgtttgtaattttagtattttgggaggttgaggtgggtggattatttgaggtcgggagtttaaaattagtttgattaatatggagaaattttatttttttaaaaatataaaattagttaggcgtggtggcgtatgtttgtaattttagttaattgggaggttgagttaggagaatcgtttgaattcgggggtagaggttgtagtgagttgagatcgttttattgtattttagtttgggtaataagagcgagatttcgttttaaataaaaaaaaaataaataaatagaaaaaaaataataataaaaaaaatatatataaaaaaatattttagagttcgtattttttaaggtttggtttgtttatttcgtatttagtaggatgttaaaatagttttattaagaataatgtgttatgaagaaagggagattaaatagtaattgttagtaggtgatttagttttatatatttttttggaatgttattagtagtttttaaaattttagtaatttttatttttattttttgattaaaagaaatataaaaaagatattagttatgtattaaaaattaatttatcgttatatttttaatagattattatattaaaatttttaaaggttatttagatggagtgaggtatttttgtattattgagttataagataatatggtttttagtaatttgtgggatgaaggggaatagaatgttgtatggagagatagaagagttttttatttgttttattgaatttaatttgtaattatttttttttattattattttttttgattttttttaattttaaatttatagttgagtttttatttaattttaagtgaaagagtatttaagaaaagaaaataggttgggagtagtagtttgtttttgtaattttagtattttagggggttaaagcgggaggattgtttgaagttaggagttcgagattagtttgggtagtaaagtaaggttttgtgttaataaaagatgtttttaaaaaatagaattagtttagtatagtagagaattgtttgaggttaagaggttgaggttgtagtgagttatgatggtattagggtattttagttttggtgatagagtaagattttgtttttgtaaaataaaaataaaggtcgggtacggtggtttatatttgtaattttagtatattgggaggttaaggtgggtggattatttgagtttaggagcgtaagatcgttttgggtaatacgatgaaattttatttttatttaaaatataaaaaattagttgggtatgatggtgtatgtttgtggttttagttatttaaggtagaggttgaggtggaaggtttatttgattttagaaggtagaggttatagtgagttgagatcgtgttattgtattttagtttgggtgagagtgagattttatttttaaagtaaaataaaattttatatattttttgttaaaaattgttgatttttttgttaggttaataagaggttttaaaaaaaaaaaggtttttatatgtaaaagttatatattttattaatatattaatataaaagtaaaaaggaggtaataaataggagatatagataatatttaaatgtgttttagtaaatatgttagtttataagattatttttgaaatttaaaataatgattagtagaattgtttttattatgggaattgatatagttttattagtgtttgtttttaaatattaattatttatttttgatgtatatttgggtttttttaatattaaaaagatattttagttttagttttaaatgtggaagattttagtttaagaaaaaaaaaatgtgattaggtgcggtggtttatgtttgtaattttagtattttgggaggtcgaggtgggtggattatttgaggttaggagtttgagattagtttagttaacgtggtgaaattttgtttttattaaaaatataagaattagtcgggagtggtggcgggtgtttgtaattttagttatttgggaggttgaggtatgagaattttttgaaattaggaggtggaggttgtagtgagtcgagatcgcgttntattatttaggtttggggtaaggattattattgcgtaaaaaattaattaaaattttttnatagtttgttcggtaattnagnntanttttattaggtataacgtattttatataattgtgttatattttttttttttttttggaaaaggaagtttaattttttttttaaggttgaaaataaggggggaattttttgttaatggaatttttaatttttaaggtaaagggaatttttttgtttaatttttcggagaacggggaataacgggaataggttggttataaattttttttttttttggatttttaagaaaaaagggggtttaataatgtggttaaggtgggtttaaaatttcgaatttaagggggtttatcggtttggttttttaaaagggcgggaattacgggtagaatttatttttcgggttcggtggttttttaatatatcgggtaggtaaaagggttaattttagttttattaaaaaaaaaagtatcgttttgtattatgatattatgtttatgatgttattaagtgataggaattttttagttttattttaattttataggattattaattattttatatgaagtttattgttgattaaaatattatttgatagaatatatgattatatttaaattaagaaagtgttttggttattttgtaattgattagatgggaatttttgttatttagggatattttgattaatatttttagaataaaatttttttatggtgaaatatgttatgttaaaattttttaattatgtaagggtgggtatgtattaaaaagtaaacgttattttttttgggatatgtatatattattaatatttttatttgtttttgtatagatgtaggtaaatttggtaagggagggttttgaggttagtgatgtttacgaaggttatatatatttttataaattattgtgttttatatgtgaatagtgtagaggtagaataaaggataattgttttcgtttttttttttattgtatgataagtatttatttagattaaggattgattttttttattaaattaggaaaaaattggttattggttatttatatttgaataagttttgaaatggttatttaaagttgttagaagtagtggttgttgtttaagggtattaatttgtatttaattataaattttagaagattttattgggaatttttatttattatattattgttaaatttattgatatttataaattattttttttttttgtttttttatatgttattaatattcgagaataattttttagaaatatataatagaatttaagttagtatttttaagaattttaatatttttttatatttgtattattttatttgttagaaatgtttgaaaatggggttgggtgtttgtaattttagaattttgagattggtttgggtaataaagtaagattttgtgtttattaattttttttaattagtggtgtatgtttgtggttttagttatttgtgaggttgaggtagaaggattatttgagtttagaaggttgaggttgtaggtgagttatgtttatgttattgtattttaatcgggtgatagagttagattttgtttttaaaaaaaaaaaaaattaattaaaaaaaattaaaaatgtatggtattggaatgtatatttttttaaaagtaataaacgtggagaataaggaagaaaaagatttattagatgtaattattttttttattaattttgatttttaatgtggttttgtttttagatttaatttaaataatgtattaaattttaacgaatttttattttggatttagatatttattagaaaagttttaggtttgtatttagatagtaaaataaaaatatttttgggttatttttttaaattgttagttttttttatttgttgaatttaatttagagaaaataaatatttaatttttgaattagttaaaaaatatgttacgattttatgttttttttagtattttatttagaagaattaaggagataaaatatttttcgggtgattttttttattttttaatatgtttttttttttaataagtttagttgtatatttatataaaatattttttttatagaagtggaggttgtcggtaataattgatatttttttttaattatttaatttttaggttgttgggttagaattaaataatttaattagtaaagaggttttaaataatttggtagtttattaaaaagttaaatatagggttattatatgatttagaaattttatttttagttatatatttaacggaattgaaagtatatgtttataaaaaaaaatttttatataaatgttgatagtagtattataagtatttataatagtcgaaagaaaataaaatgtttattaattgatgaatgaattaaaaatgtggtgtatatatataatggaatattatttagttataaaaggaataaagtattgatatatattataataaagatgaatgttaaaaatattaaaagaaattagttataaaagataatatattgtatgattttatttgtatgaaacgtttagaataggtaaatttaagagataaaaaaaagtagattagtgggggtcgggagggaatggagagaaatggggtgtttgttatcgggaatagggttttttggggggtatatgtgtttgaaaatattatatagtttattgtggtgatggttgtataattttatagtatattaaaaattatattttttaaataggtaaattgtatggtatgtgaattatatttggataaagttgttattttaaaatggagggttttaatatgtttttattaatcgattttattttttaaatttatttatttttttaatttttaaaaggatattataggttgggcgtagtatttcgtatttgtaattttaatattttgggaagttaaggttggaggattgtttgagtataagggtttaagattagattgggtaattaatatagggagatttcgtttttattaaaataaaaaaaattagttagttaaggtgttatgtgtttgtggttttatttattagggaggttgaggtagaaggatcgattgagattaggaagtcgaggttgtagtgagttatgattaagttattgtattttagtttgttttgaataggaaaagttaaaagtgtcgtttgttagtttaattaaattttaagagtattatatttgttttataagaaagaaaagggagatacgtattaagagattataagtagtgttataaatttagatatttgataggttaaagttaaatgaaaaatgaatttaaaaaataaaataggtataaatatattttacgatttttataaaattgtaagtgggttaaaaatgtaatataattatattttgttatggaattttatatagtgttaatattttataatttatattgtaatagttaagtttagtttcgtggtaatatgttaaaaaatattttaagaaaaatttttttattatatagtaaatcgtttttcggtatttttgaagatattttaatgataagggaaaatgtttatgatgtaatattatatgaaaaattaatttataaagttatgtaaagaatattttaatgatgtaaagtatgtgaattttataaagtatgttaagtatttttaaataaaaatatattaaaattttaataacggttatttttggattgtggaattataggggattttttgaaagaatgttgtttttttataattaggaaaaagtaaattttaaatagttttatattattatatatatgatatataatagatatattatattaattggtatattttagtttttaaatatttggattaagattgtggttgggaatagagttggtatttttatttatttagtagtagttttttatattaatttttttttaaatgtattagattttatttattttattttattttttttaaaataaatttagtatttatagtttgaatgaagttttttagatgattttgttatatttttattttttatttttttttgagaattatttatttaagtaagaagtttttatcggattttttagaatatttatataaattagttttaatttaaatgattaaaatattatggtaagttataagaatgtggttaatagggttattataggggataaagtagaagtttttggtttttagttttaagtaaaagttaatttaagaaaatatatcgaaagaatatgtatcgtttaaataataaaattaatatttttgttttatattaaatggtatgtttgtattaaaatgatttaaaggattttttgaaaatattatattaaggttaggcgcggtggtatatgtttgtaattttagtattttgggaggtcgaggcgggtggattatttgaggatggaaagttcgagattagttaggttaatatggtgaaattattaaaaatataaaattagttagggcgtggtggtatgttgtagttttagttatttgggaagttgaggtagaataatcgtttggatttgtaggggtagaggttgtagtgagttaatattattttatcgtattttagtttgggtgataagcgtaaaatttcgttttaaaaaaataaaaaataaaaaaaatttattaataatacgtttatttaaaaaagaaaaataaaaagtaatttataaaatgtagttattagaagtgtgtatagttgatttgcgatttaatatagtaaaaaagaaaaaataattaggaatatgttgtggggttataattagtattttaaaatgagattaggttttgttgaatgtttttttttaatgtagagaaatttttgttaaatttttatttatacgtttatttgatattaaaaatattaattatagttatttttgttaggtagttttataaaatattattaattagtatttaatattattgaaaatttaggtggataaaattttttttgaagattaaaaataattatttattagaaaatttaagtttgttttggataagttttttaataggtttggatttgggaaggagttgaaaaatttagaatatttaagaattttttgggggtattgttaaattaaatatgtttttgtaggatgaagaagtattgatagaatgtgtgttgaatataggatagagaggaggttgaaaaagtttgaaagatatttgtttagattgggagttttttgagtgaagagattgtgttttattttaggattgttggtgtttggtaaggaggaggttaatttgttaacgtttgttaaattaagagagaaacgtgtttggattataatttttattcgtttttttcgtttttttaaaaaaggaaaatagattgtataaattaaatatttaatttgaatttataaaaataaatggaattatttattttttttttagtgttttttttagtaattttgtataatttattcgtgaagtttaagtatttgtaattatataaaggtgcgtttaatttaaaaggatataaatattttaaaatataaatttgttttatgtttataaaatatatggaaaatgaaataaaatataaataaattgagatataaatatatttttaaaatatttaaatttataagtaaagtttaaaatatataaaaatatgtcgggcgcgatggtttacgtttgtaattttagttttttgggaggttgaagcgggtggattacgaggttaggagtttaagattagttaggttaagatggtgaaattttcgtttttataaaaatataaaaaaaattagtcgggtatgatggcggggtgtttgtaattttagttatttaggaggttgaggcggaagaatcgttcgaattcgggaggcggaggttgtagtgagttgagatcgtgttattgtattttagtttgggcgatagagtgagatttcgttttaaaaaataaaaataaaaaaaaaataaaaaggagtaggtttttattttttaaatgtaaataagatatatatatttttaaattaattgtattttttttataaaatagttataaaatataattatttttaaagtaaattttttaaagatttagtaagatgtttatatttgaaataaagttttaggtagtgaatattgattgtaggtattagggggttttttaggaataatttgatagtaaaggaaaaggtaaataagagtttttggtaaaatttttgttttttatttagttttaagattgttggatggtttttatatttggagtaaatatatagtatttagttatagaataggtatttatagaatttgggtttgagatatcgatatatattttgagaaaaaggaattattttttttttattataatattttttgatgattttttaaatataagtatatattgttttattttagtaattattttaaggtaatttgaaagtaaatagtatatatgtaatcgttggacggcggttaataaagaggtttttaaattgtttaaaaaggattaaaggtttttttatatatttataaaataattattgatgacgaaaattttagggtagagggattgtttggtagaagattgtatttaattttgaataatattttgtaatgaattaatatatttaattttcggttagtttattttttcgttttttttttttgtttttttattaatataaaattatttaataagaatatttgagttcggaaagtttaaatgttgcgtagatttataaatatttttcgaatataagataggttttaaaaatagatttttattaagtttgtgtagaaattaagttttgtttaaattaaatgtaaaagttaatttttttagtaaatttatttatatatattatattttttacgtgtatttttaatttgattaaatattttgttttataatttttttaggttaagtaataaacggtagattaattttcgttaattttattttttttttaagaagaatttattttatatagtattgtgtaaaaatgtagagtagacgaagtagttttgttaaggataggtttatatatatatacgtaaaatttattttcggaacgataatcggaggtagttaagggtaatgtataaagagaatagagaagaatagtgattttacggacgtataaagtttagtggtaggtattttttttttattttcgggttatcggaggcgagtattacggcgcgcggagttcggcggttttttcgaaaggttgtttttcgtagattcgtttcgtatagttttcggtcggcgggtttggttttcgagggttcgcgggaacggttttttttttttcgattttttttgatcgcgtttttagaggtcgttttttcgcgtttagagttttttcgtttttttttcggttcgttcgtcgcgtcgcgtttttagagattcgtttcggggcgggaaaggggttttttcgcgtttcggcggtagagggggacgtaggggtcggcggcggtgttcgatttttttttgtttcgcggttaggcgcgtatttattttttagtagtcgggtgatgaggttgtttacgtttagtttttcgttcgttattttgtcggtatagatttttttttttagtagcgggaataagggtttttcggcggcggaggttgcggcgacggttcggcgtttttttatttataagttacgcggcgtttcgatttcggttttaatttttttttttttcgggttttttttttatttttttttcgtcgggtagcgagagcgcgcgtatattcggaggtatttacggaaaataaataaataaataagagaggttttttcgaatagggtcgcgttagatttaggtcgttattttttttttttcggtatcgtttagtttcgtaaagtttattagcgtcgtcgacggttttattcgtagcgttatttatttcgtacgttttttgcgcgtcgtcgcgttacgtagtttttcgcgtaggcgcgcggtgcgtttttcgtcgaggtttttttcgacgtttgggtcgtcgcgtaatcgtattggagcggtttttttcgttgtcgttttcgcgtaggtgcgtcgttttttttttacgtttacggcgtcgagtttcgtcgcggtggcgtaggcgttagggaggtttttcggttttgtcgcgcggaggaagtttcggttacgtagagcgcgttggggtagggttgatttttttttttttttattttattggttttttttagacgtggtggttgcgttttttcggtttcgtttttcgttttttggttttattttttagatttgtaaatagtttttcgtgtttttttcgttagtcgggaaacgcgaattgtagcgtttgggattcgggtttgcgcgtgtggaaagtaaaaggggttattttgttggagttcgatattgtaaataaaggtttttattttcggcggttttaaaaaattagttttgtagggattttggttgaaagaagcgttaaagtgggttttgtaggagttagtaataatttaattttatatgggtgtaggtggttgtttgtgtttagcgtttttatatattttatatttttatttacgtcgtgggtattttttttttacggtgtgtttttgttgttgtttttagtatattgtttaattattttatttggtaattatttatgtattttttttttattttcgatttagtttttaggggataaaaatatattaatttatttttgtgtttatagtatttattaagtatttttattacgtaatattgtttttagaaaggtaggaggagaagtagttacgttaaggatttaggtaagttagattttttgttcggttttaggaggtggttagtttttatttattttataagtgtttttttagaaatttagatttgatattgttttaagtttaaggtagtgtgttttttttatttatatattattaatagtagttaatatttgtttagatttttgtatgtattttgttattgttttaaatgttatattcgggttattttatttaatttttataattgttttgtgaggtaggtattattattatttttattttgtagatgggatttatcgaggtatagacggttaaaaaatttagtttaaataatataaataaatagtagagtatgtagtgttagagtttgtatttttaataattgttatatttttttttttcgtgaatgtgggttgagatgttgaaataggtatgtgttgtgggggagaaaaagttttgtttaattaagtgttttttaatgtttagatgatatagagttaggattttttaatgtttttttttttttatttttttttttattttagggttgagtttgtgtatcgattgtgaatataataggtagtaggttataatggtggttttggttggagtagtttttatagattttagtaatttgtggagatgaacgggtagttttttgtagtttttatagattattgttagttcgttttgaggtttttaggagtgaagatttggtttattattattttttgttgttttgttaaatttatttatattttattttattttagaggaaaggatttaacgtagtttatataaatgtgtatattagggtaaattaaaaataagtatagagaaaaataggataaaagaaaatcgtgagtgtgaaagataagattaagttagtagttttgtatgtaaaatgtatggtgtaaggttttattggtttgttggaggtaggttatatatatgatttttagttttttagtaattaagaaaaagattagttgtaatcggagtaggtgttttggttaagttggaattaggatttgaatatagtagtttgtagagttatattatttgtttaaattttttttatgagtttttttaagtgtaatagaatgtttgggagtacgtaaatgtttttatttagatgtttatttagtttttaatttttatggggtttatgaattttatgaaaaagaattttgaattttgtttataattagagtttaagtatacgtagatatgtttaaagataagggatatttaaaggaaagattgtatagagagaaagtgagtattcgagagaaaattattataagtgaggtagagggaggtcggttttagtagagttttggaggtcgtgagaagaagaggtaggagataggagagtggtttcgagtatttgtttgttgatgttattttttttatttttattaggttttttagtgtttggagttttgggtaggaatgggttattgtaagaaagagttttattattagggttttagttaatttttttgtgggatatttttttaaaataattaagagtttagaatgttttagattttgaagtgaaattggtatatatattaagtgttatttaataattcgatagtttttagggtagtttattataattttaagtattagttattatttttattttttttagagtaaaatgtgttttttgaaggaagttgggaaaatgaagaaaaaaaatataaaaattatttataattttattagttatagatggtagtttttttgttttatttttgaataatggttgttaaatatttgttagtatattataaggtttagggaggtatttgggttatgtatgttaatatttttgggtaattttagaaatttttatgaagggaaatttttgttatttatttagattttttgattgtaaggggtttgggtattatgatttaggggttttaataaaattattattttatttttattaatagataatgtttgtgtttattagataaaggtaaattagtgtttagaggaatttaattatttttgaattgagattagagagttgtttttatggattgtttttagagaaggtatttcggaatatagtaaatagtagtttggtgatttcggttagtaaacgtagtaaagatttttatagggatgttttttttatatgtttgttagtattagttagtagttaatttggtgtgaaagtgagtaagtttaggtagtaaaatgtggagggggtgatatatagttttttgttgttttggtttaatttaagatgatttttaaatgaatgaattaatatttattgggttgtttttttataaatatgattttttttaattaagtgtttaataagttttaagtagtggtaagttgaaattttattagttgtatttggaggttagttattttttatatcgtatgtattaagtttttatagttagtttaatttaagaaaattggaaaattagataaggatatatatgtattattaggaggttattttttttaatatagagttaggtttaggtggtatagttaggtagggttaagatttgtttttaagatttagttttggttttattttattatatatatgagaatagttaaaattatagttaagttataaggtatgtttttagttagtttagttttttagaattataaggtaaatataaataaatgtttttttttttgtttttggttagtaattttttcggtggttttaattaattttttttttttttttttttagtttgttttaagttaattttatagtatattcgtattttttaagataaagtgattgaaaaataaatgtttagtaattgaaggagttaattggttatttagaattgttaattataaggtaattaaagttaggtgaatagttattataagtaatgattatttaattgttgaagagtttatttgtggttttttttttttgtaattagattatagggttagttgtttttgttataataaaagtaagttatttatataggtaagaatgttttttttttattgtttttttttttttttattttgtttattgaaatggatattaggaaataattgtttgatgagggaaagtatataatatgtgaatatttgttttaaatgaaatagtgtattgtaaatgttttgttttttgttgttttgttttttttgtagtatatttaaattatatataatttatttttttagttggaggtttatcgttaaatggtttaattttttttttttttttgagatagagttttatttaggttggaatatagtggtttatttatagttaattgtagttttgatattttaggtttaagtaatttttttgttttagttttcgtagtagttgagattataggtatgtgttattatgttcggttatttttttttatttttagtagagatagggtttcgttgtgttaggttggtttcgaatttttgggtttaagtaatttttttatttcggttttttaaagtgttgggattataggtatgagttatcgtatttggttttaattggtttttatgtttttgttttaattgggttttggtagataagataaggaaagtattattttttttatgtagttataaaatgagtagttttttataatatataagattatattaaaattaatagtatatgtttgttaaaattaaagttaaattatttgtgagttgtgaaatatatttattagagttatatttaatattaataggttttttatataggaaatattggttaaatagaatatttattaattattatttaaattttgatttaaattaaatttagtttattataataagtttttaattgaaatgttttatggtatttgttatttaagaaaattttatagtgaatagatttttgaagtaaaaagaataatgaattaattaagtatttatgaaatatttagtgagtttgagtttgtgttgaagaaggtatgattttttaatttttaagttgtttaatgattatgtgggaaaatgattataaaatgatttggatagtgggaaaagtattggtttggaggtgggagaataaagtagttgaataa

SEQ ID NO: 387 - DNA, 16228 bp, Artificial Sequence
  chemically treated genomic DNA (Homo sapiens)
agtaagtattgagatagagggtgattgtgagaatttgtttttaattataatagttagttgatttaaatatcgtatgttttgggtattttgaagttttagtgtgatgaaaggtttatttgagtttgtggattattgaatcgttgttatcgttagaggaaaaagtgttttggtaggttttggtagggggagttagtaaggtgaaatgtgtaggattgtgtgttggttttggttagtttatgtgtaaatagttttattttttaaagggatattagaatggtgttttgggaggaatttgaatattgtggtgaaatatttttaaatttaaatttgagttatgttgggaatttggataatttttttattggataattttttttaagttttagtttttttatttgtagagcggggatagtaatatgttttttattagttgttataagggtgttgataaatgtgtattttagagttaggtttatttttatgtttttagttttatttgtttgaagttcgttttttatataagtgttaaatgattattttgtagttttttatttaatatgtgttgtttaattagtttttaaatgtgaaatatgtatatttgaaaaatagaatagaaagttataatgggaagaaagttttttattttttattatttttttatttgttagtattgtgtatgtgcgtgtgtatgcgtgtgtgtgtgtttacgtagttgggtattatgtgtttttttttttaatttggtgtattttttttttgtattttagatatttttttatattgatatataaagtttttgtattttgttgaatggttttgttgtatttttgtgttataatttatttagtttatttatagtgtgtattttagattatttttagttttttgtttgttataagaagtgttataaatatgtttgtataaatatgtttggatatttgtatacgtatttgttagatatatttagagaattgtgtttgttagtttaggatatgtagttaatatttttattagttagatttatattttatttaaaaaaatgttttattattttttagtttttattgacgtgtatgaaagtgtttgtttttttatgtttcggtcgatattgtgaataaatttgagtttaggttttgttttttttaggaaatttttttgtagcgtttttttttagttttgagttgtttatagtttggaagggaggtagattttataaaggttgtgatagtgtagtttggcgggcgttgttgagtgtataagtggtaaggagggagttttgtgttggacggatggtggtagtatagtttgggagttgagggggaggaattagtatcggttggtgtgggaagtggaggtagcgaatgtaggttttagtgtattgttaatgtggttttatgaagaatttttgtatttttcgatttgtaaaattgttttttgagttttagttgatggtttattttgttgaaatattattttaatagagttgatttatgaatagttaaattatatatttttttaggtggttttaagttttttttttttgtttttataaagtttaaatttgatagagaaggtggttttaataggtttttatttaggtgattttttttttttgtataataagggtattttattttaattttataattattttaaatttttttgtttgtttgtttttgagatggagtttcgttgtggtttaggttggagtggtacgattttagtttattgtaatttttatttttcggtttaaatgatttttttgtattagttttttaagtagttgggattataggtacgtattattatattcggttaatttttgtatttttagtagagatggggttttattatgttggttaggttgtttttaaatttttgattttaagtgatttttttacgttggttttttaaagtgttgggattataggtgtgagttattatgttcggattattttaaattttgagatggaattataattttaaaatttaatatgagtgaatatattttttaaatttaaaaaagttaatttaatattgttatagtttaaatataggttgaaagtagttatagtagggagagttgtagagttggttagtagggttgagattgatttgttagttttaacgtggatacggggttttgaatggggggtggttttgtgttatgaggtagttaaggaatttagttggtgggtagttttttatttatagtatgtgatttttatttttgggtttgtgatagttgattttttagttagtagtaaggaagaaagattggagggtaagtagttttttgtaaagaaaaataaaagtgatttggaagttgtatatattatttttatttatattttattagttagaatttggttatttggttatatttggttgttgggaaagttgttaggcgtcgtttttagttgggtagttatttatttagtaggaaggggaaggaaggttttttttatgaaagcgaggaagggagggatggattttggagtattttagcgtttgtgtcgtatttttgatgttttgacggtttttatagtttttaggattgaggttagacggttttgcgtggtttttggggtttatagtgatttggtttttttttttttttttagttttattcgttttttatttagtaagtttttagtgatttgttatatttcgaatgtgttttcgtttttgttgtttttttttttatttttttaaattttttttattttattgggtttaggatttttggtgtgtagggtttttttttgagtgtgcgtttattgagggtaggcgagtgttttggtatggtattttattatttatagcgggtgtttagtatatgtttgtaagtaattgtgttgttggtgtgttgacggtatagtagaggaatagttatttttcgtaaagtaggtggtagtgggtgtttgtttttttgttgagttgtttttaattttttgtatttgtatttcgttagttaagtttagtagttcgttgtgtttggatatagttagtttgagttttgtggttttattgtttatttttggtaaaagagtttgagggcggatgtcgttttttttttgaagtcgtttttgttttttgtttttgttagtgggtaggattttttttgttttttgattttgtttatattgtgtttatggtttttatcgtattgtgatttgtaatatagataatggatttattgttcgcgttttttttttaaatagtgaagtatatgttgttttaagattggttgttagttgattatggtatattttttgttatatttattattttcgtgtataaaggtattttttaaatgttgagtggaattgttttagttttttgtaaattgtaaataagttaatttttagaaaggatttttttttagatattagtaaaatggagtagtattgtggggaattagattaataaaggtttattgaatgtttatagtgttttaaagattagttttttgtttttttgtttttggagtatgagatgttatgagtaagatagatttgtttcgtattttttatagtttagagtatagtgatttgttagtttggagagtttttgagttttttttttatagtagtgtgggttaggtaggtgttttagtttatttagttttagattgtttttaggtaatacgggattgagatttttgcggtgcgggttgtatgagtagttgtttgtttagtatttaagcgttgtggcgttattggagttattttttggttggtacgttaatatatttcggtaggagtggttagagtggtagttatattgtagttattatttagaggacggggagaagatcgtggggtagtggttatttggagaaattattaatttgatttagttttttatttagatttgttattaatttattttttttatgtttaaggaaaattttagtatttgtgttgaaatataaattattattataaaaattttattaggttgacgttaaatattagatattagaatataaaggtaagggatttgatagagttgtagaatatattttgtagttttaaacggtatagaatgtttatttatatgattttattgttggttatgtagttttaaaagattaaaataaatagtttgttgatttttaaataagtataattagatacgagtttaggaattatttgttaatttgtttgtttgttttttgtataaaattatttaggtttttgtagagtagtagttttagtttgtgttttaattatagaaaagttgttttttgggtttgttggtttatatttagatatagtggatagattttttagtgttattatgatggattgttagttatagtagagttttttatatatagatttttattttgaagttcggtggtgatgtgggattttggggttgtgttagttgatgttagttttgggatttattttttgaggtaggagtacgtgtttgggtatatgtagtatattgatgttattaggtttttgatagtttgttattttggcgtatgaattttgttttttggtttattattttaattagaatttatatattgagtagaagattggttcgtttgtttttttttaggtattttagaagtgattatttttgaaataatgttttcgtttttagatagttaggtgtaaatgaattatttatatttagtttgtttatagggggtaagttgatgagacgtatagagtgatgtagtttttttatagttagtagtaatgtatatatttttttttttaaaggtggttattttttagtttagttttttaaagtgtggttttgttgggttttaaaattttttttttttataatggtttggtattattgaaatgtttgtatttttttgtgttttgtttaagtttagaatttggttagattgattttattaatttatagttatattgttttatatattaataagtttagaatttttttacgtgagttgcgtatgtattttcggtaagaatgtacgtttattttgtttttttttgaagggatttgaaatttgtttatttttcgggatattgtaggacgttgtattatgagcgatagtaaatgtgatagttagttttatagtgtgtaagtggtagatttaatttttattgttttaaaacgttattagtagttgaaattaattggttttggggtttaagggattgtttggtaagtatggtttgttttaatagcgtggattgagtttttgttgtaataaaaagtaaaattaaagtgttaggatttagaaatattgatgattaaaaaaaaaattttgttataggtttatgagttaaattgaattaattgtttgttttagttttgtgtagttaggttgtagggtataaatttatatttttagaatgttgtaggaatttaaataggtagtaagtttttttttttgtttgtttttttttttttttatttttttttttattttttttgttattatgatattagagtagtaggtatgatagtgagttgtaatagaaatttggagttttatttatttttttattatggttatttttttttttttttttttttattttcgattatttttgtttatttttaggcgttattattgtagtgttttgttatttattggtaggatgaggttagttagtgttattgttattttatggattaattaggaagggatgttgtgtgaggggttgggttggttattttttttttggtgttttattttaattgtgtgtttagtttagaacgttagaatcgttagtttgattttgaacgttagttttttgtatggtaagacggttagtcgtcgtagtattacgggttagtttaaggtaaagttttttatatgttttttagattgtagttattagtattttttatattttttattttttatttttttgggtagaatttttttttttttttttttttttttttttttttggttaatgaaaataggattatttttgcgtttaaagaaatcgtggtgtagttaaatatcgcgtgtttatagttggtaggtagagggggttgagggagaagaaagtttttttcgatgttttagtagggtagtttatatttttttgtagagatgttgggtttggagaatttttaacgatgatttttaattgattttttgttgcggagatttatgattagggaaatagttgttttttttagttttggcggttgaaggttttgggagttaagaggaaattgtagtttagagtttttttgagaagttaaggcgggaaagggattgtttggaaggaatgtttagtttgtatttaaagtaatggtgattttaattttttgatgatatatgttgtatcggtatttaaatttagtgtgttagaagaagtgttaaaggtggtcgggtacggtggtttacgtttgtaattttagtattttgggaggttaagttgggtagattacgaggttaagagatcgagattattttggttaatatggtgaaatttcgtttttgttaaaaatatagaaattagttaggtgtggtggtatatattcgtagttttagttattcgggaggttgaggtaagagaatcgtttgaatttgggagatggaggttgtagtgagttaagatcgcgttattgtattttagtttgggcgatggagtaagatttcgttttaaaaaaaaaaaaaaaaaagttttaaagttagtggaggatggtttaaattaggaaattttgatggtaatggaaagttataaataataaagtatttttttggtttataatttattttttatttggaattagatgataatttgatagataatttgatgtgtgtatgaatttgatagataatttgatgtgtgtatgcgagagagagagagaaaaaggagagagggggtaagaagggagaaatgtcggaggttttggggagttgtttgtggttatagataggtagttgttttatttatttatttatttttttgagatagagttttattttgttattaggttggagtgtagtggcgcgattttagtttattgtagttttcgttttttaggtttaagtagtttttttgttttagtttttcggtagttgggattataggcgtacgttattatatttagttaatttttgtatttttagtagagatagggtttttttatgttggttaggatggtttcgattttttgattttatgatttatttattttggttttttaaagtgttgggattataggtatgagttattgcgttcggtttataggtagttgttttaaatacgtgttttatttattttagttggtatgttatttatttgtttttgaaggttggtagtaatgtgaatagtgtatattgtagaattattatgagttttgttataatttttattggtggtgaatcgaaggattaggaaggtttatttgtttttttcgttttacggggtgttagtggtaggtttgggattaaaataagttgtgggtttttgggattttattgtttgtattacggagagatttgttgaagattttgaattattgatattttgataggttaaggtttttgatttattttttgtttagaattttagtaataatgaataaatatttattaaatatttattaaataatttttatttaattgtatttatttttataagataattgttatatttaagaatagttttaatttttatagttataattgatttttagttttatggtatttttttattttatgttttaatagggaaagtaaatattttataagtgattttcgttttttttttattttttttttttttttgtattttttattaggttatgaggtattaagtagaattgggaaataatttagttacggtatattttcgttttaaaaaagaaaaaaaagtttgtttttttaaaaataagtttaatagtagattagttaatattgataagaggaattggattttttattatatttcgtattaaaatattggtattatgtagttaattgatgatttgaaatttttttttattattattgtatttgaaaattatttgttagtgattttttggggagtgtagtatgtagaataatggtttcgtttgagatgtttacgttttaatttttggaatttgtatatttttttatatggtaaaaggaatttagtcggtgtgattatattaatggttttgagatgggagggttattttaggtttagttgggtgggttttttttataaaagggagataggaaggttatagttagagatgtgatggtagagcgaagtttggagtgatgtggggttatagttaagtaatataggaagtttttaattagttgagagaggtagggagtagattttttttagagtttgtagaaggagttacgtagttttgtttattttttgaggtataagatgtattttggattttttatttttagaattgtaagatagtaagtttgtgtggttttaaagtagtaaattggtggttatttgttataatagtaataggaaattaatttataagtatgtgtatttttatatttttgagaaatataatagtaatagtgtatggtttatgtaattagttaattttttatttaaattagagttttatgaagggtaggtgtgtagataaattaacgtgtaggtagggtttgtgatttgtataggattaaatggaagagttggagttagaagaaaatattttggtttttaattttgaattgtttttatagttgtttttgatttgtttatttgtttttgtttttttaaatatgttagtaaaatttattaggaaataagtttttaaattttaaaatattttattttatttttgagacggagttttgttttgttattaggtggagtgtagtggcgtgattttggtttatcgtaattttcgtttcgcgggtttaagtgatttttttgttttagtttttcgagtagttgggattataggtgtgcgttattacgtttagttaattttttgtattttagtagagatggggttttattatgttggttaggatggtttttattttttgatttcgtgatttgtttattttggttttttaaagtgttgggattgtaggtatgagttatcgcgtttggtttaaaataagttttaaaatataattttgaagtatttataaatattaattgtgttatagtataattaaataattgtaagattttgaagttttagtggagaaaatgtatgtatattttttttatatatatatttagttttttttttttttttaaaaattttaagtttggttaaaatagtaaagattatttgttttacgaaattattttatgaaatgtttaatttttaaaaaagtgtttaatattgagtttggcggtttttagaagtaatagttatagttttaatatgaaataattggtatagcgtgtttttttttgtgtttttaagttttgtataaatatgagtattggtttgtttttaatatggtttattttttattaatataaataaataaaaatataataatgtttataataaaatttttgtgataaaggagatatggtttgaggtataggatggttgtgatttagaagatttgagttttgagtttagtttttttttttagcgaagagttttttgtgagtagggtaaattagtttttttatgggttttaatatttttatttgtaaaatgagtggtttggaattttttatttaagatggtggttcgaatatttgtataaagataagagggtagtaataagtggaagatagttttaataaatttatgaaatatagaaagtagtttgaattttgtgatatagataaaatagtagataaagtgagaataagtagttgaagtatgtgcgtaaggaagagaatttagttatagtaaaattatagaggttgtgggtatagagatgataatgaagaagagatgaaatgagtggttaaaattagggttgttaattaaaagtgtgtttgtgaaatagttgtgttagttttttgttaatatttttattgttttttatgtttagtatttttttttagagagttagtaagttagtgaggagttattaggttaggatttggggaagtatagaagtttagtgaggggagttttagtatgtggggttgttttttttttgggggtatttgaaaattttggaaggggttgttgagagagtgttttggattgttttgtggttaggagatagggatgagagtttagggttttttaatattgtgtggtaaattttttttatttgtgttgggattaataaaaggttgttttttagaagtaaaggtaatttagagattggtttttataggtattgttatttagttttagattattattttatttgttgaatttgtatgggggtaaataaaaattgttagtgtttttaggtatttagtagaaataaatttaaattttttgtggaagaagatagtattatattagataaaattatttttagatagtaaatagttttatacgtgtaaggtttagtttaggtatataaggagatatgataatatgaataaaattttgtagaaatagtagataaaagaaatagatttataggagatattggtattattagatttatatttttaaatagttatgatattacgtttaaggtgataaaggtaagattaaaagttttggtggagaaatgaaaattttttttaagaggaataaattaaaattttagaagtaaaaattatagtaattgaattatgaatttaatatgtgtaatagtatgttagatataattgaagagagatttagtgatttggaggagaggttagtaaaaagtatttagaatgaaagttgtagaggtaaaaatggtagaagagtttaaaatagagaaggtgttagttttttattgttgtataatatattaatataaatttagttgtttaaaataatatttattgattattttatagttttatagttagaaatttgggtgggtttgtttgggttttttgtttagtattttataaagttgaagttaagatttcgattgggttgggtttagtttatagatggaggttttggaagggtatttgtttttaagtttttttagtttgttggtagagtttagttttttatagttttaggtttgtggtttttaattttttgattttttttagttaggcgttgttgtttgtttttagaggttgtatgtttttttttttaagtgattttttttatttttaaggtagtagtggtatgtttagttttttttatatttatatttttttgattttttattttttttatgagttagagtaaattttgtttttaaagggttttcgtgataagaataggtttatttggataatttgcgttttgttaaattaatgagtacgtttagtttttttgtaagatgtagggttagtatatgtatttttttttttgtaaaattgtatatttatatattagtagtatatagaaaatgaaaatttgaaaaggatattatttaaaataggataaaaatttttaaattattatatttggaggaaaaatttaataatatgaaagatttgtatataaaaagttaaaaaaattagaaaaaatagagaaaattgaaatcgtggtgggatgtttgatttttagagttagaatatttaatattatgaaggttattttttagatttgtttagagtgattgtaattaaattttagtcgttttaaaaaataaagaaatgaataaattgattttaaaatttatatgtaaaaataaaaattttagaatggttaagatatttattaagaagggaggaatattttttttgcgagatgtgaagatttattataaaattggtgattaagttggtgtcgtgtggtgtaaggagaaatagtggattagttttgaaatagagttatgtatgtgtgggtttttgatttatggtagtggtggtttgtggagtaatgaggaaaggttagttttttaaataaatggatataggaatgtttatgtagaaaaaagtgaaatttgattttaattttatattatatataaaagtgaatgttagttgaattgttgtaaatatataaggtaagttagtaaagttatttgaatataatataggagaatgtttttatgatttttggggtagggaaggatttttttaaatataatataaaaaaatatttatttgttggatgtggtggtttatgtttataattttagtattttgggaggttaaggtgggaggatcgtttgaggttaggagtttaagattagtttggttaatataatgagattttttttatttttattttaagaaaaaaaaaaattattatagaagattgattaattttgtattaaaattaagaaatgttgtttattttaaaaaattaagattaagaaattgaaaagataagtatagatgtgagaagatatatgattgaaaaaaaattttttgtttagaatatgtaaagaataatagttaagaagattataaagatagataaataaatagttaataggttgttataggaggatatttaaataatttataaataggaaaagtgtttaatgtcgttatttattaagatagtgtaatttaaaattgcgacgaaatattattttatatttagtagaatggttagaaattaagttgttggtgatattaagtgttggtgaggatgtggaattatttagaggtagtttttagatgtgatttttcgtgtattggaattacgtagaggtagtttttagatgtgatttttcgtgtattgttggtagttgtataaatttgtagaaacgttttggtaaagagtttgatattatttattgaaatataatggatacgtttttatttttagttgtttatttattagaaatatatgtataggggattcggagttgcgtataggaatggtgatgattgtgtgttttgtaatagattgaaaattaaaaataattgaaatatttattaacgtaatgtgatatagttatataaaggaattttatagtaatgatggaaggagttatagttatatatagtaataatggatgagttttataatattgagttatagaagttagatatagaagattttaaaaaataggtaaaaataaattgggagttttagggtgtatgttttagttggtaaagtaagaaagtgattattgtatatgttaaagtagttattattggtggataggagggatattaattagttgggggtgtgagaagtttttgggatatagagagaatatgattgataaattattgagttgggaaataaaaaaagaagtaaaggaattagtatagtatcgggtataagtttttttattgttagtatttagtgtggaaattagtggaaaagtgtttttaaagtttttatagaaaattgattttaaatttagaaaatttattattaattaagggtgggggtagagtaatattatttattttttatgtatttttttttgaggaaattttttgaggatgtattttagtaagagaggtaatataagagcgtaatgtaatgaagtagtggggattgtgaaaagaaattttaggatggtggttgtatggtaggttttaaggaagttgtaagaagagtgtttgtaaattatgtggaggagatgttagataataataatgtaagaagttaggaagtgttagtgataggttaaagagtgtttgtaaattatgtggagtaggtgttatataatagataatgtgagaagttaagatgtgttaatgataggttaaaattggtattttttattagtaaaaattaataataatttagaatgtaataaaatttattatttattagaaatgtgtggggaaaattagaaaaaattatggtttaattatgaaataaagaggatatgatgtttgagtagttgatgaaatataagagaattttttgtttttgattttggaaatagttttatttttttatgagtggtagtaagagttatgtgatttttagaaaatgaaatgtaattttaattttggtcgttagtgatatttatattgtatatatatatatttatattttatgtattgatttttaatttttagaaatattttaaagaagaaatatagaagatttagttatgaatatatggtaaatggaggagaaagggatggaatagttttattttacgtaagtagaagttaagacgttttttttagagttgaagaagcgtgaagattaggggtgttatttaaagacgtaattagggaaaatttaaaaagtagaataataaaaaaaataggaggtgttggcgattggggattttaaggaagtggttaaatatttagttttcgtaatggggagtaggtgaattatttttaaagttgataaatgaagagatagtgataataatgtattttttgagtgatcgtaataattataattaggaataattgaaggtagttttttatggagttgagttataagtggggaagtttatgtttatttagatgtttagatttggtttatttgttttgttttagttaaaaatttttttaaaatgataaataaaaattgtatatatttattatgtttagtatattgttttgaaatatgtatatattatggattagttaaattgagcgaattaatatatgtattattttatatattttttaaaagtttttgatgagaataaatttatttttattaatttttaagaatataatatattgttattaattgtagttattatattttatagtagattttttgattttattttttttatttaattgaaattttggataaaaatttttgatattaaaaaagtgtgtttgtttttaaattttttttttttttttttttttttttttttttttttttgagattttgggtaatagggttttagtttgttatttaggttggggtgtagtggagggattagtgtttattgtagtttcgattttcggtttaagtagtttttttattttagttttttgagtaattgggtttatagatatgtattattatatttagttaatttttgtattttttgtatagataaggttttattgtattgtttaggttggttttaaatttttgggtttaagcgatttgtttgttttggttttttaaagtgttgggaatataggtataagttattatatttggtttatttttaaatttttgagtttgagaagtatataggtataaatatatatatggttatatgtatgttaatgatttgttttataagtggatatattttttttattttataatttatataaatggtgtaatttgtatatgaatttgtggatttatatatgtatatagatagatatataatatgaattgaattaaagtaaggtagttttttaattaaatgttataatagatagtttttaattttaaaatagattgaattaggttcgagtttggtaaaagtattaatagaagagaataaatgtaaataatgttataaatttaatggaataaagaaatagaaatagtatttaaattagtgtttaggtttttaggtggtttttagtagttgttagtttttatgagtagtttagaggtgataatataaatgatattatttagtattagtttgaaatttaaaaatgtgtaattaggttatttgattttttatgtttattttttggaggaaaatgaatagaattttaataggaaacgagatgttggaaatatagtttgtagattttatttttattatagtagtaggaggagatagttttaaaagaattttatatagtagttgtttacgttagagattttgtattttgaatatttattatgagttgaaattttggttttttttttttttagatattgttatttgtgaaaaaaatatagtgatttaaaatttagatttattttttttatgaatttagttattttttttattgtgatattttaaaatatatatattttaagataggaaatagtgattttgtttttaattttttgttatgtttaaattgaagattttattttttgattggttttatgtattttatattaaattatttggttttgaatgtaatttaaattatgaaattttggtgtgtgaaggattgttgaattttattttaattgtggttgaaatgtgtttttgtaaaggagttagtatatgttgtagttttagataatttattttgttttttatatgtgtaagtattttgaatgaaataagtagatttttttttgttatttattaaaaagatgatatatttaatgtatattttggtattgttgtattttttaaaatcgttttaatggattgtgtattatattttttaattttagt

SEQ ID NO: 388 - DNA, 16228 bp, Artificial Sequence
  chemically treated genomic DNA (Homo sapiens)
attagaattaggaaatataatgtataatttattagaacggttttggaaaatatagtaatgttagaatatatattgaatatattatttttttaataagtaataaggaaaaatttgtttattttatttaaggtatttgtatatatgaagagtagagtgagttgtttaagattatagtatgtattaatttttttgtagaggtatattttagttatagttaagatggggtttagtaattttttatatattaaggttttatagtttagattatatttaaaattaggtaatttaatatagagtgtataaaattagttaagaaatgaaatttttagtttaaatatgataagaagttggaaataaagttattgttttttgttttaaaatgtgtatattttggaatattatagtagaggaaatggttgaatttatgaggagaataaatttaaattttgaattattgtgttttttttataaataatagtatttaaaaagaaaagaagttaaaattttagtttatggtaaatgtttaagatataaaatttttaacgtaagtaattgttatataaagtttttttagaattatttttttttattattatagtaagaataaaatttataggttgtgtttttagtatttcgttttttgttgaaattttgtttatttttttttagaaaatagatatgaagaattaagtagtttgattatatatttttaggttttaaattggtattaaatagtattatttgtattattatttttgggttatttatgagggttaatagttattaaaggttatttgagaatttaagtattgatttaaatattgtttttatttttttattttattgagtttataatattgtttatatttatttttttttattaatgtttttgttaaattcgaatttaatttaatttgttttaaagttgaaggttatttgttgtagtatttggttaagaagttattttattttaatttagtttatattatgtgtttgtttatatatatatgtaaatttataggtttatatgtaaattgtattatttatatgaattataaaatgagaaggatatatttatttgtgaaataagttattgatatatatgtagttatgtatgtatttatatttatatattttttagatttaagaatttgaaaataggttaggtgtggtggtttatgtttgtatttttagtattttgggaggttaaggtaggtagatcgtttgagtttaggagtttgagattagtttgggtaatatagtgaaattttgtttgtataaaaaatataaagattagttgagtgtggtggtgtatgtttgtagatttagttatttaggggattgaggtgggaggattgtttgagtcgggggtcgagattgtagtgagtattgatttttttattgtattttagtttgggtgatagattgagattttgttgtttagggttttaaaaaaaaaaaaaaagaaaaagaaaaagaaaaaaagaatttgaaaatagatatatttttttggtattaaaagtttttgtttaaaattttagttagataggaggaataaggttaggaggtttattgtgagatatggtgattgtagttaataataatgtattgtatttttgaaaattgatgagagtagatttgtttttattagaaatttttaaaaagtatgtgaggtaatgtatatgttaattcgtttaatttagttagtttataatgtatatatattttagaataatatgttggatatgataaatatatataatttttatttgttattttaaaaaagtttttggttaaaataaggtaaatggattaagtttaagtatttaagtgggtataagtttttttatttgtagtttagttttatgaggaattatttttagttatttttggttgtggttattgcggttatttaaagaatatattgttattattatttttttatttattagttttagaaatgatttatttattttttattacgaaaattgagtatttggttatttttttgaaatttttaatcgttaatattttttattttttttgttgttttgttttttgggttttttttggttacgtttttaagtaatatttttaatttttacgtttttttaattttgaagggaacgttttgatttttgtttacgtaaaatgagattgttttattttttttttttttatttattatatatttataattaagttttttgtattttttttttaggatgtttttagaagttgaaaattaatatatggagtgtaggtgtgtatgtgtataatgtaaatattattaacggttagagttgggattatattttattttttaaagattatatggtttttgttgttatttataagagggtgagattatttttaggattaaggataaaggatttttttatattttattaattgtttaaatattatgttttttttgttttataattagattatgattttttttagttttttttatatatttttaataaataatagattttattatattttagattattattagtttttattaataaaaaatgttagttttagtttattattgatatattttagttttttatattatttgttgtgtggtatttattttatatgatttgtagatattttttagtttattattggtattttttagttttttatattattgttgtttggtattttttttatatgatttgtagatattttttttgtagtttttttaagatttgttatgtagttattattttgggatttttttttatagtttttattgttttattgtattacgtttttgtgttgttttttttgttggagtatatttttaaggaatttttttaagaaaaggtgtatggaagatagatggtattgttttgtttttatttttgattgataataagttttttgagtttaaaattaattttttgtgagaattttgaaggtatttttttattgatttttatattgagtgttgatagtgaggaggtttatgttcgatattgtattgatttttttgtttttttttttgttttttagtttaatgatttattagttatgttttttttgtattttaaaagttttttatatttttaattaattagtgttttttttgtttattagtgataattgttttgatatgtataataattatttttttgttttattagttaaagtatgtattttggagtttttagtttatttttgtttgttttttgaaattttttgtgtttgatttttgtggtttaatattatgggatttatttattgttgttgtatgtagttataattttttttattattgttataagatttttttgtataattatattatattacgttgatagatattttagttgtttttagtttttaatttattatagaatatatagttattattatttttgtacgtagtttcggattttttatgtatgtgtttttgatgagtagataattaagagtgggaacgtatttattgtattttagtagataatgttaaattttttgttagagcgtttttataaatttgtatagttgttagtagtgtacgaggggttatatttgagagttgtttttgcgtggttttagtatacgaggggttatatttgagagttgtttttgggtggttttatatttttattagtatttggtattattaatagtttagtttttaattattttgttgagtgtggaatggtatttcgtcgtagttttaaattgtattattttgatgaataacggtattgagtattttttttgtttataggttatttgggtatttttttgtgataatttattgattatttgtttgtttatttttataatttttttgattgttgttttttatatattttgaataagagatttttttttagttatatatttttttatatttatgtttatttttttagttttttgattttggttttttaaaataaataatattttttaattttaatataaaattgattaattttttatgataattttttttttttttaaagtggagatggggggagttttattatgttggttaggttggttttgaatttttggttttaagcgatttttttattttggttttttaaagtgttggaattataggtatgagttattatatttagtagataaatgtttttttatgttgtgtttaaaggagtttttttttattttaaagattatgaagatatttttttatattatgtttaaatagttttattggtttgttttatatatttatagtaatttaattgatatttatttttgtgtataatatgaggttggggttaaattttatttttttttatatgaatatttttatgtttatttatttaaaaggttagtttttttttattgttttataggttattattgttataagttagaagtttatatatgtatgattttgttttagggttagtttattgtttttttttgtattatacgatattagtttgattattagttttatggtaagtttttatatttcgtagagggagtgtttttttttttttaatgggtgttttgattattttagggtttttatttttatatataaattttaaaattagtttgtttatttttttgttttttaagacgattgagatttgattgtaattattttagataagtttgaaaaatgatttttatggtattaaatattttaattttgaaaattagatattttattacgattttagttttttttattttttttaatttttttagttttttgtatataagttttttatattgttagattttttttttagatatgataatttaaaagtttttattttattttaagtggtattttttttaaatttttattttttatatgttgttagtatataaatatgtaattttgtagggggaggggtatatatattgattttgtattttgtaaaagggttaaacgtatttattaatttaataaaacgtagattatttaggtgggtttatttttattacgagagttttttaaaggtagagtttgttttggtttatggaaagggtggaaaattagggagatgtgagtatgggaaggattgggtatgttattgttgttttgaagatggaggaggttatttgagaaggaaaatatgtagtttttgggagtagatagtagcgtttgattgaaagagattaagagattgggaattatagatttaaagttgtaaggaattagattttgttaataggttgaaggagtttggaagtagatatttttttagaatttttatttgtgagttgagtttagtttagtcgaaattttgattttagttttgtgagatgttgggtaaagaatttaggtaaatttatttaggtttttgattatagaattatgagataattaataggtgttgttttaaataattaagtttgtgttaatgtgttatgtagtaatagaaaattaatattttttttgttttgggtttttttattatttttgtttttgtagtttttattttggatattttttgttgattttttttttaggttattaaatttttttttagttatatttagtatgttgttatatatattaaatttataatttaattattatagtttttatttttagaattttgatttattttttttaaaagaagtttttatttttttattaaaatttttaattttgtttttattattttgaacgtaatattatagttatttaaaaatgtggatttaataatgttaatattttttatggatttgttttttttgtttgttgtttttgtaggattttatttatgttgttatatttttttgtgtgtttagattgggttttgtacgtataaaattgtttgttatttagaaataattttatttaatatgatgttgtttttttttataaagaatttaaatttatttttattaggtatttgggggtattagtaatttttgtttatttttatataagtttagtaaatgagatgataatttgaagttgagtggtagtgtttataagggttaatttttgagttatttttatttttaggaagtagttttttattggttttaatataagtaaaagaagtttgttatataatattagagggttttggatttttatttttgttttttagttatagggtagtttaaaatatttttttaatagttttttttagaatttttaaatgtttttaagggaaagatagttttatatgttgaagttttttttattaggtttttgtgtttttttagattttgatttagtaattttttattaatttattagttttttaggggaaaatgttgagtatgggggatagtgggaatgttggtagaaaattggtatagttgttttataggtatatttttaattaatagttttagttttagttatttattttattttttttttattgttatttttatgtttatagtttttgtagttttattatagttaggtttttttttttacgtatatattttagttgtttatttttattttatttgttgttttatttgtattataagatttaagttattttttatattttataaatttgttaaaattgttttttatttattattgtttttttatttttgtataggtgttcgggttattattttaaatgagaagttttaaattatttattttataggtgaaaatattgaggtttataaagaaattgatttgttttgtttataaagaatttttcgttgaggaaaagagttggatttagaatttaagttttttgaattatagttattttgtgttttaaattatgttttttttattatagaaattttgttgtgaatattgttatgtttttatttatttatattaatagaaaataaattatgttaagaataggttagtatttatgtttatatagaatttgaggatataaaaaggaatacgttatattaattattttatgttaaggttgtaattgttatttttaagaatcgttagatttaatattgaatatttttttaaaggttaagtattttatagaatggtttcgtaaagtaaataatttttattattttggttaaatttgagatttttgaaggagaaagaaaaattgaatatatgtatgaaagaaatgtatatatattttttttattagagttttaaaattttataattatttaattgtattataatatagttgatatttatgaatattttaaaattatattttaaaatttattttaggttaggcgcggtggtttatgtttgtaattttagtattttgggaggttaaggtgggtagattacgagattaagagatggagattattttggttaatatggtgaaattttatttttattaaaatataaaaaattagttgggcgtggtggcgtatatttgtaattttagttattcgggaggttgaggtaggagaattatttgaattcgcgaggcggaggttgcggtgagttaagattacgttattgtattttatttggtgatagagtaagatttcgttttaaaaataaaataaaatattttaaaatttaaaaatttattttttaataaattttattaatatatttaaaggaataaaaataaataaataaattaaagataattataaaaataatttaaaattaggaattagaatatttttttttggttttagtttttttatttaattttgtataggttataggttttatttgtacgttggtttatttgtatatttgttttttataaagttttaatttaaatagaagattaattagttgtataaattatatattgttgttgttatattttttaaaaatgtagaaatatatatgtttgtgaattagttttttattgttattgtaataagtaattattaatttattgttttaaagttatataaatttattattttatagttttggaggtgagaagtttaaaatgtattttatgttttaagaggtaagtagggttgcgtggttttttttgtaggttttggggggagtttgttttttgttttttttagttggttggaggttttttgtattgtttggttgtggttttatattattttaaatttcgttttgttattatatttttgattatgatttttttgttttttttttgtaagaaggatttatttaattaaatttgggataatttttttattttaagattattaatgtaattatatcggttaaattttttttgttatgtaaagaaatatataaattttagggattaggacgtggatattttaggcgggattattattttgtatgttatattttttaaagaattattgatagatgatttttaagtataatagtgatgaaaggaagttttagattattaattaattatataatgttaatattttaatacgaaatatgatagaaaatttaattttttttgttagtgttagttaatttattgttgagtttatttttggaaaagtaagttttttttttttttttgaaacgggaatgtgtcgtaattagattattttttaattttatttggtgttttatagtttggtgaaggatatagagaaaagagaaaggtgaaaaggaagcgaaaattatttataaagtgtttattttttttattagaatataagatagaaggatattataaaattgaaagttagttatagttataaaaattgaaattgtttttgaatgtaataattgttttatagagataaatataattaaatgaaaattgtttaataggtgtttagtgaatatttgtttattattattaagattttaaatagaaggtgggttagaggttttgatttattaaagtattagtggtttaaagtttttaataagttttttcgtggtataggtaataaggttttaaaggtttatagtttgttttggttttaggtttattattaatatttcgtgagacgggagaagtaagtgagtttttttagtttttcgatttattattagtgagggttatggtagagtttatggtgattttataatatatattatttatattattattaatttttaaaagtaagtgaatgatatgttagttgggataaatgaagtacgtatttaaaatagttatttgtaggtcgggcgtagtggtttatgtttgtaattttagtattttgggaggttaaggtgggtggattatgaggttaagagatcgagattattttggttaatatggggaaattttgtttttattaaaaatataaaaattagttgggtgtggtggcgtgcgtttgtagttttagttatcgggaggttgaggtaggagaattgtttgaatttgggaggcggaggttatagtgagttgagatcgcgttattgtattttagtttggtgataaagtgagattttgttttaaaaaaataaataaataaataaaatagttatttgtttatagttataaataattttttaagattttcgatatttttttttttttgtttttttttttttttttttttttttttttcgtatgtatatattaaattatttgttaaatttatgtatatattaaattatttgttaaattattatttaattttaaataggagatgggttataaattaaaagaatgttttgttgtttataattttttattattattaaagttttttaatttgaattattttttattaattttaaaatttttttttttttttttttgagacggagttttgttttatcgtttaggttggagtgtagtggcgcgattttggtttattgtaatttttattttttaggtttaagcgatttttttgttttagtttttcgagtagttgggattacgggtgtgtgttattatatttggttaatttttgtatttttagtaaagacggggttttattatgttggttaggatggtttcgattttttgatttcgtgatttgtttagtttggttttttaaagtgttgggattataggcgtgagttatcgtgttcggttatttttaatattttttttggtatattggatttaagtgtcgatatagtatgtgttattaggaagttaagattattattattttagatgtaagttgggtattttttttaaatagtttttttttcgttttagttttttaaagaagttttggattgtaatttttttttagtttttagggtttttagtcgttagggttgaaaaaaataattgtttttttgattataggttttcgtaataaaggattagttaaaaattatcgttaaagattttttaaatttaatatttttataaggaaatgtaaattattttattagagtatcgaaaagagttttttttttttttaattttttttgtttattagttgtaaatacgcgatgtttaattgtattacggtttttttaggcgtaaaggtaattttgtttttattgattaaaaaaaaagaaaaagaaaaagaaaaaaaaaagttttgtttagaaaaataaggggtaaaaagtgtgggaagtgttgatagttgtagtttaggaaatatgtgaagagttttattttgagttggttcgtgatgttgcggcggttgatcgttttattatgtaagagattaacgtttagggttagattaacgattttgacgttttgggttggatatatagttgaagtgagatattaaggaagagatggttagtttaattttttatatagtatttttttttggttaatttatggagtgataatgatattgattggttttattttgttaatgaatggtaaggtattgtaatgatggcgtttggaaatgaataggagtgatcgggaataaaaggggaggggggaaaaggtggttatgatgaagaaatgaataaaattttaaatttttgttataatttattgttatatttattattttgatattataatgataggagaaatgaaaaaaaaaatgaaaggaaaaagaaataaataaaaaagaaaatttgttatttatttaaatttttgtagtattttaagaatatgggtttgtattttatagtttgattatatagaattagagtaagtagttgatttaatttagtttataaatttataatagagttttttttttaattattaatgtttttaaattttgatattttagttttattttttattatagtaaaaatttaatttacgttattaaaatagattatatttattaaataattttttgggttttagagttaattggttttagttgttggtaacgttttaggatagtgaaggttgagtttgttatttgtatattataaaattgattgttatatttattgtcgtttatgatgtagcgttttgtaatatttcgaagggtgggtaagttttagatttttttaaagaaaaatagaatgaacgtgtatttttatcggaagtatatacgtagtttacgtaagagagttttgaatttattggtatgtaagataatgtggttgtaagttgataaagttaatttgattaagttttgaatttaagtaagatataaaaaaatgtagatattttagtggtattagattattatgaaaggaaggaattttgaggtttagtaagattatattttaaggggttggattagaaaataattatttttggagaaaagaatgtatgtattattattggttatgaaaagattatattattttgtgcgttttattagtttgttttttgtgggtaagttaggtgtaaatggtttatttatatttagttgtttagagacggaggtattgttttaaaaatgattatttttagaatgtttaaagagaagtaaacggattagttttttgtttagtgtatagattttggttgaaatgatgaattaaaaagtaagatttatacgttaaagtgataggttgttagaggtttggtggtattagtgtgttgtatgtgtttaagtacgtgtttttgttttaggaggtgggttttagagttggtattagttggtatagttttagagttttatattattatcggattttagggtagagatttgtatatgaagaattttgttgtgattgatagtttattatagtaatattaggaagtttatttattatgtttgagtgtaggttagtaggtttagaaagtagtttttttgtggttgaggtataggttgagattgttgttttgtaggagtttggatgattttatatagaaaataagtaaataaattggtaagtggtttttaggttcgtgtttggttatgtttatttaaaagttagtaagttatttattttggttttttaaaattatatagttaataataaaattatataggtaaatattttatatcgtttaagattatagaatgtattttatagttttgttaaattttttgtttttatgttttagtatttaatatttaacgttaatttaatgagatttttgtggtgatgatttatattttaatataaatgttaggattttttttaaatatggaaaaaatggattaataataagtttaaataaagaattgagttaaattaataatttttttaagtgattattgttttacggtttttttttcgttttttgggtggtggttgtagtgtggttgttattttgattatttttgtcgaggtgtgttagcgtgttagttagggagtgattttagtgacgttatagcgtttagatgttggataaatagttgtttatataattcgtatcgtaggagttttagtttcgtgttatttgggagtaatttagggttgagtgagttggaatatttgtttagtttatattgttgtgagaaggggatttaggagttttttaggttggtaggttattgtgttttaagttataggaggtgcgaggtaggtttgttttgtttatggtattttatattttaaggataggaggataggaagttggtttttggggtattgtgagtatttaataaatttttgttgatttgattttttatagtgttgttttattttattgatatttaaaggaagattttttttaaagattagtttatttatagtttgtaagaggttgaaataattttatttaatatttagggggtatttttatgtacgaaagtggtaagtatagtaaaagatatgttatagttagttagtaattagttttgaaataatatgtattttattatttgggggagaagcgcgagtagtgagtttattatttatattataagttatagtgcggtaagggttataagtataatgtaaataaaattaaaaggtaaaagagattttatttattggtaggggtagaagataaggacggttttaaggaggaggcggtattcgtttttagatttttttgttagagatggatagtagagttatagagtttaaattgattgtgtttagatatagcgaattgttgagtttggttagcggggtataagtgtaaaggattagagataatttagtaaaaaggtaggtatttattattatttgttttacggagggtggttgtttttttgttatgtcgttaatatattagtaatatagttatttgtaagtatgtattgagtattcgttgtggatggtgaggtattatgttaggatattcgtttgtttttagtgagcgtatatttaggaggaggttttgtatattaagggttttaaatttagtagggtgaagaagatttgggggaatgggaggagaagtagtagaggcggaggtatattcggaatgtgataagttattagggatttgttgggtagagggcgagtgaagttggagagagaaaaggaggttagattattatgagttttagaagttacgtagagtcgtttggttttagttttgagggttgtggaagtcgttaaaatattagaggtgcgatataggcgttgaggtgttttaggatttatttttttttttttcgtttttataagagaagtttttttttttttttttgttagataaatggttgtttaattagagacgacgtttggtagtttttttagtagttaggtatggttagatgattaagttttgattaataagatgtgggtagaagtgatgtatgtaatttttagattatttttatttttttttatagaaagttgtttgttttttaattttttttttttgttgttggttgagggattagttgttatagatttagagatggaagttatatgttgtagatggaaagttgtttattagttggattttttaattattttatggtatagagttattttttatttaggatttcgtgtttacgttgggattgatagattaattttaattttgttgattaattttgtaattttttttgttataattgtttttaatttatatttggattatgataatattaggttaatttttttaaatttggggagtatatttatttatattaggttttagaattgtaattttattttaagatttaaaatagttcgggtatggtggtttatatttgtaattttagtattttgggaggttaacgtgggggaattatttgaggttaggagtttgagaatagtttggttaatatggtgaagttttatttttattaaaaatataaaaattagtcgggtgtggtagtgcgtgtttgtaattttagttatttgggaggttgatgtaggagaattatttgaatcgggaggtggagattgtagtgagttgagatcgtgttattttagtttgggttatagcgagattttattttaaaaataaataaataaaaagatttaaaataattataaaattaaaataaggtatttttattatgtaggagaaaaaagttatttaagtgaaaatttgttaaagttattttttttgttaagtttgggttttgtgagagtaagagaaagaaatttaaggttatttgagaaggtgtgtaatttagttatttatgagttaattttattgagatgatattttaataaaatggattattaattggggtttagaaaatagttttataaatcgggaagtataagaattttttatgaaattatattagtaatatattaaagtttgtattcgttgtttttattttttatattagtcggtgttggttttttttttttagtttttaggttgtgttgttattattcgtttagtatagggttttttttttgttatttgtgtatttagtagcgttcgttaggttgtattgttatagtttttgtagggtttgttttttttttaggttatgagtaatttaaaattgggagggaacgttataaggaggttttttggaggaggtaagatttgagtttaagtttgtttatagtatcgatcgaggtatgaggaaataggtatttttatatacgttagtgagagttgagaagtggtaaaatatttttttagatggaatatagatttggttaataaaaatgttaattgtatattttaaattggtaaatataattttttaagtgtatttgataaatacgtgtataagtatttaaatatatttgtgtaagtatgtttgtaatattttttgtaataggtaaaaaattagaagtaatttaaaatgtatattgtggatggattgaataaattatggtatagaagtataataaggttatttaatagaatgtaaggattttatgtattaatgtggaaagatgtttaagatatagaaaggaaatatattaagttgaagaagagaatatataatgtttagttacgtaaatatatatatacgtatatatacgtatatatataatgttggtaagtagagaaatagtgggaaatgagaaattttttttttattataattttttattttgttttttaaatgtatatattttatatttaaaaattgattaaataatatatgttaaatgaaaagttgtagaatgattatttgatatttgtatggaagacgggttttaggtagataaggttagaggtatgagagtgggtttggttttgaggtatatatttattaatatttttataataattagtgagaagtatattattattttcgttttgtaaatgaggaaattgaggtttagaggaagttgtttagtaaggaagttgtttaaatttttagtatggtttagatttgaatttaggagtgttttattataatatttaagttttttttaaagtattattttgatatttttttagaaagtgaagttatttgtatatgggttggttaggattagtatatagttttgtatattttattttgttgattttttttattaaaatttattaaaatatttttttttttaacgatgataacgatttagtgatttatagatttaagtgaattttttattatattaaagttttagagtatttaggatatgcgatatttaaattaattaattattgtgattaaaagtagatttttataattattttttgttttaatgtttgtt

SEQ ID NO: 389 - DNA, 19380 bp, Artificial Sequence
  chemically treated genomic DNA (Homo sapiens)
atttttaataagggattgttgttttattttttatggtattagagaaataagttttttttttaagtagtaataaaatttttgaggaattaatatagttttattttgtaattaatttttagtatatattataatttttagtgaattttaaataatttatgataaaattattaagaaaatgttaaaatgtaggggaattattttgaattatttattttttatttgtgtattgttatattagattattgatttaataatgtatgtattgttatgaatatatggattgaattttttagggaattttatattatagagggattttgttaaattttttagagtttggaatagcggtttttgtatatatttttgttagatattttaatagaacgtataaaataggaagattataattttttgtgtttgaatatgtaaagggattttttagattaaaattatgttattgttgttttaagttttaaaatggttttttgatatttttgattagtgtttttttattatgtttgttgtttagttaagattatttttttaatttttaatagtatgtgtggaagatgaaaaataaggggataatttaaaggaaatggtaagaatttttagggaaaaaaatggatgaatataaaatgattttagtttaaaagaatattggaaagaagttttaaggtgtttgtatattaaatttttgtttatttttaattttgtttttagttgtttgaaattatgtttagtaatttttttgtggaatgttggtaaaatttataaatataattattagattattggaattaatttatattagatttatttttttataatagtatttttgaatgtagttaatatataattaaaatatagtatacggaattataagtttttagaattttatttttaaatatttttttgttagtatttttttgaaggattttaaatatatttgttttaaattttttttttttagttagataagatgagtgaattaaagattgattttagttataattttaaatttttttatttgtaggtttgtataattttttaaaattattttaaaatattttttgtggtttgattatgtttttttaagaatttagtacgtaaatgttatgtgtgtgtttacggaatttgatagtaatgtagtttgttgttacggtttttttaattttattataagttatttaaaaaattatatttgaaaatatttgtgtaattttttatttttgttttttttttttttttttttttttgagatagagttttattttgttatttaggttggagtgtagtggtgtgattttggtttattgtaatttttgttttttaggtttaagtgatttttttgttttagtttttcgagtatttgggattataggtatttattattacgtttagttaattttttttttttttttttttttttagtagagacggggtttttttatgttggttaggttggttttgaatttttgattttaggtgatttgtttattttagttttttaaagtgttgggattataggtatgagttattgcgtttagtttgtttgtatttttttaataagtaaaagtatgattttttttggtaattttgttttttattgttttttattatttttttgtttaaaatttttgttgttttttgtataaatttagtaattttttgatttatatgtttttgttttggtcgtttttttttttttgaattttaattttagttatggttaagttttatttattaaagggttatatataaaataagaaattaattttttattgtagttgaagtaatttggttattttttaaattttttttttttttagatatttaatattttttattttgtatttatgtatgtattatttttttaataatattttagattttattagtaaatgatttgtaatgttgggaagaagatgtatatatatatatatatatatatatatatatatagtgtttaaaataaagatatattttaaatgtttaataaaagtaaataatatattgtataaaagttgaaatatatagttttattattatatattgtatatatgtattaaaatattatattgtacgttataaataagtatgattatatgtttattaaaaataaaatataatttaataaaaaaggagagatatatatagtttttaatagagtaattattagtttattgattttggttgttttggtaagtgaataaatttttatattttagagtgataaggaattatgaattgtttttatttttagtagttttgattggtgttattatgttgaggaggggagagggttagtttgtatttagggatgaaaaggaagaatgtagtaagttttttttggtttgggtggatattagaatttatagtgataggatagggatagggtatagtatttaggtttttaggtggtatttaggtttttgtgttagttgtgattcgtaattatttataaatttgaaatggtaatagttatatttaaaattataattttgtttttaaaagaaagataatttggaattagttatgatagttagaattttagttttttaatttagattcgggatttaggtattggagaattggatagaaagtttagtaagtagaattaattaaaatagtgggatggagattggtagtagtgagcgaaagaagtgttagagggatgttatagtattatatatgtattagtttttaagagaagaggaagaatttggaaaaaaataaaaaatcgagaaggcgtagtttttgtgtttgagtattttagggtttagtttttggtttttattttttttttattttaattttttttttttttttttttggtgattttattaagttatatggttttaaatattatttagtaggttagtaatttttaaaatatatttgtagttgtgatttttattttatattttagattaaattgtttaattgatatttttatttaaatgtataatagatattttaaatgtaataggttttaaagttttaatttttgttattattttttaatttttattttagtagtttgtattattttagataatttttgttgatggtattttgtttttttaattatttagattaaaattttgatgttatttagagttttttttttttgttattttatatttagtttgttaggaaattttgttgttattatttttgaaatatttttagttattagtaggtttttattatttttattgttattattgtgtttattggttattattattttatattagattattagtgcgttgtttttttaattggttttttagtgtttgttttttttagttgataatttgatagaaattgattttagattgttttgtgatatttgtgatatgaaattttatggttttgaatggtatttttttgtaagggaaatattgttttgttttgttagtttttttttagttagattgtgtgttgtttgtgtatgaaataattaagaggcggtttttaatagaaaatttgtatagtgattgtaaaatacgataatatatatttaagattatgagttgtgatgatttattgaaatgatttattgaaatgtatttggtaataataattgtgagttaagttttagaagtttgatgtatgattggttaaggttttgaggattattggtttataatattattttagtgtaatttaagatgtgttgattgattaaaagttgtatttaaatatattttttttttttgatattattattaaagatatgttttagatttataaatatgtaggtttttgatttttaaaggaggaatgatttttagtagtttattttttaattataagttatattttgattatgtagatgataggtagaagttaaaaagttagaatgatttagttttgatttaaaaaaaatttagttttggttgtttttaggaaagtatagatattgtatgataaatttttttatgaatttttgttaatgttttattatttgatagagtgatattagtataatttatttagattgaataatggaattttagttataggttttttgtgatttttttatagttattattttgagtttataattaagtttatttagtagtttttttaaaatttgtattaatttattttttatatgagggataaaataaagtttattttaattagtttgttttgttgagtttaatgtatagttttatttttaggtggaggtttattggtgtttagggaatgtatttgtgttaatatttttaggtatgagtttttaggtatttatatagttaagtattaaaataaaaagttaagggattttattgattatatttggtagtataaaataagttgtttgaaatgttagtgaaataatgaataaatgtaaataagataaaatttaaatttaagtaaaatatatatttcgatttaagatattttattgtagttagaaattttgtgaatgtttaataggaatttttaaaggaattgatttttatttattttagaatattatagtttaaatcggaattttaatttgggatttataaatgggttataagtagatttataaaattttagaatttatatagagttttatatttatgggtaatgtttttgagagagaaattatattttttattaattttttaaaggaatgtataatttaaaaaatattaaagagttattaatttttatttatatttatatgttacgttgataaaatatttgaattaagtttaatttttaagaataatgaaagggttttatttttagtttttaggatttattatttagattttgaaagattaagttaaattaaggtattgttgttaataatgttatttgttgtatttgtatgaaatttaatttttttgtagtatgttgatttggtatatgttaattatttattaatatttatataaataggttgtattatttattgaagtgattgttgttttttgtgattataattttaagtaatttttttttttttttttattttttattttggtgtaattataaattagtaagtttagttgattttgttgtttttggttttattatttttttatggtttttgttgttgttgttatttggtagtgtgttatttatagatgaaaatatttttaattaggattttcgagtatttattgtattagaggttttttaaaattagttattaattttttttttagatgttgaaaaggtaattgttaaatttttttgtttgtttttttatttgggtggggataggttaaataaagataatgggttattatgttttaattttttgaaaaatttattgagttttaaatgatcgtgtattttaagaagtttagttattttatttaagaatttaaaatagttttataaagatttatggatttgagaaatatatgaaaaaaattaattattagaagtatatgtttataaatatttattaaatatttgttttgtataaaatatcgtgtttgaggaagatatagaaataattggaaagttgattttgattaatatgtatagaataatttgtaatagtaatttttattttttttggtattagggattggttttatggaagatagtttttttaaggatggggtggtgggggaatggttttagtaagaaattgttttatttagattattaggtattagatttttataagaagtatgtagttttagttttttatatgtgtagtttataataggattcgtatttttatgagaatttaatgttaatattgatttgataggaggtagagtttaggtggtaacgtttatttgtttattgtttattttttgttgtgtagtttgttttttaataggttatgggattggtatggggttggaggtgggggttggggatttcgatttttaatatatggtaggatgaaataaatgttatggagagtgatagtattttgagaatgtataagatgagtaattaatttttagtgtagaatgatattatagagaagaggtagttatttgtgttaggttatgaagaatgaatagattttagataaataaaaataggtagaaagggtattttatttagagtaattggtatgggtaatgataagaggtaagaaattgtttattgtgattggggaatggttggttagattggttaggttagaatattattatttagagggatgtggttaaaggaaggaagaaaggttttaggttagaaggaggatgatttttgaatgttagaatttgaggttttttttttaggtagtggggatttattatatttttaggagtatgattgatgtaatttgtgattttggaggttaaatttgataaaagtagataattatgggagaaggaagattttgtgagtttttaattggggagttgttgttgttttgttttgttttgagacggagtttcgtttttttgtttaggttggagtgtagtagtataatttcggtttattgtaatttttgttttttgggtttaagtaatttttttgttttagatttttaagtagttggattacgggtatatgttagtatatttcgttaatttttgtatttttagtagagatggggttttattatgttggttaggttggttttgaatttttgattttaagtgattcgtttgtttcggttttttaaagtgttgggattataagtgtgagtcgtcgtgtttggttagggagttttaatattttgtggaaaagaattgaaaatggtataatgatttatttgatggtataatgaagaagtgaaggtttaaaatagaagtatttagtatgattatagtgatataattgattttagaataagatttaattttattgttaaagttatgaaaaaatttaggtatatatattgtgttttatagtagatattaggtaattgtgttatatagtaggttgtgggtaatttagtattgtggggtattttagagaatttagaattggttatgaatatttttttttatatgttattttatataagtgtaaaaattaatttagtaattttttaatagtaaaattgttaaattaaaaatatatatatgttaaattttaatatatattgtttaattgttatttaaaggaattttaatttttttaaattgataattatatttttttttttagagattgaatgtgtatgagtgtgtgtgtggtgattaagttaaaggaaggtattttgatttgagttattaattatgtatttgaaaaaagattgataagaattggtagagtgaatttagatttaagattatttatttttgatattttatgagttatttaagaattttgagaggtataagtaattattgaaaggagatagtagttataaggtaggggtaatgtttaaggtattagattaaaaaattttttattatataagatgaagtatttgaaaagaattttttgtatgttacggagtagatatggttttggttattgttatgtattatgaaggtatttaagtgtattagtaatgttttattaagttggatagtatatatatatagttatttatttttattatttaaataggatgtagttattttgtatattgtacgatttatttaataatatttttaaaaagggattcgaatattggaaataggtatagtatgtgtgtataggtattatgaattttttttgtaagtatttaaaatttataataaaatttaaaaagtgtttagtagaaatttgggatgtataagtgtttttttgattttttgagaggttttttaatttgttttgtgatgtttagatttttatataagttaattttatgtttaggaataattgttagattatatatttgggaaaatgattaaagttattttattattttgttaagtgtttagaagtaatgttggggatgaaatgggtgtgggattgttgttattattatgttaaagttgattttttagtttgtttaattggaatttttagtttattttatgttttaaaattttaagtgtaattttaaatataaagaaaattaagttttttgattttatttataatatgaagtaaaggttagaagagtagttatatattttagtatagtattttggttttaaaatggtaagggtattttgaaaatgaggaaagtagttgtatttaattatttttatgagttaagaatatgttattaattagtatttaataaatgtttgttgttgatgatatataaattttttataatgtttagtgattagtatttttgatatatgataatgttttttttatttagagggatttatatttaaaagttttttataaattgtatatgtttgtatgaaaaaatttttttattattaattatgtaaataggtatttttatttatttattttaaaattttattttttaagataatatttttttaaatgagtagataggtttatataggttatattaagttttttattttttggttttttttttttattgggtaattttttattttttgtttgtttggtagaaggtgtatttatttgataatttttttgaaatcggtttgatgggatggaatttgaattaagtttttgttgtgttttttgtttaaaaatattgatgtgtattagagatttgtattatgtttttgataaattaattttgattattgttattaatttgtagtttaaatattaagaattattgttttttgtgttttttgaaaattaaggattatttttagaaagataataatagtaaatttatttatttaagtttagtagaagttttaatcgaatttgattaaaaaataacgaaatgtttttaattatattatatcgtatatattttgtattaaattttgttaatttattttttgtttcgtttttatttatttataaatttgataaatgtttgttatatgttaggattttgtgttattgaagaagaaattttaggattgtttagtgatatagtttaatatgtaattatataattaaattgaaaatgttaaatgttgggtttgtagggatattattttatatttattataatggttattattaaaagaataggatataataattgttggcgaggatgtagagaaattggaatttttgtgtgttgttggtgagaatgtaaaattgtatagttataatggaaagtagtataaaggttttttaaaaaattaaaaatagaattattatatggtttagtaattttatttttgagtatatatatttaaaataatttatagtaggaatttaaagagatatttgtatatttatgtttatagtagtgttatttataatagttaaaagttggaagtagtttaaatgtttattggtagatgaatggataaaaaaaattgtggaatatatatataatgaatattatataggtttaagtaaaaggtaggtttgttatatgttataatatggatgaatttggaagatattatgttaagtgaaataagttaattataaaggataaatattatgtgattttatttatatgaagtatttaaagtagttaaaattatagaaataaaaagtagaaaggtgattgttaaggattgggtagagagggtagagggaagaattagtgtttaatgagtatagagttttagttttgtaaggtgaaaaagttttagagattgttgtataatagtgtaaatatgtttaatattattgaaatatatatttaatggtcgggtacggtggtttacgtttgtaattttagtattttggaaggtcgaagcgggtagattacgaggttaggagatcgagattattttggttaatacggtaaaattttgtttttattaaaaatataaaaaattaattaggtatggtggcgggtattagtagttttagttatttgcgaggttgaggtaggagaatggcgtgaatttgggaggtagagtttgtagtgagcggagatcgcgttattgtattttaatttgggtaatagagtaagattttgttttaaaaaataataataataaaatatatatttaaaaatagatggtaaatttagtttatatatttaaaaatagatggtaaatttagtttttttttttttttttgagacggagtttagttttgttattaggttggagtgtagtggtacgattttagtttattgtaatttttatttttcgggtttaagtagtttttttgttttagttttttaagtagttaggattataggcgtatgttattatatttagttaagttttgtatttttagtagagatagggttttattatgttggttaggatggtttcgatcgtttgatttcgtgatttatttgtttcggttttttatagtgttgggattataggtatgagttattgtgtttagtcggtaaatttaattttgtgtgggtttttttttttttttaattataatgaaagatgatgttaagttttagagttttaataggtgtaaaagtattatagaaagttaggtttttaaatattattttattatattatgttttattagttaaaaaattaatttttggtaatgttattggagtgttaatggtttaatgttttgttttagttagataatatatttttattttattagtttttaagtgtatattattttaatttgaaggaataatttttaagatggaaatttagttttatgagagagtatttagggtattaaaatggattttaaaataattttattttagtagatttttggggttatttgtagttggtgggttttttttagagtattagaatatgttttggtttgtaataaatgatattggtgtttttagttttatagtaagtaatttagagttaaataagttgttagatatattgttaagttattatattttataaattaattattatatttagtatgtaaagtgtgatgaaatataaaaggtaatgtgttgtggggaaagggttaattttaaaattagaaaataataatttgttgttttgagttttaaaaataattttggaggtgatttttaggaaatatcgaaagaaaagagttatggttaaataaatttgtgtaattgttttatatattagattttaatttaagttttattatatttttagaggttaaaggaataagtttaagaggttattaaaagtttaaaaattgtatgtatattaaaaaaaatgtgttttcgtatatttttttggatagagggattatagtttttatttttttttttttttaaagggttaaaaagtgattgattatttgttgatagattttaaatgtatatatttttagtattatgtttttgatttttatgtaaagttatttattagatatttttattggaatgtgttataggtatttgagatttaatagatttgaaattaaatttaatgtttttttttatattttgaaattttttttttttttattgtgttttttgtaaatgaagggattattatttttttaatttttaaggaaaaatttaaggtgttatttttaattttttatttatttttggttttattttttaaattttacggttaattttttttgagtttatttttttagtatattttatatatgtttatatatattagtttttattgtttttattttagtttagtttattataaatgattagtgttgtaaatatttttaataattttttaattttagttttgtttatggttagtttattttgtaaagtatagtttgtatttttgaaaatttatatataattttgttttatttttgtttaaaattatttagattttttatgttttttgaatgaatttttgatttttgaggatggtttttaagttcgtattgtattggttttgtttgagtcgtttttattttaagttttgtgttttaggtattttgaatttattttagtgtttgagatatgttatatattttttttttttttaatttttgtgtattttttttttttagttttgaaaattttttttatttagatttatgttattttaattgatttttttattgtttggttaatttttattgtagatgtgaagtttttttttatgttttattgttttttttgtgtattttttatatgttatattattttattttgtatatagtagtgaagatttgatatggaagggattttgtttgttttttttattattgtattttttatgttttttattagtggtttttaaagtttggtttttttaattagtagtattattattatttgggaaatttttagaaaagtaagtttttaggttttattttagatttattgaattagatattttggaggtgtgacgtagttatttatgttttattaggttttttaggtgattttgatgtataatatagtttgagaatagtttttttatgttatatttggtaatgagtaaaaataattttttaatttagaggtatttatgatttgttgttatatagtgttagggttgtgttgttaaaaggagttatgtagtatatgtaaagtagtttatatttttttatagagatttagagatggttgaatgagaggtatttgtatattagattgtagtgttttatttagtttgttttttgtggttagtgagataaatttttgaaggtttttcgttttttttttagagaatggatcgagaggtagaaagtattttgttagtttttttaatgatgataattttattattttattttatattttaataaatatttattatatgtgggttttggattgaattttggttttgttatttaagggatatatgaatttaggtaatttgtttaatttttttatgttttaggtgttttatttatatggtgttaataatagtatttattttgtagggttattagaaagtgaaataaggtaatatttgtaaagtgtttgggatagtatttagtatgtagtaagtatttaagaaatagtaattattattattatatgttaaatgttgtgttaggtttagggatagagtggtaaacgggataaaatttttttgtgtatggagtttatattttagtatgttataattgtatagatagaaatgtatttttgttttataggatttatattaatgagtttttttgatttttatttttttatgttatatttttttttttatttatttttatttatttatttatttatttatttatttatttatttatttatttttatttttatttttgtttttatttttggtttttttttttttatatatgtatttaattgtttgaattttttaagtttgttaagtttagtttttttaatttttttttttttagttttattgttggtattatggtgaagtttttattttttttttttcggatttttgttatattttttaatttttatttttgttttttgattgttttttttgttattgttagattaatatttttgattatgagggttttttttttttaaaaatttttattgagttgttttttttttatttaatgaagtatagattttttaattaaatatgaaaatttttttagagtttggttttaattattttatgattttttttttttagatgtataggttgtagttagtgattattagatagattttgtgtttttgggttttatttttttgtatggtaatgtttttttttttgtttttaggtttttatattttgtgtattatttatttttttagggagtatttattgaggatttataatatgtttaatattataaaaggttaaggagatataaagatgaataaggagtggattttatttttaaaggattaggaggttgagagataaagaaaagatgatgattttgatgatggtgatgatgatgatgatgtgtagggaatatgtataatgataatagatttatatagaatattaagagtagagagagggatatatagtttgtgttttaagttttagtttaatatttttttgttttaagttttttttaatttttttgtagttaaaataatttttttttgtttttttgagtttttttagtataaatttattattttttttaatatataggtgtatatatatatatttatattttttttttgttagatttttaattttggaaaaggatatatagattaaattagtagtttttaattagaggtagtttttttttttacggaatatttgataatatttcggagataattttggttgttataattgagagggtatgattagatagtattattggtatttaatgggtagaagttacggattttgttttatattttgtaatttatagggtagtttttattgtaaagaattatttaatcgcgaatgttagtagtgttgagggtatgatattgaagttaagttagaatattgttattgttagttttatagttgtgtgattttgggtaagttattttttttttgtaagattgaatgagttaatgtatataatgtaggtcgggcgtggtggtttatatttgtaattttagtattttgggagattaaggtaggtagattatttgaggttaggagtttaagattagtttggttaatatggcgaaatttcgtttttattaaaaatagaaatattagttgggtatggtggtaggtgtttgtaattttagttatttaagaggttgaggtagggagaattgtttgaatttaggaggcgaaggttgtagtgagttgagattgtattattgtattttagtttgggcgatagagtgagtttgttttaaaaaaaagaaaaaaaaaggaaagaaaaaaggaagaaattgttttataatgtatataatgtaagtttggtatatagtaagtattatgtatatgttagttatttatattttaatatatataataatatttattagtttatgatagtagtgttatagatattaggatgaaatatttgtattttattatattttttagtttagtgatttttagaaaaaatgttgattaaatgggtagttgtttagtttttttatatatgtatgttatttagaattagtttttttatttttttattgaattttgtatatatgaattattattattaaaggtatttatttttataggattgtgttttggtttgttatattattatattaaggaagggaaatagagtatttttgtgttgttcgtaaggtacggatggattaataaaggttataaaattataaattttttgggaggttaaataaataagtaatataagtgagaagtagattaaaattttttttttttttaatttgtattgtttgatttttttttcgttttggatttgttgatatttttaataaaagatttaataattttggattgtggatttttttttttttttattacgtaaaatataaaggaaaatatgtagattaaatatttgtttgtttttgaataattttttttgtgcgtgattttttttttttttatataatatatatatgtagtttgtaatttatttattgttgttatttattaattagatgaattaagtattgttagtgatgttagtgttgttatattaatttagttatatttttgtattagtgatttttatttttgtgtttttttaggttgtattagtagtataaacgtttttaatttatgaataaagtgtatggaagtattatgtatttattttgtattgattgtttggaataaatgtaaaagtatttttttttgtattttgtaagaaatatttttttaatattaggtattaggttgtattattatgttattttaataaagatttgatatatttggagttgtttaatagtttaataatgtatttttaattatgatttaaaatattattaaaagtgtggaatttatataaagtattgttttaataaagtagtaattgttattttgtatattttatttttttatagagatattttatatttatatgtattagttaaggttttgtagagaaatagaattaatagggtgtgtgcgtgtgtgtgtgtgtgtgtgtgtatttgtatgtatagagaggtttattataaagggttggttcgtgtaattatgaaggtttataagttttaagatttttaggatgagtttgtaaattggagatttaggagagttaatgatgtagtttaagtttgagttcgaaggttagagaaatagtagaattgttggtgtagttttagtttaaagattggtaggtttaagatttaagaaggttttagtttgagtttaaaggaggaaaatattgatgttttagttttaaggtagttaagtagaaagaatttttttatttagaggagagttgatttttttgttttttttaggtttttaattgattggaaagggtttatttatgatagggagggtagtttgttttatttagtttattgatgtaaatgttaattttatttaaaaatatttttatagaaatatttagaatgagatttgattaaatatttgggtattttttggtttaattaagttgatatatataattaattattatatgatatatataggtgattagtaaatgtataattttataatttagttttaagaatgttttattatagttatgtataaaaattattaatatatagtaatttatttggtatattgagaagtaagtataataaagaattttaaagtatgggttatattttaaagaattataaattaaaattaatataattgagtatgtaattagttttttatgttaaaattatgaaaaatgttttttatatatgaggttttttgaaaaggtatttatatttaagattatttggaaagaagtttaaagagaaatatgatataaatagtttgtattaggttgttttgaattttttgtatatttaatttaatttaatagatatgtattgaatatttgttatgtaaagttttgtgttatttgttaagagggatattaagatatgttaaaaaaaaaaaaaagttgttttttttaaggaggataaataaggatttatttaattatataataaggtaatagttaattacgttattaaagtgtggtgtagaaatataattgtattatatatgagataatgttttaatttgtttggaagtatttatatagtatatataagggggaatattattattggtttattagtaatggttagagataatatttttggtggaaagaatagtttacgaaaagttgagaaagaaaaggatgtattttgttaatagaaaattatttagatgtgtttagtgtttaggttgtgataagggaaggagcgatgatagaagaaaatttaaaaatttgtttgtaaaatggaaatagaggaaggttatagtgagttttaaatgttattattttaaaatttgaatgtttaaaaattgagagttatgaatatatttgaaaagtggaataatttttttaatttgtaatttaaaaataatttaggaagtaatgtaagggatatattaaagtgttgtgagattgtaagaagggtatttatttttattatatatatttgattaatttttaaagaggatttgatatagtttatagaattgaaaaataaaggtgaaaaaataggagtcgagtaaataaagataagaaaataagatgaagttgtagtaaggatgttgtaaaacgaaataataataataaaagtatatggtaagaatttagtattgatagaagtggtttagaagatgagttttgaatttcgatagaaggaaataggaaagatgattatttataattgagattttgttttttgtgttatagaaaaaaatagaagtaattaggattttttttaatatatttttagtagttttttcgtgtgaatttttatatgttttgttattttattatagatgaattgtttatgtttttttataaatttaatttttttatttgtgttttagttttaatttttttatttatttaataatgtttttttagtaatttttatttttttttgtatttttagttttttttgttgaattatttttgttagtataaaaatatgttgagtttttttaatttttaagaaataaataaagtaaataatttaaagagaagttttttgatttagtttttttttttttgtattacgttatttatttattgtgagaaaatgtaaattaaaattgtagtgaggaaaaataaaaaataaaaaattgtagtgaggttaagtgaggtggttttcgtttataattttagtatatcgggaagttaaggcgggaggattttttgaggttaggagttcgagaatagttttgataatatagtgagattttatttttataaaaattttaaaagttagttaggagtggttttatatgtttttagttttagttatttgagaagttgagataggaggattatttgagtgatttaggagtttgaagtaatagtgagttatgattgtattattttattgtagtttgggtaatagagagagattttattaaaaaataaataaaataaaaacggtagtgatgtagtgagatttattggttaatttttagattggtaaaacgttaagtttttgtaatatttttatggaaaaggtttgtgaaaaatttttatatgtataaaaatatgtggaaaaatttttatatgtatttttggtagaaatataaaatggtataattgttatgtaagggaatttgataatatatataaaaattgtagatgatttatttttttatttattattttagaaaatttatttaagagaaatatttataaggttgtttgttgaaatattatttgtagtagtaaaggtttgaaaaaaattttaattttttattaataatagattggttaaataaatagtgttttaattattaatggaattttatatattatttaaaaaaataagatttttaagtattgatatggaaatatttattgataagttaaaaatgtaaggtgtttgttaggcgtagtgggttacgtttataattttagtattttgggaggttaaggcggatagattatttgaggttaggaatttaagacgagtttggttaatatggtaaaattttatttttatttaaaatagaaaaattagttaggtatggtggtaggtatttttaattttagttattggggaggttgagttaggagaattgtcgggggatggaggttgtagtgagtcgagattgtgttattgtattttagtttgggcgatagagttagattttgttttaaaaaaaaaaagtaaggtgtttagtaatttttaaggtttttgattttttatgaaaggaggaaataagaatatatattcgtatttgtttgaatttgtattaggaattttaaaagttaataaaattgattatgtataaaggatgggttggggaattaggaaaatatttgttgtaataatttttagttttgttattttttttaagtttttatatatttttatggaaaatataaaatgatgatttttttaaattgtgtattatattttttttggaataaaataatttgtttttatagtatttgtttaattttttattgtattttattataaaattattttttaaaaattttatttttaga

SEQ ID NO: 390 - DNA, 19380 bp, Artificial Sequence
  chemically treated genomic DNA (Homo sapiens)
tttaggaatagaatttttaagaaataattttatgataaaatataatagaaaattaagtaagtgttataaaaatagattattttgttttaaagaaaatataatatataatttgagaaaattattattttatattttttataaaagtatatgagagtttaaaagagatagtaagattggaaattattataatagatgtttttttaattttttagtttattttttatgtataattagttttgttagtttttaaagtttttgatgtaaatttaagtaaatacgaatatatatttttattttttttttttataaaaggttagaaattttaaaaattattaggtattttgttttttttttttgaggtagagtttggttttgtcgtttaggttggagtgtagtggtataatttcggtttattgtaatttttatttttcggtaatttttttggtttagtttttttagtagttggggttagaggtgtttgttattatgtttgattaatttttttattttaagtagagatggggttttgttatgttggttaggttcgttttgaatttttgattttaggtaatttgttcgttttagttttttaaagtgttgggattataggcgtgatttattgcgtttggtaggtattttgtatttttaatttattaataggtatttttatattaatgtttagagattttatttttttaaatggtatatagaattttattagtggttaaagtattgtttatttaattaatttgttattaatagagaattaaaattttttttaaatttttgttattataaatgatgttttagtaaatagttttgtaagtattttttttaaatggattttttgagataatggatgagaaagtaaattatttgtagtttttatatatattgttagatttttttgtataatagttgtattattttgtatttttattagaagtatatgtaagagtttttttatatgtttttgtatatgtaagagttttttataaattttttttatagaggtattataaagatttggcgttttgttaatttaaaaattgattaataaattttattgtattattgtcgtttttgttttgtttgttttttgataggatttttttttgttgtttaggttgtagtgaggtggtgtaattatagtttattgttgttttaaatttttggattatttaagtgatttttttgttttagttttttaaatagttgggattaaaggtatgtaaaattatttttggttaatttttaaaatttttgtagagatgggattttattatattgttaaggttgttttcgaatttttgattttaagagattttttcgttttggtttttcggtgtgttgggattataggcgagaattattttatttggttttattgtagttttttgttttttgtttttttttattgtagttttgatttgtatttttttataatgaatgggtagcgtagtataaggagaaggaagttgaattaaaggatttttttttaggttgtttgttttgtttgttttttaaagattaaaaaaatttaatatatttttatgttgatagaaatgatttaatagggaaaattggaaatgtaggagagaatggagattgttagaggaatattgttgagtagataaggagattgaagttaaagtataaatggaggagttggatttatagaagagtatggatagtttatttgtagtaagatggtagagtatatgggaatttatacggggaggttgttagagatatattagagaaagttttgattgtttttatttttttttgtgatataaaaagtaagattttagttataagtaattattttttttatttttttttgtcgagatttagagtttattttttgggttatttttattaatattgaatttttgttatgtgtttttgttgttgttgtttcgttttgtagtatttttattatagttttattttatttttttgtttttatttattcggtttttatttttttatttttattttttaattttataaattgtattaaattttttttagaaattagttagatatatgtaataaaagtgggtattttttttatagttttataatattttaatatattttttatattgttttttaaattatttttaaattatagattagaaaagttgttttattttttaaatatgtttatggtttttaatttttaaatatttaaattttaaaataatgatatttagggtttattgtgatttttttttatttttattttgtaagtagatttttaagtttttttttgttatcgtttttttttttattataatttaaatattaggtatatttaaataattttttgttggtaaaatatattttttttttttttagtttttcgtgagttgttttttttattaaaaatattgtttttggttattattgataggttagtgatgatgtttttttttatatatgttgtataaatatttttaaataggttaaagtattattttatatatgatatagttatatttttgtattatattttgatgacgtagttaattattattttgttgtatagttagatgagtttttgtttgttttttttgagggaaatagtttttttttttttttaatatattttagtattttttttagtaagtaatatagaattttatatagtagatatttaatatatgtttgttgaattaaattaaatgtgtaagaagtttaagatagtttagtgtagattatttgtattatatttttttttaagtttttttttaaatagttttaagtgtaaatatttttttaaagaattttatatatgaaaaatattttttatagttttagtataaaggattaattgtatgtttaattatattaattttggtttatgattttttgagatatggtttatgttttaagattttttattatatttattttttaatatgttaagtgagttattatatgttaataatttttatatatgattataataaaatatttttaaaattaggttataaaattgtatatttgttgattatttatatatattatataatagttagttgtatgtgttaatttgattggattaaaggatgtttagatatttggttaaattttattttgggtgtttttgtgaaagtgtttttgggtgagattaatatttatattagtagattgagtaaagtagattgttttttttattatgggtgggttttttttagttagttgaaggtttgaaaagaatagaaaggttaatttttttttgagtaagagaattttttttatttaattgttttagaattggaatattagtgttttttttttttggatttaaattgaaatttttttgggttttaagtttgttagtttttgaattagaattatattagtaattttattgtttttttgattttcggatttagatttgaattatattattggtttttttgaatttttagtttgtaaatttattttgaggattttggagtttgtgagtttttataattgtacgagttaattttttataataaatttttttatatatataaatatatatatatatatatatatacgtatatattttattggttttgtttttttgtagaattttgattaatatatataagtatgaaatatttttatagagaaataaaatatgtaaaatgataattgttattttattaggatagtattttatatgggttttatatttttagtaatattttaaattataattaaaaatatattgttgagttgttagataattttaggtatgttagatttttgttaaaataatatggtaatataatttggtatttaatattagaaaaatattttttatagaatataaagaaaaatgtttttatatttattttaaatagttagtatagggtaagtgtatgatgtttttatatattttatttataaattaaaagcgtttgtattgttggtgtagtttgaaaagatatagggataaagattattgatataaagatgtaattaaattaatatagtagtattgatattattgatagtgtttagtttatttggttaataaatagtagtaatagatgggttatagattgtatatatatattgtgtagaaaggaggaaggttacgtataggaaggattatttaaaaataggtaagtatttgatttatatatttttttttgtgttttacgtaatgagaaaaaagaggaatttataatttaggattattaaattttttattaaagatattaataagtttaaggcgaaaaaagaattaggtagtataagttaaaaaaaaaaaaagttttgatttgttttttatttgtattgtttatttatttagttttttagggaatttgtggttttatgatttttgttggtttattcgtattttacggatagtatagagatgttttattttttttttttagtatagtagtatagtaggttaggatatagttttatagaggtaggtgtttttgatagtgatgatttatatatataggatttaatgaaaagatggaagagttgattttagatgatatgtatgtatagaagagttagataattatttatttagttaatattttttttgaaagttattaaattagggagtgtgataagatataaatattttattttggtatttataatattattattataagttaatagatattattatatgtattagaatataaatagttagtatgtatataatgtttattgtgtgttaaatttatattatatatattgtagaataattttttttttttttttttttttttttttttttttttttgagatagatttattttgtcgtttaggttggagtgtagtggtgtaattttagtttattgtaattttcgttttttgggtttaagtaattttttttgttttagttttttgagtagttgggattataggtatttgttattatgtttagttaatgtttttatttttagtagagacggggtttcgttatgttggttaggttggttttgaatttttgattttaggtgatttgtttgttttggttttttaaagtgttggaattataggtgtgagttattacgttcggtttatattatatatattagtttatttaattttatagagggaaggtaatttgtttaagattatatagttatagaattgatagtggtagtattttaatttggttttagtgttatgtttttagtattattgatattcgcgattggatgattttttgtagtgagagttgttttgtaaattgtaggatatagagtaggattcgtggtttttatttattagatgttaatagtattatttagttatatttttttagttatgataattaaaattgttttcgagatattgttaaatgtttcgtaggagagaaaattgtttttggttgaaaattattaatttaatttgtatatttttttttagaattagaagtttaataggagagagatataaatatatatgtatgtatttatgtattaaaaaaagtagtaaatttgtgttaaggaaatttaaggagataagaaaaggttattttgattatagaggagttagaagaaatttaaagtagaggggtattaagttgagatttggaatatagattatgtgtttttttttttgtttttaatattttgtatagatttattattattgtgtatattttttgtatattattattattattattattattaaaattattattttttttttgttttttagttttttggttttttgagagtaaggtttattttttatttatttttgtatttttttgattttttatagtgttggatatattataagtttttagtagatgttttttgaaagaatggatggtatataggatgtggaaatttgaaaatagggagaaaggtattgttatgtaaagaagtgaagtttagaagtataagatttgtttaataattattggttatagtttgtgtatttaaaaaagaggagttataaggtagttgggattagattttggagagatttttatgtttggttaaggaatttgtattttattgggtaaaaaaggagtaatttaatgaaggtttttgaggggaaaagatttttatgattaggggtattaatttgatagtggtagagggaatagttaggaagtaggaataagagttaggagatatgataaaagttcgagagaagagaaatgagaattttattatagtgttagtaatagggttgaagaggaaagaattagaagggttaaatttagtagatttgagaaatttaggtaattaagtatatatgtgaaaagggaggaattagagatggagatagagatagagatagagatagatagatagatagatagatagatagatagatagatagatagagatagatagaaaggaaaatgtgatatggaaagatgagagttaaggaagtttattaatataagttttgtaggatagaaatatatttttgtttatatagttataatatattggaatataaattttatgtatagagggattttgtttcgtttattattttatttttagatttagtatagtatttgatatataatagtgatagttattattttttggatgtttattatatgttgggtattgttttaagtattttataagtattattttattttattttttaatgattttataaggtaagtattattattaatattatatagataaggtatttaagatatggagaggttaagtaaattgtttgagtttatatattttttaggtgataaagttagaatttaatttagagtttatatatgataaatatttgttgaaatataaaatgggataataaaattattattattgggaaggttaatagaatattttttatttttcgatttattttttaaagaggagacgaaaagtttttaaagatttgttttattgattataagagataggttgggtgagatattgtagtttgatgtgtagatattttttatttagttatttttggatttttgtgaagaaatatgagttgttttatatgtgttatatagttttttttagtaatataattttggtattgtgtggtaataaattatagatatttttgggttaaaaaattatttttatttattgttaaatatggtatagaggaattgtttttaaattatgttatgtattagaattatttgaagggtttgataaaatataggtggttgcgttatatttttagggtatttgatttaataggtttggggtagggtttaagaatttgtttttttaaaagttttttaggtgatggtgatgttgttgattggagggattagattttgaggattattagtagagagtataggggatataataatgaggaggataaatagggttttttttatattaaatttttattgttgtatataagataagataatgtgatatgtgagaagtatatagagagaataatagagtataagagaaagttttatatttatagtaaaagttagttagatagtgaggagattagttgaaatagtatgagtttgggtgaaaagagtttttaaagttgaaagaagagaatgtataaaggttgagaagaaagaaagtatgtggtatattttagatattaaagtaaatttagaatgtttgaagtatagagtttgaaataaagacggtttagataaggttaatatagtacgaatttgaaggttatttttaggagttaagagtttatttaggggatatggagaatttgaataattttaaataggaatagaataagattatatatgggtttttaaaaatgtagattgtattttatagaatgaattagttatgggtaagattggagttgggagattattagaagtgtttgtagtattggttatttgtgatggattgaattgaggtggaagtagtgaaagttaatatatgtagatatatatgagatatattaaagaggtagatttaaaagaaattaatcgtaagatttaggaaatggggttagaggtgaatgaaaaattaagaatgatattttagatttttttttggaaattggggaaatgatggtttttttatttataggaaatataatggaagggagaaaagttttagggtataagaagaaatattgagtttaattttagatttattgagttttagatgtttgtggtatattttagtgaagatatttaataagtagttttatataaaagttaagagtatggtgttagagatatatatatttgggatttgttagtaaatagttaattattttttagttttttagaaagaaggaagaataaaagttatgatttttttatttagaagaatatacgaagatatattttttttggtatgtatgtaatttttaaatttttaatggttttttgggtttatttttttgatttttgagggtatgatggaatttaggttaagatttgatatataaagtaattgtataaatttatttagttataatttttttttttcggtattttttaaaagttatttttaaaattatttttaaagtttaaaatagtaggttgttattttttaattttaaaattaattttttttttataatatattattttttatattttattatattttatatattgagtgtgatggttagtttataagatataatagtttaataatatatttggtaatttatttaattttaggttatttattgtaggattaggaatattagtattatttattgtaaattaaaatatgttttagtgttttaggggagatttattaattgtaaatggttttagggatttgttgaaatagaattattttaggatttattttggtgttttaagtatttttttatggggttaaatttttattttaagagttatttttttaagttaagatgatatatatttaaaaattaataagatggaaatgtgttatttgattagagtaaaatattaagttattaatattttaataatattattagaaattagttttttagttagtggaatatagtatggtgaagtgatatttaaagatttaattttttataatgtttttgtatttattaaaattttaggatttggtattattttttattgtggttaaaaaaaaaaaaaaatttatataagattaaatttatcggttgggtatagtggtttatgtttgtaattttagtattgtgggaggtcgaggtagatggattacgaggttaagcgatcgagattattttggttaatatggtgagattttgtttttattaaaaatataaaatttagttgggtgtggtggtatgcgtttgtagttttagttatttgggaggttgaggtaggagaattatttgaattcgggaggtggaggttgtagtgagttgagatcgtgttattgtattttagtttggtgatagagttagatttcgttttaaaaaaaaaaaaaaagattaaatttattatttatttttaagtatatagattaaatttattatttatttttaagtatatattttgttgttgttgttttttgagatagagttttgttttgttgtttaggttggagtgtagtggcgcgattttcgtttattgtaagttttgttttttaggtttacgttatttttttgttttagtttcgtaagtagttgggattattggtgttcgttattatgtttggttaattttttgtatttttagtagagatagggttttatcgtgttagttaggatggtttcgattttttgatttcgtgatttgttcgtttcggttttttaaagtgttgggattataggcgtgagttatcgtgttcggttattaagtatatattttagtagtgttaagtatatttatattgttgtgtaataatttttggaatttttttattttgtaaaattaaaattttatatttattaaatattaatttttttttttattttttttgtttagtttttggtaattatttttttattttttgtttttatgattttgattattttagatattttatatgagtggaattatatagtatttgttttttgtaattggtttattttatttaatataatgttttttaggtttatttatattgtagtatgtgataagtttgttttttatttaagtttgtatgatatttattgtatgtatattttatagttttttttatttatttatttgttaatgaatatttgggttgtttttagtttttggttattgtgaataatattgttatgaatatgggtgtgtaaatatttttttgagtttttgttgtgaattattttggatatatatatttagaagtggagttgttggattatatggtaattttatttttaattttttaagaaatttttatattgttttttattgtgattgtataattttatatttttattaataatatataagggttttaatttttttgtattttcgttaatagttgttatattttgtttttttgatagtagttattgtaatggatgtgagatagtatttttataagtttaatatttaatatttttaatttaattatatgattatatattggattgtgttattagataattttagaattttttttttagtggtatagggttttggtatataataaatatttgttaaatttatgaatgaatgaaaacgggatagagaatggattaataagatttaatataaagtatgtacggtatagtgtgattaagggtatttcgttgttttttggttaagttcggttgaggtttttgttaagtttgggtaaatagatttattattattgtttttttaaagatgatttttgatttttaaaaagtatagagagtaataatttttgatatttagattataaattagtggtaataattaagattaatttattagagatatagtataaatttttggtgtatattaatatttttgaatagaaagtataataggaatttgatttaaattttattttattaaatcgattttaaaggaattgttaaataagtatattttttgttaagtaagtaggaagtagaaaattatttaataaaagagaaaagttagaggataaaaagtttagtgtagtttgtataaatttgtttatttatttaaagggatgttattttgaaaagtaaagttttaaggtaaataaatgaaaatgtttgtttatatagttgatagtaagggagtttttttatataaatatgtatagtttatgaaagatttttaagtgtaagtttttttgaatgaagagaatattgttatgtattaagagtgttggttattgagtattataaaaaatttatatgttattaatagtaagtatttattgagtgttagttaatagtatatttttaatttatgaaagtaattaagtgtagttattttttttatttttaaaatgtttttgttattttaaaattagaatattgtgttagaatatatggttatttttttgatttttgttttatgttatgaataggattaagaaatttgattttttttgtatttagagttatatttaagattttgaggtatgaggtaagttagaagttttaattagatagattaagaaattaattttaatatgataatggtaataattttatatttattttatttttaatattgtttttaaatatttggtaaaataatagagtggttttagttatttttttaaatatgtggtttaatagttatttttaaatatagggttaatttgtgtggggatttagatattataaggtaaattgggaaattttttagaaaattagaaaagtatttgtgtattttaaatttttattaagtattttttaaattttattgtgggttttaaatgtttatagaaagaatttataatatttatgtatatatattatatttatttttaatgttcgaatttttttttaaaaatattattaaatgaatcgtataatgtatagaatgattgtattttgtttaaataataaaaatgaataattatatatgtatattatttagtttaataaaatattattggtatatttgaatatttttatgatatataataatgattaagattatatttatttcgtaatatataaaaaattttttttaaatattttattttatgtaatgggaaattttttagtttaatgttttaagtattatttttattttataattattatttttttttaatggttgtttgtattttttaaaatttttaagtagtttatggaatattaaaggtagataattttaaatttgaatttattttattaatttttgttagtttttttttagatatataattgatggtttaaattaagatgtttttttttagtttagttattatatatatatttatatatatttaatttttgaaaagaaaaatatgattgttagtttaaagaaattagaatttttttagatggtaattagataatgtatattgaagtttaatatgtatgtatttttgatttaataattttgttattaggaaattattaggttaatttttatatttatgtggaatgatatatgggaaagaatgtttatagttaattttgaattttttggagtattttatagtgttaaattatttatagtttgttatataatataattatttaatgtttgttataaaatataatatatatgtttaaatttttttataattttgataataaaattaggttttattttgaagttagttatattattatagttatattggatatttttattttaaatttttatttttttattatgttattaaataaattattatgttatttttagtttttttttatagagtattaaaattttttggttaggtacggcggtttatatttgtaattttagtattttgggaggtcgaggtaggcggattatttgaggttaggagtttaagattagtttagttagtatggtgaaattttatttttattaaaaatataaaaattagcgaggtgtgttggtatgtgttcgtaatttagttatttgggagtttgaggtaggagaattgtttgaatttaggaggtagaggttgtagtaagtcgagattatgttattgtattttagtttgggtaaagaaacgagatttcgttttaaaataaaataaaataataataattttttaattagagatttataaaatttttttttttttatagttatttatttttgttaaatttaatttttaaaattataaattatattagttatgtttttaaaaatatgatagatttttattgtttaagaagaaagttttaagttttggtatttaaaaattattttttttttgatttggagtttttttttttttttttaattatatttttttaggtagtaatattttagtttagttagtttaattaattattttttaattatagtggataattttttattttttgttattatttatattaattattttgagtagaatgttttttttatttatttttatttatttgaagtttatttattttttatagtttaatataaatagttattttttttttgtgatattattttatattaaaaattaattgtttattttgtatatttttaaaatattattattttttatagtatttattttattttgttatatattagagatcggggtttttaatttttatttttagttttatattagttttatggtttattaggaagtaggttgtatagtaggaagtgagtagtaggtaagtgaacgttattatttgagttttgttttttgttagattaatgttggtattagatttttataggaatgcgaattttattatgaattgtatatgtgagggattgaggttgtatgttttttatgagaatttaatgtttgatgatttgagtggaatagttttttgttaaaattatttttttattattttatttttggaaaaattgttttttatgaaattagtttttggtgttaaaaaggatgaggattgttgttatagattgttttgtatatgttaattagggttaattttttagttatttttatattttttttaggtacggtgttttatataaagtaggtatttaataagtatttgtaaatatgtgtttttaatggttaattttttttatatattttttagatttataaatttttataaaattattttggatttttaaataaaataattgaattttttggaatatacggttatttaaaatttaatagattttttagagggttgaaatatggtagtttattgtttttatttgatttatttttatttaaataaaaaaataaataaaaaaatttaatagttatttttttaatatttgagagagaagttagtgattgattttgaagaatttttggtgtagtgaatgttcgaagattttgattggaaatatttttatttgtaaatgatatattattagatggtagtaatagtagagattatggagaaatgatgaagttaagggtagtaggattagttaggtttattggtttgtaattgtattaaaataaaaaataaaaaaaaagaagaaaattgtttaaaattataattataggaaatagtaattattttaatggataatgtagtttatttgtatagatgttaataagtagttaatatatattaaattaatatgttataaaaagattgggttttatataaatataataggtagtattattaataataatgttttgatttggtttaattttttaaaatttggatggtagattttagaaattagaaatagagtttttttattgtttttaagaattaaatttggtttaaatgttttattaacgtgatatatagatatggataaggattagtagttttttaatgttttttgaattatgtatttttttaagaaattggtgaaaggtgtggttttttttttaaggatattgtttataaatataaagttttgtataaattttgaagttttatggatttatttataatttatttatagattttaagttaagatttcgatttagattatagtgttttgaaatggatagaaattaatttttttgaaaatttttgttaggtatttataaggtttttaattataatgaaatgttttgagtcgaagtatatattttgtttgaatttagattttattttatttatatttgtttattattttattagtattttaggtagtttgttttgtattattaaatgtgattaatgaggttttttaattttttgttttaatgtttggttgtatagatgtttaagagtttatatttaagagtattaatataaatatattttttagatattagtaggtttttatttagaagtaaagttgtatattaggtttaataaaatagattgattagaataaattttattttgttttttatataaaaagtaagttaatataggttttaagaaaattgttaggtgaatttggttatagatttaagataatagttatagaaaaattataaaaggtttatgattgaaattttattatttaatttgaataaattatattgatattattttgttaaatgataagatattgatagaagtttatggaaaagtttattatatagtatttatatttttttgaaaataattagaattgaattttttttaaattaggattgaattattttgattttttaatttttatttattatttatatgattagaatatgatttatgattaaaaagtaaattattaaaagttattttttttttgaaggttaaaaatttgtatgtttatgaatttgagatatgtttttaataatggtgttaaagaagaaaaatgtgtttgaatgtaatttttaattagttagtatattttaggttgtattgaagtggtgttatagattaatggtttttaaagttttaattaattatatattagatttttgaaatttggtttataattgttattgttaaatatattttaatgaattattttaatgaattattatagtttataattttaggtatatgttgtcgtattttatagttattatataagttttttgttaaaagtcgttttttagttattttatatatagataatatataatttagttggaaaagaattgataaagtaaaataatattttttttgtaaaaagatattatttaaaattatgagattttatgttatagatattataaaataatttaaaattaatttttgttaaattattaattaaggggaataaatattaggagattaattaggaagataacgtattaataatttggtgtgagatgatgatggttaataagtatagtggtggtaatagaggtggtgagaatttgttggtaattgaagatattttagaggtagtgataatagaattttttgatagattggatgtggagtgatagaaaaagaggattttggatgatattaaagttttgatttgagtaattaaaaggatagagtgttattaatagagattgtttaaaatagtgtaggttgttgaggtgggggttaggaggtggtggtaggaattagaattttggaatttattatatttaagatatttgttatatatttgaatggggatgttaattaggtaatttgatttgaaatgtgggataaagattataattgtagatatattttgggagttgttggtttattagatggtatttaaagttatgtgatttgatgaggttattaaaaaaaaaaaaaaaaagaattaagatagaaaagaaatgaagattaaggattgagttttagggtatttaaatataaagattgcgttttttcggttttttatttttttttagattttttttttttttttggggattgatgtatgtatggtgttgtaatatttttttaatatttttttcgtttattattgttaatttttattttattattttaattaattttatttattagattttttgtttagttttttagtatttaagtttcgaatttaagttaggaagttgggattttaattgttatggttaattttagattgttttttttttggaggtaaaattatgattttgagtgtaattgttattattttaaatttataaatgattgcggattatagttaatatagaggtttgaatgttatttagaagtttaaatgttatgttttgtttttgttttgttattgtggattttggtatttatttagattagaaaaggtttgttatattttttttttttatttttggatatagattgatttttttttttttttagtatggtagtattaattagaattgttgaaggtgaaagtaatttataattttttattattttaaaatgtagagatttatttatttattaggataattaaggttagtaaattgataattattttgttaagaattatatgtatttttttttttttattaagttgtattttgtttttaatggatatataattatatttatttatagcgtatagtgtaatgttttggtatatatgtataatgtgtaatgatgaaattatatattttaatttttatataatatgttgtttgtttttattgaatatttaaagtatatttttattttaagtattatatatatatatatatatatatatatatatatatattttttttttaatattataggttatttgttaatagagtttaaagtattattggggagataatatatatataaatataagatagaaagtattaggtatttaagaaaaaaaagagtttggaggatagttaaattattttaattataataaagaattaattttttattttatatgtggttttttaataggtaagatttgattatggttaaggttaggatttaaaaaagaagaaacggttaaagtaaaggtatgtgggttaggaagttattaagtttgtataaggaatagtaagaattttgggtagagaaatggtgaagagtagtgagaaatagaattattaaggaggattatatttttgtttgttaaaaaaatatagataggttgggcgtagtggtttatgtttgtaattttagtattttgggaggttgaggtgggtagattatttgaggttaggggtttaagattagtttggttaatatagagaaatttcgtttttattaaaaaaaaaaaaaaaaaaaaaaaattagttgggcgtggtggtgggtatttgtaattttaggtattcgggaggttgaggtaggagaattatttgaatttgggaggtagaggttgtagtaagttaagattatattattgtattttagtttgggtgatagagtgagattttgttttaagaaaaaaagaaaagaaagaaaataaaaatgagaaattatataaatatttttaaatgtgattttttaaatggtttgtaataaagttaaagaaatcgtgataataaattatattgttgttaaatttcgtaaatatatatatgatatttacgtattggatttttgagaaaatatagttaaattatagaaaatattttaaaataattttaaagggttatgtaaatttgtaagtgagggaatttagagttgtggttagaattagtttttaatttatttattttgtttaattaaaaggaagaaatttaaagtaaatgtatttaaaattttttaaaaaaatgttaataaaagaatatttaaaaatgagattttagaagtttataatttcgtgtattgtgttttaattgtgtgttgattgtatttaagaatgttattatgaaagagtaaatttgatatgaattgattttagtagtttaatgattatatttatagattttattaatattttatagaaaagttgttaaatataattttaagtagttagaggtaaggttaaggataagtagaaatttgatatgtaaatattttagagtttttttttaatgtttttttaaattaagattattttatgtttatttatttttttttttgagggtttttgttattttttttagattgtttttttattttttattttttatatatattattaaaaattagggaaataattttaattaggtaataaatatggtaaggaaatattaattaaaagtattaggaaattattttgagatttagaataataatgatatgattttgatttgaaaaatttttttgtatatttaggtataagaaattgtagtttttttattttatacgttttattagggtgtttggtaaaaatgtatgtagaggtcgttgttttaaattttgaaggatttgataaagtttttttataatatggaattttttaaaaaatttagtttatatgtttataataatatatatattgttaaattaataatttggtataataatgtataaatagaaaataaatggtttagaatagtttttttatattttaatatttttttgatagttttgttataaattatttaaggtttattggaaattgtagtatatgttagaagttgattataaaataaagttgtattaattttttaaaagttttgttattatttaaaaaaaaaatttgtttttttgatattataaaggataaaatagtaattttttattgaaaat

SEQ ID NO: 391 - DNA, 6120 bp, Artificial Sequence
  chemically treated genomic DNA (Homo sapiens)
gtttatagattagtcggtttttgagtttttcgggttggggttgttttatgtgagttaattttttaggagtttgggtggtcgtagatattaattaatttattattttcgaatgtgtaatttaaggttagataagtggttttttgcggtaaataggattttggggatttaggtttttttagtattgagaaggtttttggttgtatggggagggtttaaagtttgtggttaagttaggatgtagaagataggtgtgtgttttagtaagttagtttcgttgattattagttttatatagtatataggtgcgtgttgttatttgtgtaggtgggaagttcggattgtttgggtttagggttttttggttttttatgttattttagtattatttagtgattgtttgggttttatggttttagtttttatagttgataggatagaggttgatgatagcggtagttcgtgttgatggttagcgtttttgggttaaggattttgtgtagattgattgtttgtattttcggggaatttggggagaaggagttttgtttttttattgaggtacggagattttgggtaattcgttaaggatatggggataagagatagagcgtagatatatttagagttttttgtagtttttttattatgttattgttttaggttatatttagatagttttttgtaggagagaaaattttggtagaggggtaggaaatattgttattgtttgttgagtttattgatgtattattgggttttatttttaaggtagtgtttatgttattgtttttatgttatagaggatgatatcgaggtttagagaggattatagaagttgttgagtggtgtggttagtttggttttggtgttgagcgaaaaggatggagatttttttaagggaaggggaggagaagacgggtagaggggaaagaagaaaggagggcgagggaaggaaatttataagagaataaagtgtggggatatggaaaattgaagtgggtaaagtgataatgataggttagtgggagtaggtgggtaggttggtgggaggaggtgggttttttttgaattttttagggtttttgatggatatgtaggtttttgttgtttttgttcgggtattcggtttttaattaggttttagggaggatgtaaaaggggtttttttttaggttaggttgagggtttttttgtaaatatttttgagggtatttgaggtttataggtaggtaggatttgtatagttaggtaaagtttgttttgtatagttatattttgtaggtttaggttaggtgttttgtgagtatgtttatggaagtagtatatttggtatagggtgggttggttgagtagtttttttgagtgttttgagagttagttggtggttattggtttttttttcgtagttgttttggagggtattaatagtaaggttagggaggtaaatcgtggggagtagtagatttgttttttattttaatagttcgatgggggagtagagggtagtggtagatagatgggaaattgaggtatcgattattttgttaatagtgtatatagttagttttagagtttgtgtttttaattattatgttatattgtttatgggagggatttggatttttgtttacgtttattttgagaggtttcggttagtagttttaggaatgttatttagttttttagtattattaggatcgagttgcgtttttgaatgtgtttttttttatttgtaagttacgaggtatttttagagttagagttttttgttattgtatttagttttattttaattatgttttttagtgtaggtagagatttttatgttatttgggttagaggatatagagtatttcgttcgtttttcgttaggtaaatttgtataggtatggtttagatttttgtttatgatgggtttttttttttttttttttttttgtgttgcgttttggtgttttggggttagatttgaggtgttttaggtaatttttatttgtttagaagtaatgaatgatttttaagtttttatatgttataggaagatggtgtgagtcgtttgtttattgagtattttattttgtattggggtagagttttgaaaatattatttttttatagttattagggaaggatattgttttagtttttatttgagagatgataaaattgaagttgaggagtaatgtatgtaatgttatataattatgaatggtaaaatttaaatttaggtttaattattttaagtagatgtttgtattagaattttttggggaattttttttttttttttagagatagcgttttattgtgttgtttaggttggtttcgaatttttggttttaagtgatttttttgttttggttttttaaagtattgggattataggtgtgagtttttagtttggtttttgaattttttttttaatatggatttttagggagtgggggatttaggatgtgtgtttttataaaagttgttttgaagattttttaaggggatttgcgggtagggataggaagtattgattatattgtgatgtgtttttttttagtttttagagagttcgcgatttttagtagggtagtgtggttagggtgttcgagtttaggtttaggaaggtttaatggttataatttattaagggttttttgtttgtcgggtattgggttttatttttatatgtatttttttttttagttttatttttttttttgaaagggagatgtttatagttggggaaattgaggtttagagagatgattaaggggagttaagaaagagaggtagagttttttgtaggttttttttattttatggattgagagaagttagggttaggatttttgggtagttaaagatcggtacgtttgttttgtattttatttggtttttatttttttttgtgagattttagggggtggtttcgttttttttttgttgggtaaggagtttttttttgttgtttgatgttttggatattgagtttatatttaggtagggttgaatttttttttttcgtagtttttgaggttagtaggttttgggttttataattgttttttgttgagcgattttttggttagatttttgggcgtgtacgtagtagggaggtatgtatttgtgtgcgtgtgtgtttacgtatgggaatataggtgtatgtatgtatgtatgtgtatagggtatatttatgtgagggttttttagatttttttttaaggagtaaatgatatttttttatagtgttaggtgtttatttaggatttttaagggtgagggtggagcgagagcgtggaaaggtttaaggtaggttaggtaggagtatagttttagatggttttttaagatggttatatagagtttagttagatattaatgttagttaagggttggttagggtggttttcgggaggtgtaggggtggggttatttaagtttatttatttttttttttatttatttaggaggtaattataggagtttgtttgtagttaaaagatgtttttagtttttttttatttattaggttttttttttgggtataggtttgagtgtgtagtttaggtagttattggtattagagatggaatttgtttgaatttaagggagttttttgtggttaattttagttttataaattggaagggtgtggtaggtagtcggagtttagtggtttatagtgttttttttgggttggtaggtttgtgtttcggttatttgttttttagtaagttaggtttggatattacggttggttgagtgtaagttagtttttgttttggtagtttttttttttgtttgtgagggtgattttattttgattttatatttgtagtgatgtgtagattatttatttagttttgagtttagttaggtaagagggcggggttttgtatatagtaagtaagggagcggttggtttaagggtgttttgggtttaggttttttggttttttttttttaagggtttatgggtttttttttttttatttttttgcgtttaagtgtaggttagattttaaaaagtagtcggggatggggcgagaatagaggatttttttattgagtttatatttaattttatttagaatttttttttaggtttagttgttgttttttattaggggtaaatgtgtttatgcgtattatttttattatttttttgggggaaaattggatttttttttttttttcgttattcgtttttcgattttgttagtttattttttgagagtttttttgtgtaagggatgtaagggttattagtattaggtttttgaaaggacgtcggagttagttttcggtttttaagggttggattagtgttggaggggggaattataaattgtttttttaggattttattttttttattattttaggatgttgaaaaaggttattttgtttttttttttttgtttagttttttttcgttttttgttttcggttttagtagaggtcgcgtttttattgcgtttttcgtttttgagaaatggcgtagtaagcgtttcgcggagagtttggaggcggggcgtttttttttgagttcgcggggtcgtatttcgagttagtcggttagatttgtatttcgcgtagtatttttgttttttttgtgtagcggaaagggtaaaaggtagggattgtaagcgggcgcgtatcgggtaggaagagcggttttgcgtaggtgcgcggattcgggtttttgggttttattttcgtcgcgtatttcggggttcgtattcggtttttgtcgggtttttttcggtcgtatttcgttttcgtatttcgtttttttttaagttttattcggtttaagtcgcgcgtttcgtattgagtttttatacgcgtcgcgtttcggtcgtatttcgcgtagttagagtaagtattggagtttcgttttttttcgtattttattcgttttcggtttcgtttggtttatttttggatcgttttcgtttcgtttcgtttttattcgttttttcggcgtagtcggcgtttatttcgttttagtttcgcgatcgaagtagggcgcgtagtagcgttgagtgtttcggaacgtgcgtcgcgtttttagtgttcgtcgcgttcgtcgcgtttcgggcggggatggggcggttagattgagcgtcgtattcgttatttagattcgtcggttttagtcgtagtttttttagtcgtggttttagcgcgtacgggcgatggcgaaggcgacgttcggtgtcgtttttattacggttgtacgtttttttatttttggtgaatagggttttaggtttaagatagtagtatttttgtgtgtttttgttatttgtatatttatattgtttgttatagtatgtggtattgtttattttttggtttgtgttttttattaaagtgtaagttttaggagggttgggattaagtttattttatttattattttatatttagatatttattgagtgatttatatatttgtaggtttaattttttttttttttttgagcgttatatttaaaaattagattgttattgggcgtagtggtttatttttgtaattttagtattttgggaggtcgaggtgggtagattatgaggttaagagattaagattattttggttaatatagtgaaatttcgtttttattaaaaatataaaaattagttgggcgtggtgatatacgtttgtagttttagttatttgggaggttgaggtagaagaattgtttgaattcgggagatggaggttgtagtgagttaagattgtattattgtattttagtttggtgatagagtgagatttcgtttaaaaaaaaaaaaaaaaaaaaaaattagattgtttcgtagatgcgtatgttttttttttaaaggtattttaaattattgtgtttaaatttgtattaatttttttttgattttattttagttagtgattttatatgtatgtatgtatatatatatatatatatatagatatatatatatattatatagtattatattgttattatttgtttatttttttgttttttttattagattggttttgtttttaaaattgagattatgtggtattttttgtattatataattgatacgaaggtattcgattttttttagttgatttaaattaatagaaat

SEQ ID NO: 392 - DNA, 6120 bp, Artificial Sequence
  chemically treated genomic DNA (Homo sapiens)
atttttattggtttaggttaattaaaagaaatcgagtgttttcgtgttagttatgtgatataaagagtgttatatggttttaattttgaggatagggttagtttagtgaaggagatagaaaaatagataaataataataatatagtgttatgtgatatatatatatatttgtatatatatatgtgtgtatatatatatatatataaaattattgattagagtgaagttaaagaaaaattggtatagatttaaatatagtgatttgagatgtttttgagagaaaagtatgcgtatttacgaggtaatttgatttttttttttttttttttttttagacggagttttattttgttattaggttggagtgtagtggtgtaattttggtttattgtaatttttatttttcgggtttaagtaatttttttgttttagttttttaagtagttgggattataggcgtgtgttattacgtttagttaatttttgtatttttagtagagacggggttttattatgttggttaggatggttttgattttttgattttataatttgtttatttcggttttttaaagtgttgggattataggagtgagttattgcgtttagtggtaatttgatttttaagtatggcgtttaggagagagaagaaggttagatttatagatgtgtgagttatttagtaaatatttgggtataaaatggtgaataaaatagatttggttttaatttttttgaggtttatattttagtaggaagtataaattaggaaatgggtaatgttatatattgtgataagtagtatgaatgtataggtgataagagtatatagaagtattgttgttttagatttgaggttttatttattaggggtgaaagaacgtgtaatcgtggtgaagacggtatcggacgtcgttttcgttatcgttcgtgcgcgttggggttacggttggagggattgcggttagggtcggcgggtttggatggcgggtgcggcgtttagtttggtcgttttattttcgttcggggcgcggcggacgcgacggatattgggggcgcgacgtacgtttcggggtatttagcgttgttgcgcgttttgtttcggtcgcgggattgaagcgaggtaagcgtcggttgcgtcggaggagcgggtaggggcggggcggggcgggggcggtttaggggtgggttaggcggggtcggaggcgggtggggtgcgggaaggggcggggttttagtgtttgttttggttgcgcggggtgcggtcggggcgcggcgcgtgtaggagtttagtgcgggacgcgcggtttgggtcgggtggggtttggggaggagcggggtgcgggagcggggtgcggtcgaaaagggttcggtaggagtcgggtgcggatttcgaggtgcgcggcggggatggaatttaggagttcgggttcgcgtatttacgtagagtcgttttttttattcggtgcgcgttcgtttgtagtttttgttttttgtttttttcgttgtatagagagggtagggatgttacgcgggatgtaggtttggtcgattggttcggggtgcgatttcgcggatttagagaagggcgtttcgtttttaggtttttcgcggagcgtttgttgcgttattttttagaggcgagaggcgtagtgggagcgcggtttttgttggggtcggaggtaggaggcggggaagagttgagtaggggaagagaggtagaatagttttttttagtattttggggtagtagagagggtagggttttggaagggtagtttgtgatttttttttttagtattggtttaatttttggaaatcggaaattggtttcggcgtttttttagagatttggtgttggtggtttttgtattttttatataggagaatttttaggagatgggttggtagagtcggagagcgagtagcgaggaggaggaaagaatttaatttttttttaaagaaatgatggaaatgatgcgtataaatatatttatttttaatagggagtagtaattggatttgagaaggggttttgggtgaggttggatgtgggtttagtggggaagttttttgttttcgttttattttcggttgttttttgaggtttggtttgtatttaggcgtagagggatggaagaagggaagtttatgggtttttgaggaggaaaagttagggaatttgggtttagggtatttttgagttagtcgtttttttgtttgttgtgtgtagaatttcgtttttttgtttggttgagtttagggttgaataagtgatttgtatattattgtagatatgaagttaaagtgaagttatttttataggtaggagggggagttgttaagatagaggttggtttgtatttagttaatcgtgatgtttagatttggtttgttgaggggtaggtggtcggggtataggtttgttagtttaggagagatattgtgggttattggatttcggttgtttgttatatttttttagtttatggagttagagttggttataaggggtttttttgggtttagataggttttatttttggtgttagtggttatttaggttatatatttaggtttgtgtttagggaagggatttgataggtagggaggggttgggggtattttttggttatagataagtttttgtgattgttttttaggtgaatgaagagagaagtgggtaggtttaaatagttttatttttgtatttttcggggattattttggttagtttttggttgatattgatgtttggttgggttttgtgtggttattttaaggggttatttggggttgtgtttttgtttagtttattttaggtttttttacgttttcgttttatttttatttttgggggttttgagtgaatatttgatattatgagagggtgttatttattttttggaaaaaggtttggggggtttttatatgggtgtattttgtatatatgtatatatgtatatatttgtgtttttatacgtggatatatacgtatatagatgtatatttttttgttacgtgtacgtttagggatttgattaaagggtcgtttagtagaggatagttgtgaggtttagagtttgttggttttagggattgcggggaaaggagatttagttttgtttgggtgtaggtttagtatttagaatattaggtagtaggaaggagttttttgtttagtagaggggaagcgaggttattttttgaggttttataaggggaggtgggggttaggtgaagtgtaaagtagacgtgtcggtttttggttgtttaggagttttggttttggttttttttagtttatggggtggggagggtttgtagggggttttgttttttttttttgattttttttagttatttttttgagttttagtttttttagttataaatattttttttttagaagaaggggtgaaattagaaagaggggtgtatgtgagggtagagtttagtgttcgataaataggaagtttttaataagttgtagttattgggtttttttgggtttgggttcgggtattttggttatattgttttgttgagggtcgcgggttttttgggagttggaggagggtatattatagtgtggttagtgttttttgtttttgttcgtaggtttttttggagaatttttagggtagtttttatgaagatatatattttgggttttttattttttaaaaatttatgttaaaaaaaaagtttaggggttaggttaagggtttatatttgtaattttagtattttgggaggttaaggtaagaagattatttgaggttaggagttcgagattagtttgggtagtatagtgagacgttatttttaagaaaaaaaaaaaaattttttaagaggttttggtgtaggtatttgtttggagtgattagatttgagtttgaattttgttatttatagttgtgtgatattgtatatattattttttagttttagttttgttattttttaaatggggattgaaatagtgtttttttttggtgattgtgaggagatggtatttttaaggttttgttttagtgtagggtaagatgtttagtgggtaggcggtttatattatttttttgtagtatgtgagaatttggaggttatttattgtttttgagtaggtgaagattatttggagtattttaggtttgattttaaagtattaaaacgtagtatagggaagggagggaggagggaaatttattatggatagagatttgggttatgtttgtgtaggtttgtttggcgggaggcgggcgggatgttttgtgttttttgatttaggtgatatgggggtttttgtttgtattgagaagtatggttggagtgaggttgagtgtagtgataggaaattttggttttgggggtgtttcgtgatttgtaggtagggggaaatatatttaagagcgtagttcggttttggtgatattggaaggttgggtggtatttttggaattgttgatcgaggttttttagagtgggcgtgggtaggggtttaggttttttttatgggtagtgtgatatggtggttggaagtatagattttgaggttggttgtgtgtattgttagtaaagtggtcggtgttttagttttttatttgtttgttattgttttttgtttttttatcgggttattgaggtgaggggtaggtttattgttttttacggtttgtttttttggttttgttgttggtgttttttagggtagttgcgaggaggaagttagtgattattagttagtttttagggtatttagaggggttgtttagttagtttattttatgttaaatatgttgtttttatgagtatgtttatagaatatttggtttgggtttgtagggtgtggttgtgtaggataggttttatttaattgtgtaggttttgtttgtttgtgggttttaggtgtttttaggggtgtttgtagaagagtttttaatttggtttgggagaagattttttttgtattttttttggggtttgattaggagtcgggtgttcgaataaaagtaataggggtttatatatttattagagattttggggggtttagagaaagtttatttttttttattagtttgtttatttatttttattaatttattattattattttgtttattttagttttttatgtttttatattttgtttttttgtgaatttttttttttcgtttttttttttttttttttttttgttcgttttttttttttttttttttggaggaatttttatttttttcgtttagtattagagttaggttagttatattatttagtagtttttgtggttttttttgggtttcggtgttattttttgtgatatgagagtaataatatgggtattgttttgagggtaaagtttaatgatgtattagtgggtttagtagatagtggtagtgttttttgtttttttgttagggtttttttttttatagggggttgtttaggtgtggtttggggtagtagtatggtgggaaggttgtagggggttttgagtgtgtttgcgttttgttttttgtttttatgtttttggcgggttatttagagttttcgtgttttagtgggaaggtagagttttttttttttaagtttttcggggatgtagatagttagtttgtatagagtttttagtttagggacgttggttattagtacgagttgtcgttgttattagtttttgttttgttagttgtaggagttgaggttatgaggtttaagtagttattggatggtgttagggtggtatagaaagttagggggttttggatttaaatagttcgggttttttatttgtataggtgatagtacgtatttgtgtgttgtgtggggttggtggttaacgagattggtttgttagagtatatatttgttttttgtattttggtttggttataggttttgagttttttttatgtaattagaagtttttttagtgttggagggatttgggtttttagagttttatttgtcgtagaggattatttatttgattttgaattatatattcgggagtggtgggttgattaatgtttgcggttatttaggtttttgggggattggtttatataaggtagttttagttcgaggggtttagaggtcggttggtttgtggat

SEQ ID NO: 393 - DNA, 6228 bp, Artificial Sequence
  chemically treated genomic DNA (Homo sapiens)
taaatatgttattttattattttttagttatcgttatttttgatgagaagttaattattaattatgttgtttttaatgtgatgtatttttgttttttttttttttttttagtgtttgtaatgttattttttttatttggtttttggtattttgattatgatatttaggtgtgattttttttaagtttttttttgttttgtttttgtttttgttttttattttgggtttatttagttttttgattttgtaagttaatggtatttatttatatggagattttttaattttttaaaaaaataattgttttgtgttttttttttttttttttttttttgggatttttattatatttgtgtttgaatattttatattgtttggtaggtttttaaggttttgtttatttaatttgtcgttttttgttttttggattgtataatttttgttttatttttaaatgtatagttttttttttttgtcgttttagattcgtttttgaatttatgtagtgaatttttgtaatttttagttgtagaaattttatgtgattttttttttataatttttatttatttatttaaagtatttattggtttattgttaataaaattttttttaattttttgaatatttttttttaattttttgagtatagttataataatttttttgaagttgtgttttaatttattgtttgtgttggtttttttggttatatttttttgttttattgtatgtttagtaatttttggttgaaaattagatattgtagtgattttagattttatttatttttttaaaagttgttggttttttgttttagtaatttttttggatttaaattgtagaattaattttttttatggtgtgtagttattgatattatagtgtagtttttattataatatttttttttgttttttagtttggttttttaaaggtgttttttatttttttattatatgatgatgagataattatttagatagaagttatgtttaggtattttgaataattaagttttttattttttgttgttagagttgtgtgtggtcgaagaaatatatttatatgtataagtttttacggaaggtgggagggtgagataggggtgagggttgaaaaagtatttatttgtttcgataggtattttttgtggtaaaattttgtttttataaaaaatataaaatattagttgggtgtggtggtatgtgtttgtggttttagttatttggaggttgagatgagaggattatttgagtttaggaagttaaggttgtaatgagttgtgattatattatggtattttagtttgggggatagagtgagattttgttttaaagaaggaaaaaaaaaattatttattgggtataatgtttattatttaggtgatgggtatattaaaaatttagatttcgttattatgtaatatatgtattgtaagaaatatgtatttgtattttttaaatatataaaaataaataaattttaaattaaataaaaaaatttttgtatatcgttaggttttttttggtttttattttttgttgtttttttgggttttttttttagttagagatgtgtagggagtttattgttttagtttttttatggtttgtttatttttaagtttttattataattttggttgattttttgtttattatgaaaagaagttataattttaagttagtaaagttgtagatttttattttttttttagaattgattttatgaattttaatttataaaattgtagatttttattttttttattttagattaaatttattaatttttgttggtatagttattagttttttttttatttatttatttatttaatttatgtttgaggtggagtttcgttttgttatttaggttggattgtagtggtgcgattttagtttattgtaatttttgtttttcgggtttaagcgatttttgtgttttagtttttttagtagttaggattataggtatttattattatatcgaaataatttttgtatttttagtagagatggggttttattatgttgtttaggttggtttcgaatttttgattttaagtgatttgtttcgtttttagttttttaaagtgttgtgattgtaggtttaagttatcgttttttgtttagttattggtttttagtgatagtttttaaattaagtttattatttttattaggtaatttgtgtttttttttatttaggttaggggttggggagttttaggtaagatgttcgtagatttatggttattttgatgtaggttatttttaagattaaatatttattagattattgtttgtttttggtttttttagtatttagaaataaatattttttagtatttagaaattgttgtttttgataattttgtttagttttatatttgttttttttaaaaagaaattggttaattttttagatttttttgaggtgaattttggattggattggttttatgttttttttatttattttattgtttatagtttttgattttgattagagatgtattgatattaggaggttggtgaaggtatatggaaggagagttgaattttgtataagttattttaaatgtataaaaataaatggtagaattagtgatgttgaacgttgaattgggcgttttagagttagggtttagttttagtttcgttttgagaaaatcgttttgaggttttttaataaaaggttttttagttttttttaataagtgttattgtttttatttttttttcggggttttttttttatttttttttcgttttttttatgggttcgtgattgtgagggtgaaaatggttgaaattaatttttatttttgtttagatatttggaatttatgagtaaagttatttttttgttttttttttgagtggttgttggaatcgtgtgtgtgtgtgtgtgtgtgtgtgtgtgtgtgtgtgtgtgtgtgtgtttggtattgttattttttaatttttgtttgttggggtgggtataaaggtgatgttttattatagattatataagggttagtatatttttttgtaaatttttatatttttttttattttaattttgggtagatagattatgtattttttttgtaggatgttgggttttttgttttttattatattttttatatttttaagtttaagtatataaaagttgtttaaacgttagttatttaggttttattgaaaaaatgttagaggcggtttaggtagcgttataatattttggtttagtaaaagatttagtttagggatttgtttttgagagtttgtaggagttttagttatgaattatgtttaaagttttttttatggtagttttttttagtgatttttgatagaattattgttttcgcgtttggtttagtattgtgtttcgttgaggtttttgtggttatatttattacgttttattgtagtgatttgtttattaggttttttttttaagttttttaggttgagatttttagaggaggatggagtgtagttgcgttggtatttttagtttttagtaggtgtttagtatagagtaggtgtttagaaaaatagtgttgtattaattgaattgaaataggaagattaagttattttattttaaattagttattttttaaattagaagttcgtagagtttggaatttatgttttatgtttggatttatgtagtaggtattaggaagtgaatgtaagagtaaattaataggagttgttatggattgagtaggtttagggttttggatattgttgtgagttttttgttattacgtggagaagattagttttgggatttaaagtaattagttatatttatattagtttttaggtatttgtagtttattatgtgttaaatattgtaatagatattttttatgtatgaatttatgtatttttataaaattttttggggaagtgaaatagattatttttatagtgttttaaaattttagaattttgcgttgttgcgtttattgatatgaatatttgttaaatttgtaatttatagtttagtattgttttagtttaatttaaggaaatgaattttttgagaaagttgatattttggattatggggtagaagttattttgtttgttttttatatttatttttaaggatttaagattatgaagggagaagagagagtttatcgagtgatttttttttataagttaatattaagatattagtggaaaggaattagttgattagtggtttattgtgtttggttggattagtaagattttgacgttattatagaagtttttttggttttattggttttttgattgttgtgtataggatgttatttattattttagatattatttattattttagatgttgggatttttttttcgttatttttattatttttgttttttatttttttgagtttttatagttaagtaaatttttattattgaagaggttttgagatttaagttaattaattattggttagggtattgtaaaatatatgggaaattagtttttattaaatattaattttatgtttattatttatatttattttattatttaatgttgatagtattttgtgagttagttattattagtattatttaaagataaagtaaaattagtgaggttgaaagaacggttgttttggtgtatatagatggtatatggtagagtttaagttttttttatgagatttgtagcgtttgtttatacggtagggtaaattattttgtagagttagtatggaggtttgttaattttgtcggatttggtgtagaaaaaatattagtcgtgttgttaaattaaaattttaggagaaaattttttggtgatagaagggtattgtgatttacgttgtttagggttagggatagggtagttgtttatggtttttttttacgagtttttttggagtagagggatatttttaaatttagggagtttataggagttttagaagggttcggttggagggcggggtttttgttgtatttgtttattggggattggggaggttttgatcgtagatcgggggtgttgttatttttgtttgttgtcggtagaaagttataagttatgaaaattgattgagatgagaagaatttatttgggattggtttttgttttaggatggtgttggaagttgttcgttgtcgttaggagtttgttttattgtaagggtgtcgggatttgaagagttatggtgaaatattattgaagtattgttaaggtgaggttttgcgtttttcgggttttttatcgtttttttttaaattgtgtaaatggtgttgtaaggtttgtagtggggtaagtaagtaaggatattgttgtgggtgttatagacggaggaagaggtatgaatggatcgttgttttagttatgaatagattgttttatggtttgtgtatttttagttttgagaatttttaatttataaaaggttatttatttagggtagattttgttttttggaaaaggtagtgaatgtgttatagaggagagaagggacgtgggatgtagagagggggttgagcgggtatatataggttattgttgcgttttcggcgagttattcggttttttgataggaggtgatattgattgtgtagagttggtagaggttagtggttataggcggggagtatttggtttaaggtaaatgattgttgttttcgttttatttgtttgtttttgaatgaagttgttttattttttaggtatttaggaatggggtaattgaatagatgtaatgatgatttttttgtttaagagatttattttattaggaaatattaattgtgaaaaggaaagtatagttgattatatattttgaaaggatttgtgtaaattgtaaggttttgataacgtttttatttatttggtaatgcgggtggatgaagtcgggtttagttgttttattattataaagtttttttttatatagggtttttatgtagtgcgcggcggtggtgtggattgttcgttaattatatttaaattatatggaatttaataaacgtttataatttgttttgagtattattttataattttggttaattatttagaaggtattttgggaatgtaatgttttaaaggtttttttggattatttggtatgaattttgtagtttaaggtgtaattttgtacgagttattttattttattgtttttgtttttgtgtagcgagggttgtgggtggatgatttttgagttgtttttagttttaatattta

SEQ ID NO: 394 - DNA, 6228 bp, Artificial Sequence
  chemically treated genomic DNA (Homo sapiens)
tgaatgttagggttggaggtaatttagagattatttatttatagttttcgttgtatagagatagaagtaatgagatgaagtgattcgtataagattgtattttgggttgtaaaatttatattaagtgatttagggaggtttttgaggtattgtatttttaaagtgttttttaaatagttagttagagttatagagtggtgtttagaataggttgtggacgtttattgaattttatgtgatttaagtgtggttggcgggtagtttatattatcgtcgcgtattgtatgagaattttgtgtgaaagggggttttgtggtaatggagtagttgggttcgattttatttattcgtattattagataaatggaaacgttgttaaaattttataatttatataaatttttttaaaatatgtgattaattatgtttttttttttatagttggtgttttttggtgaaatagattttttaaataagaagattattattatatttatttagttattttatttttgaatgtttgaaaaatggaataattttatttagaaataaataaataaaacgaaggtaatagttatttgttttgagttagatgtttttcgtttgtgattattaatttttgttagttttgtatagttaatattattttttattaagaggtcgagtgattcgtcgggagcgtagtagtggtttgtgtgtgttcgtttaattttttttttatattttacgtttttttttttttttgtggtatatttattgttttttttaaaaagtagaatttattttggatggatgattttttataaattaaaaatttttaaaattggaaatgtataaattatggagtaatttatttatagttgaggtagcgatttatttatgttttttttttcgtttgtggtatttatagtaatgtttttgtttgtttgttttattataggttttatagtattatttgtataatttaaaggaagacgataaagaattcggaagacgtagggttttattttggtaatgttttagtggtgttttattatagttttttagatttcgatatttttatagtggagtaggtttttagcgataacgagtaatttttaatattattttaaagtaaaagttagttttagatgaattttttttattttaattagtttttatggtttgtggttttttgtcggtagtagatagaggtagtagtattttcggtttgcgattagagtttttttagtttttagtgagtaagtgtaataggggtttcgttttttagtcgagtttttttgaagtttttgtgggttttttgggtttgggggtatttttttgttttaggaaaattcgtgaggaaggattatgagtagttgttttgtttttggttttgggtaacgtgggttataatgtttttttgttattagaaagtttttttttggggttttggtttaatagtacggttggtattttttttgtattaagttcggtagagttagtaaatttttatgttgattttataaggtaatttgttttgtcgtgtggataaacgttgtagattttatggagagggtttgggttttgttatgtgttatttgtgtgtattagggtagtcgtttttttagttttattggttttgttttgtttttaaatgatgttaataatagttagtttataggatattattagtattaaatggtagaatgggtatgaatggtgggtatagaattggtgtttggtaaaagttaattttttatgtgttttatagtattttagttagtagttagttgatttggattttagagtttttttaatggtggaaatttgtttggttatgaaaatttagaggagtagagaataagaataatggaggtaacgggagaaggattttaatatttagagtggtgagtggtgtttggagtggtgggtggtattttgtatatagtagttaaaggattaatgggattaagaaggtttttgtgatgacgttagagttttgttggtttagttagatatagtgagttattggttagttggtttttttttattagtgttttgatattggtttataagaggaagttattcggtgggtttttttttttttttttatagttttggatttttgagagtgggtgtgggaggtagatagggtagtttttattttatggtttagaatgttagtttttttaaggagtttatttttttggattggattgagataatattgagttatgagttgtaggtttgataggtgtttatgttaatagacgtagtaacgtagagttttggggttttaagatattatggaaataatttgttttatttttttaaggggttttgtgagaatatatggatttatgtataaaaagtatttattatagtatttagtatataataaattgtaaatatttggaagttgatgtgaatgtggttaattgttttaagttttaaagttgattttttttacgtggtagtagagggtttataataatgtttagaattttgggtttgtttagtttatggtagtttttgttaatttatttttatatttattttttgatatttattatatggatttaaatatgaaatatgagttttaaattttgcgagtttttgatttaaaaagtgattgatttgagatgaggtaatttagtttttttattttaatttaattaatgtagtattgtttttttgaatatttgttttgtgttaagtatttgttggaggttggggatattaacgtagttatattttatttttttttgagagttttagtttaaggagtttggagaaggggtttgataagtagattattgtagtggagcgtagtagatgtagttatagaggttttaacggggtatagtgttagattagacgcggaggtaataattttattaggggttattgggggaagttgttatggagaaggttttgaatatgatttatgattaagatttttatagatttttagagatagatttttaggttgagttttttattgaattaggatgttgtgacgttgtttgaatcgtttttaatatttttttaatagggtttaaatagttgacgtttggataatttttatatatttggatttgagggtatagagaatgtagtggagagtaggaaatttagtattttataaagaaaatatatggtttgtttatttaaggttagagtgggaggggatgtgagagtttgtagggaggtgtgttggtttttatgtgatttgtgataagatattatttttatgtttattttaatagatagaggttggaaaataataatattagatatatatatatatatatatatatatatatatatatatatatatatacgattttagtagttatttagaaagaaaataaggaaatgattttgtttatgggttttagatgtttgagtagaagtgaaagttaattttagttatttttatttttatagttacgggtttatgagaaaggcggaagagaggtggggaaaggatttcggggagaagatgggaatagtgatatttgttaggggaggttggggagttttttgttagaaaattttaaagcggtttttttaaggcgggattgagattagattttagttttgaaacgtttagtttagcgtttagtattattggttttgttatttatttttgtatatttgaggtgatttatgtaaaatttagttttttttttatgtgtttttattagttttttaatattagtatatttttgattaaaattaaaagttgtaggtaataaagtaagtggaagaaatataaaattaatttagtttaagatttattttagaagggtttaagaagttggttaatttttttttgaagaaaataagtataaaattagataaaattgttaaaaataataatttttgggtattagaaaatgtttgtttttgggtattagaaaaattaaaagtagataatgatttgataagtgtttaattttaaaaatggtttgtattagaatggttatgagtttacggatattttgtttgaagttttttagtttttggtttgagtgaggaaaagtataggttatttaatgggaatggtggatttggtttgagggttgttattgaaaattagtagttaggtagggagcggtggtttaagtttgtaattataatattttgggaggttgagggcggggtagattatttgaggttaggagttcgagattagtttggataatatggtgaaattttatttttattaaaaatataaaaattatttcggtgtggtggtgggtatttgtagttttagttattagggaggttgaggtataggaatcgtttgaattcgggaggtagaggttgtagtgagttgagatcgtattattgtaatttagtttgggtgatagagcgagattttattttaaatataaattaaataaataaatagataaaaagaaaattagtagttatattagtagaagttggtagatttggtttgggatgggggagatgagaatttgtagttttatgggttaaagtttatggaattagttttagggagaaaataaaaatttgtagttttattggtttgagattatagtttttttttatggtagataggagattagttagaattgtgatgagaatttggaagtaagtaagttatgagagggttgggataataaattttttgtatatttttgattagggaagaaatttaaaaaggtagtaaaaagtgagagttaagggagatttgacgatgtgtaaaaatttttttgtttagtttaaaatttatttgtttttatgtatttaaggggtataagtgtatgttttttataatgtatatattgtatagtggcgaagtttgggtttttagtgtgtttattatttaaatggtaaatattgtatttaataggtagttttttttttttttttttgagatagggttttattttgttttttaagttggagtgttataatgtagttatagtttattatagttttgattttttgggtttaagtgatttttttattttagtttttaagtagttgggattataggtatatgttattatatttagttagtgttttgtattttttgtagagatagggttttgttataaaaagtatttatcggaataaataggtatttttttaatttttatttttgttttatttttttatttttcgtgaggatttgtatatgtgaatgtgttttttcggttatatatagttttggtagtagaagatgggaggtttagttgtttaaggtatttgagtataatttttgtttaaataattgttttattattatataatagaagaatagaggatatttttagggagttagattgaaaaataaagaaaaatattataataaaaattgtattgtagtattagtggttgtatattatggaggagattaattttgtaatttaagtttagaaaagttattaaaatagaaaattaataatttttaggaaagtgaatggaatttagaattattgtaatgtttagtttttaattagaaattattagatatataatgaaataggaaagtgtgattagaaaaattaatatagatagtagattaagatataattttaaagaagttgttatagttatgtttaaggaattaaggaaaaatgtttaaagaattaaagaaaattttgttaatagtgaattaatagatattttggatagatagatgaaaattataaaaaaggaattatatgggatttttatagttgaaaattataaaaatttattatatgggtttaagagcggatttgagacggtagaagaaagaagttgtatatttgaagatagagtagaagttatgtaatttaaagaatagagaacgataagttaagtaaatagagttttagagatttgttagataatataaagtgtttaaatataaatgtaataggagttttaaaaggagaggaaagagaaagaggtatagaataattatttttttaaaaagttgaaaagtttttatgtgagtaaatattattaatttatagagttaagaaattgaataaatttaaggtaaaaaataaaaataaaaataaaataaaaaaaaatttaaagagaattatatttagatgttatagttaaaatgttaaaagttaaataaaggagataatattgtaagtattaagagaaagagagagaaatagagatatattatattaaagataatatgattggtggttgattttttattagaaataacggtgattggaaggtggtggaatgatatgttta

SEQ ID NO: 395 - DNA, 5986 bp, Artificial Sequence
  chemically treated genomic DNA (Homo sapiens)
tttgatatttttaataaaatgttttttgtattggtttgttaagatttagatttatgggtagttttattaaattatgttttttagtaaagttgtagtatgtttggttgaatatatagatattttttattttgtttattgttattatggagtggatggtgtataggtatgatatttgaagttggtttttagggttatgttttttaggttattggttaatagtattggttaagttatttaggttgttggggtttagtgttatatttgtaaaatgatttttaggttttttataagatttgatattttatgattgtttttttgtatttaggttagagtagtttttggtttaggagggttatatagtaggtatgtttttttttagtattagtagcgtggttacgaatatgggatgtggagttagattgtcgggatttaaatttagttttatttattagtagtgtgatttgggtaatttatttatttattgtagttttataagttataagtagggaatgatgttataatttattttatagggtgaatgtgttataatttattttatgggttgggagtattataaaatattttatagggtgggggtgttttggtttattttataaggtggaggtgttatgagttattttatagagtagttgtgattagtaaattttaaatagtttggtatatagtgagttttttttaagtattggttaggattattattataaaattatttttattttttaaagtttaattttaatgtgtttttttttaaaatattttatttggttattttaaggaaaaaataatttttttttttttggattttttatagtaaagtgaatagattttattttagtatttatatttttttttttatttttttttttttaaaatatagttggtatttataatgtgttaaatatttttattataaggttttttatttaagtttcgtaaagtaagagagttgttatttattttaatttatagattagaaaattgaaggttagtgtagggaaggggtttggttagggtgatatagtttataaatgatagttttgtaattttttttatgtttttcgagtttgttattttatagtaattttttatattaattagttatgtagtttattttttaaatttgtttattgttatttagggttacggatagttgatttttatttttggaattagttatttaatgttggatatattgtaggtttaaaattaagtatgttaaatagaattgtcgatttgaattttttatttttatgatattatttttttataaattttaaaaaattatagtgattataagttatgttaatttaatatatattttttatgtatgtaagaggttaacgaatggttgttggtttttttataggaaatattatattgatttttgttaggtttttgtgttttttttgtgttttaattattttttagttttatttgtttatggaaataggtagtttgggttatttggtaagtaaattgataggtttattttatgtgggtggtaatatgagagtttatttagattttattagtttttttatggaaatagattttttgttaatattgattgggtttaggattttattttattataaaaggttttttgttttatttttttaattgaattttttttaaataagtataagaagagtagggtttgttagttgttggataggtatttgatttaatagtaagttttgtttatttattgttataatacgaggggggaagatattgtatttttaaaaattaattattagtaattatttttttatattaagagagattatagaaatgtttttaaattagaatttaggttatgtagaggagaaaggagaagtataaggaagggatagaagtaaatagaaggagaaaggtaagtttaagtttgagtagaaattatatggtttattttagaagaaattgatttggaaatgaaaaaagtttgagttattaaggtggggttttttaagattgttaggaagttttagtagtttagtttagggagtggagttttgaaggattgttttttttggatgggtattttaaaaacgtgtggttttaggtgtttgttatacgagaataatatattacggatttaagtgtatagtatgtgaatttatttttgagaaaataagtatatgtatataaatatttgaaaagaaaaatatttagagatgtgttgtgttttttttttttttgtttgtattttttggttttatagaataaatatatattgtatgtgaattttaaaatgaaagtaaaaaatgtataaagggtaggattttgaaatgaataattatgttgaaattttataagttatattttattagatgtaataacgtttgtaaatttttggaggtttattggagaaggtgtttgagggtttaatatttttttttttatttaatgtttttttttttaatatatagaggtaattttgtgaatttgttagtggtttttgtgatttattttattaattttttatataaaattttaaaaatttttatttttagtgtgatgtatataaaagttttattttttttttttttttttttttttattattattaattttttttggaagatagggttttattttatcgtttaggttggagtgtagtggcgtgatttttttgttttagtttttttagtagttgggattataggtgtatgttattatgtttgttaatttgttaaaaaaattttttagagataggattttattatgttttttaggttggttttaaatttttgattttaagcgattttttttttttagttttttaatgtgtaatatgttggggttataggtatgagatattgtgttttgtttaggtgtgaaagttttatagatagaaaaatatgtatattagtatatagtattgggaaagattgaatagtattttggatattgggatttttatatttttaatatagtgttgttaatgttataaattaatttagtatttaaaaaaattaaaaagtaaattttttatttaattaattagatttatttaattagtattttgttttgaggaatgatgttttagttgtggatataaaaaattgataagagtttttatagttttttttttttgttttattagtaaaatacggaaatataaaaggtaaaagtattttataattatgtttaatgtgatattgtttttttaaaggaggtttttatttaaaaaaagtagatttttattgtttttataagttttcgagtaaattttttttcggttatagattttggatgtagaaaataagtttatttgggtaggtggatatgtagagtttgtaatggaagtaaagataaaaggaaggtatgttatttttatttttataggttttattttattttgatttttgttttgtttttgattattgggtaaagaaattagtgattatggtaaatagtatttattgtatttagaagaaatttattatatttttgtgaaagaattattttttttaaatagttaaaataatattttagggaaaaagtaattaagattttattatattgaatggataagatttttattatttttgtttaaaaattaaataatgtttttggaggatattttaggaattaataaataattttttgttttatatagtaaataataaaagttggtttttttaattttattttgagagttgtgtggtttatgttaggaggaaagttggttggagttaattatggttaatttaatgttaggttgtattttttagttttttttttattttatttttttgttatagtgggtttattatatttttaggttagtgagaagtgttttttagtgattggatgggttcgtttggcgttcgtttttatgtagatagagtaatgtttgtgtgggtgttttttgattaagattgatgagtgggatgtaaatattttttttttaatgtatgattttggtatagttagagggaatatgagtgatggtgttttaaagtagtaattttttgtttagagtttgagagttaaagttaaggatttatatgtatatttcggttttagcgagtttaaggtgagtaaagtttttagattattaataaagaaagattttaattattgggtatgtgaatttaaataacgatgtaattttataaagtaaagaagaatataagaaagtttgtttttttggtttattgtttaatattgttattttttatgattagatttgatattagattgagggttgaagtaattgttttagtagaattagaaaattaatgtatttattttttagaaatattttaagttttaatgttttatatgattttgggataaaaaggaagagtttttttattttgtaaatgtatttatttttttagtttttttaaattttttttgatagtatttgttagtgtatttttatatattttttttattttattttattttaggtatttattttgattttaaatttttatagatattgaaaattatatttgtgtaatttatgttaaagatttggttatgattaggggttgtaggtgttatttataataatgttagtgttttatagtggtttgggtaatttggttaaattataggtcgttattttataaattgtgagttgtttggagttaaattttttgaagttttattatatttaatttaatttaattaatatatatagaatgtttaaaaagtaaggagtattttgataaggtggtttggagaatggggtaaagatgatgaatttattatttatagtgggaggagttaaaagtataaagtgttttttaaaaattaatatatttataaaatttaaagtaaaggtagtagaaaaattgtagttattgtgtaatttattttataattttatattagttttatttattaaaattagtatttatattattttttaataggaaatcgttgaggaaaagatatgaaggttaaagagaatttatttagatgttgtaaatatttattttaattatttattttgtttaggatgataatatggatataaaatttattttagaagaatttttttttaaaagattatagtaaaagaagaaaatgttattaaataattataaagaacggttttttgttttgattaaaataaattttttttattatgaatatgataaaatggtgagatattatgtgttttattatttttatattatttattattttttttaagtttttataaagtatttgattataatgaaagaatattaggttttttaatttatattgtgaagatttttttttatttatttattatatgatttttttttaatgaaagtataatgaatttaagataaaggattttaaaatattagttaattttattaaggtaaattataattttagaatagtggtttttaattgagggtatttttgttttttaggtgatattgggaaaagattggagatattttgggttgttttaattgggggataggaatagtaagtgttaaagatatttagtgagtagaggttaagaatgtagttaattattttgtagtgtataggatagtttttataataaagaattatttagttttaaatggtaatagtgttttaaaataatgttagaaataagattatttttgtatagttgagaattttattatagtaaaaatattgaaatattgttataagattgagttaaaatgaagatgttttgtagaagttaaattttgatttttttgagtatattaattatatggtaggtgatttgaaatatattttaagataattaaataagattattaattattggaatatatgtgtttgtgtttagatttaaggaatagattatgttgttattggattttgattattacggggtaataggaagtgattttttattgtttattttttattttaattttttttttaggtataatttgggttttatgtttttttttgtgtattatgatgtattgtaggaagtattttatattttgttttttaatttaga

SEQ ID NO: 396 - DNA, 5986 bp, Artificial Sequence
  chemically treated genomic DNA (Homo sapiens)
tttgaattaaaaaataaaatgtaagatattttttgtaatatattatggtgtataaggaaaggtataaagtttaagttatgtttgagagggagattggggtggggggtgggtaatggagagttattttttattatttcgtaatagttaaaatttaatgataatataatttattttttgagtttggatataaatatatatattttagtggttaataattttgtttgattattttgaaatgtgttttaaattatttattatgtggttaatatatttaggaaaattaagatttaatttttgtaaagtatttttattttggtttagttttatgatagtattttagtgtttttattatagtagaatttttaattgtataggaatagttttatttttagtattgttttaaggtattattgttatttaaggttgggtaattttttgttgtgaggattgttttgtgtattgtaggatggttagttgtatttttggtttttatttattagatgtttttaatatttattgtttttattttttagttggaataatttaaaatatttttagtttttttttaatgttatttggggagtaaaaatgtttttagttgagaattattgttttaaagttataatttgttttagtaaagttaattaatgttttaaaattttttattttgaatttattatatttttattaagaaaaggttatgtgataagtggatagaagaggatttttatagtgtaagttaagaaatttgatatttttttattatgattaagtattttgtggagatttaggaaaaataataaatagtataaaaataatggaatatatgatgttttattattttgttatatttatagtaggaaaggtttgttttggttaaaataaaaagtcgttttttgtaattatttggtgatattttttttttttgttgtgattttttgagaagaagtttttttagaatagattttgtatttatattattattttaaataaaataaataattaaaatgagtatttgtagtatttaggtaagttttttttaatttttatattttttttttaacgattttttattaagggataatataaatgttgattttaataaatgagattgatgtaggattatagaataaattatataatagttatagtttttttgttgtttttgttttgggttttataaatatgttgatttttaaaaagtattttatatttttgattttttttattgtggataataaatttattatttttgttttattttttagattattttattaaaatgttttttattttttaaatattttatatgtgttggttgaattgaattggatataataaaattttagaaaatttaattttagatagtttataatttatgaagtaacggtttgtaatttgattaaattatttaaattattatgagatattgatattattgtaaataatatttgtagtttttgattatggttagatttttaatataaattatataggtataatttttaatatttatgagaatttaaaattaaagtaaatgtttaagataagataaaatgaggaaaatgtatgagggtgtattaatagatgttattaaaagagatttaaaagaattgaaaaaatgagtatatttataaagtaaaaagattttttttttttattttaaaattatgtaaaatattaaaatttaaggtatttttgaaaaataaatgtattaattttttaattttattaagatagttattttaatttttagtttaatattaggtttgattatgaaaagtagtaatgttgagtagtaggttagagaaataaatttttttatgtttttttttgttttgtgaaattgtatcgttatttgaatttatatgtttaatagttaaaatttttttttattgataatttgaaggttttatttattttagattcgttagagtcgaagtatatatgtgggtttttaattttgatttttaagttttaagtaaaaagttattgttttgaggtattattatttatattttttttggttatgttagggttatgtattaaaaagaagatatttgtattttatttattagttttgattaggaagtatttatataggtattgttttgtttgtatggaggcgggcgttaagcgaatttatttaattattagagggtattttttattggtttgggagtatgatggatttattatggtagaagagtgaaatgaaagggagattaagaaatatagtttggtattgaattaattatggttggttttagttagttttttttttaatatagattatataatttttaaagtggaattaagaaaattagtttttattatttattatgtagaataaaagattatttattaatttttaaaatgttttttaagggtattatttgatttttagatagaagtagtggaaattttatttatttaatataataaagttttggttattttttttttgggatattgttttagttatttaaaaaggataatttttttataaaagtataatgggttttttttgagtataatgggtattatttgttatggttattggtttttttgtttagtgattaaagatagggtagagattagggtagagtagagtttatggaggtaagagtagtatgttttttttttatttttgtttttattgtaaattttgtatatttatttgtttagataagtttattttttatatttaaagtttgtggtcggaagagaatttgttcggagatttatggaaataatgagggtttattttttttgagtgaaagttttttttggggaggtaatattatattggatatggttgtagggtatttttgttttttatattttcgtattttattaatgaagtagaaggagaaaattgtgaaaatttttgttaattttttatatttatagttgaaatattattttttaaagtagagtgttaattaaatagatttgattagttgaatagaaaatttattttttaatttttttagatgttgaattgatttgtgatattaataatattgtattaaaaatgtaaaaattttaatgtttaaggtgttatttagttttttttagtattatgtgttggtatatatatttttttgtttatagaatttttatatttaggtagggtatagtgttttatgtttgtaattttagtatattgtatattaggaggttgaggagggagaatcgtttgaggttagaagtttgagattagtttgggaaatatagtgagattttgtttttagaaaatttttttgataaattagtagatatggtggtatgtatttgtagttttagttattagggaggttgaggtaggaggattacgttattgtattttagtttgggcgatagagtgagattttgttttttaaaaaaaattaataataataaagaaagaagaagaaaagaaaaataaaatttttatgtgtattatattaaaggtgagaatttttggaattttatataaaaaattaataagatgagttatagagattattgataaatttataaagttgtttttgtgtattgaaaggaagaatattgagtaaaaaggaaggtattgagtttttaagtattttttttagtaaatttttaagggtttataagcgttgttgtatttgatgaaatataatttgtgaaattttaatataattgtttattttaaaattttgttttttatatattttttgtttttattttaagatttatatgtaatatatgtttattttataaagttaagagatatagatagggaaaagaaaaatatagtatatttttagatgtttttttttttaaatatttatgtatatatgtttatttttttaaagatgggtttatatattgtgtatttgagttcgtaatatgttgttttcgtgtaataaatatttgaagttatacgtttttgaggtatttatttaagaggaatagttttttaaagttttattttttaagttgggttattgaggttttttaatagttttgaaggattttattttgatgatttaagttttttttatttttagattagttttttttaagataaattatgtggtttttgtttaggtttgggtttgtttttttttttttatttatttttgttttttttttatatttttttttttttttttatatggtttaaattttaatttgaaaatatttttgtggttttttttgatatagaaggatagttgttgatgattaatttttagaaatgtaatatttttttttttcgtattgtgataataaataaatagggtttattgttaagttaaatgtttgtttaataattagtaaattttgttttttttatgtttatttagggaaaatttagttgggaaggtgaaataaaaaattttttatagtaaaatgagattttaaatttagttagtattaataagaaatttatttttatagaagagttagtgggatttgggtggatttttatattattatttatatagaatagatttattaatttgtttattaaatagtttaggttgtttatttttataaatagatgaaattagaaagtgattaaggtatagaggagatataaaaatttggtagaaattaatatagtattttttataaggaagttagtagttattcgttaattttttatatatataaaaggtgtgtgttgaattaatatgatttataattattatagttttttaggatttataaggaaatgatgttatgagagtaagaagtttaagtcggtagttttatttggtatgtttgattttgagtttatagtgtgtttaatattgagtgattggttttagaaataaagattagttgttcgtggttttgagtgataatgaataagtttgagagatgggttgtataattaattaatatgaaagattgttgtggggtggtagattcggaaggtatggaggaggttatagaattgttatttgtaaattgtgttattttggttaagttttttttttgtattaatttttagttttttgatttgtaaattgagataggtaataatttttttattttacgggatttaaatgagaaattttatggtgaaagtatttggtatattgtgggtattaattatgttttaaaaaagaaaagatggggaaaaaaatgtaggtgttagagtagagtttatttattttgttatgaaaggtttaaggaaggaaaagttgttttttttttaaggtagttaagtaaggtattttagaagggagtatattgaaattagattttgaaggatgagagtgattttatgataatgattttagttaatgtttaaggagggtttattatgtgttaggttgtttagagtttattggttataattgttttatggggtagtttatgatatttttattttatggggtaggttagaatatttttattttatgggatattttgtgatatttttagtttatgggataggttgtgatatatttattttatagagtaagttgtaatattattttttgtttatagtttatggagttgtaatagataaataaattgtttaggttatattgttagtgggtggagttagatttgaatttcggtagtttaattttatattttatattcgtgattacgttattaatgttagagaaggatatgtttgttgtgtgatttttttaaattagagattgttttaatttaaatataggaaggtagttataggatgttaaattttataagaaatttagaagttattttatagatgtaatattgagttttagtagtttaagtgatttagttagtattgttaattagtgatttaagaggtatggttttgggagttagttttaggtgttatatttgtatattatttattttatgatggtagtaaatagagtaggagatatttgtgtgtttagttaaatatattatagttttgttaagggatatagtttggtgaaattatttataaatttgagttttaatagattagtgtaagagatattttattggaaatattaga

SEQ ID NO: 397 - DNA, 7447 bp, Artificial Sequence
  chemically treated genomic DNA (Homo sapiens)
tatgaattaatttataagttaaaatttatagaattgtatgttaaataaagattaattttattgtatgttaaattgaaagtaaaaaaaaaaagttataggaatgaatgtatatttataaattgaaataattattttgaaggaaatgaatattttatgagagtttaagagagaggagggatattgttttgtgataaaggaaagtattaagaatgttttttttgaggaagtgaggtttgagttgggttttaaaaaatgatttagaatttatttgggttaaaggaaggttgatttatatagaagtatttgtatgtgtaaaggtttcggagtaggaggaagatggtttatttttatttaaaaaggattagagtatacggagtgttttggagggtgggagaagtgtatggggagtgagaaaaatttaagttggaataagagagttagattacgttagattgttttaggtggggtttaggttagggtgggtggagaggtgtagttgtgggttggtttgataattttattgatagttggaatattttgtagagattcgggtaattagattttttagggtaatgttggatttgggattggatttttagtagttttagtaggaggcggtttgtttttaaatttaaagattttagatattttgtagtgtcgtatttatcgtagattttaaagtgtttttttttgaggtttttgttttgtttaggagaatattgatagtttagtaatatatattaagttttttgaggggtttgagggttttgagagataagatagtttggtttgtatagattattatagggttttagtgatgtagttgtttttaaaaatatttgtgttaataattaggtattttttagatgggtaatagatttttattattttattttgaattattttatttttttttaggttttaagtttagggtttttttttatttttaggttttagggtttgttttatttagggttgggggtggaggttagagagtgatatagattaaatttataagttgttagttgattatttaatggaagtttatattgaataattttttgttaagtgaatagtttcggaatttgttttgtggtgtaataagggttgttaaatggtttagtttatatataatagtatgatatatagacggttgtagcgagatatgattttaggtattttatgggttaaatgtaggtagttattatgatttttattttagagatgaagaaattgaggttttggttagtgatttgaaaagttatatagttagaaaatggttaagatttggatttaggattgtttaattttaatatattggtttattgatttttaaatattagtatttgggtcgtgagatggaaatttattaaaaatgtagatttttcggttttatttgggttagggaattagtattttaaattttaaataaggggattttaggtgttttttttttttttaatttgaagaatttgggggattttgtaaatgatttgaagtttgagaggaagtgtaatattgtagggtttttaggagggggtattttgttgacgtttgtgattaggtttaattttttggggttttgcggtttagtgttgtatattgttatttgttttgaggtgcgtttggggtttagattggtcgatgaatacgtatattcgtagcgttttttttatttcgaagatttttatttttttttttgtataaaatcgaatattttattttattattatttttaagttaaaatatttgggtcgtttttttttacgaagggacgcgttttaggcgaatggggagggttcggaagtcgggtttgggatagaggagtcggtttatcgtttttcggtcggaagcggtagtgtaggtgaggcggcggttagtttggggattgcgcgggtaaggagcgggagggcggaatgtatcgcgaagttggcgggggacggttacgtacgtttcgtttcggtttttttgtatcgtagggtcgttttttcgttatttttgggtatttgtcgattacgtttgggcgagggcgggtcggttttcgttttcgggtttttatcgcggcggggacgtcgggttagcgaagggttaagggattcgtttttttttttcggtttttttatttttggaaagttttcgaaatgacgttttaattcgataatttaaaaaagagtttaattatagagataggttttgggagttggaataaatttttggtcggcggggtcggtaaataattcgggagcgagcgggttaggttagtcgtagttttgcggagttcgcgttttcggggagagggggaggggagggttttcgggagttggaaaagtcgaggaaattcgaggaattagttttttttggaaaaatttattttgtagttattttggggcgtttgatggtgtttttggtcggtttcgtagttttggagggaaagcggcgtcgttcgaagtaggggtatagtcggtgtttcgcggggataggttttgggtcgggaagggggtttcgttcgtttttagttttttttttttttgtttttttttagtttttttttcggtttttttagttgagtttcgcgaattttcgggagttaaagattagtcggttttttttttggggggggtggggggtgggggagcgggaatgggtggaggtcgggggaataaaaaatcgaaatagttttatattagaatttagattaattttgtggttttaacgcgtattttgttttgttttgaaatttggaatttattattttattattaagaaattgtacgaaattttttttttatcgttttaatatttatttgggaaaggaacgagtaaatatttttttaagaaagaaatttatatttgaatgatttaaattaaggtggatggaagttatttttttttttggcgtttgttagattttaagaaaagttgaaaaatgggagcgggggagggaagtaatagacggttggagggtagtagtagaataagcgaggggtagtagtcgagttaaagtgggggttatttatttcgggtagaggagataaatgaaagtcgatttcgttgggattacgtaggttcgtggttgtagtaaaagttgggttttataaagttgaaaaatagtcggttttttaaataattgtgatttggaaggtttcgttgggtttgtttagatgtttacgaataaataagaaatgtagttttaaaaaaaagtgtgtgttgggggtggtgagaatgcgtttttttcggttcgtttcgttttttttaaagaaacgtgtttataatggggtgatttaattatatcgtaatggaatttaattttagttatttcgtagtatcgggttttataatagattcggcggtttcgagtgttgggaagaaacgtgcgagggtcgaggggggcggcggagttcgcgtggaaatcggaaagaagcgtagttttgcgattttcgtttgggttattacgttagtagtcgggttaaggcgtagggggcgggtgggggattcgttaattttttatttgggtgggcggtatttaaatttaatagtatatattttattatttttaagggagttatgttttattgcgggtttttcggtttcgtggtttttatgtttttttttttatttttcgttaaaacggcgtagcgtgataagttatatgttttatttcggtgggggcgagagagaagtaataataagttaaaagtgtcgtttttttttatttttttatttttatttttattaaagtaatttttttttattgttttagagttttgaggtgtgtgtggggaggatggaggaggagggagggttgtggcgtcgtttagaattcggagcgcgcgtggaaagtagtgagttgttcggtgggttttttttgggaggaaggggtatttaggaaggattagggtttttttgattaaaaagtttaaagattggatgcgtgaaaagaaacggtacgtttaggtttggtaaaataaataatcgtttcgggttgtggtttttttttgcggcgttttttattcgtttatattcggagagcgtcggttgtaaagcgagcgcgagtgtcgacgcgtgcggcgtattaaattgtgtcgcgttcgttttcgttagattatgtttttttggggaaaaagtttttttagtttttttagtagcgcgttttattttacgtttcgttggaaaaaaaatagtaatataaaattttaggtttgaatattttgtgcgttttaaatttttaatgttttcggtttgttcggtttgtcgaagggagtcgagtgtcgaagagaagtcgggaaaaggtaagttgtgtagatatttggggaagttttaaggagatcgttagtttaagatggaaatcgcggttcgggcgttaaggacgggttttagttttcgttggtaaaaagagaaagtcgagttcgtttttttgtttaataaaaaataataatatgataataagaatttcggagggagtggaatgagtgacgttatagtcgcgttttgaggttgataaaggagggggcgcgtttttttcgttttgcgttcgcgcggtttcggagagggggcgtttgaagcgtcgggtagggaagttagtcgatttgaaatttttttttttaaagaaaaaaaaaaaaaagttgtgcgcggtttatagtggggtttttttttttcgtttttttttttcgttttttttttttttttttttttttgaaagtttttttttttttttttgtttttttttttcgtttgatcgtatggttgatttaattttagtgttaattaattttttttttttttttttttttatttaaataagtttaaagtttttttttttttcggtttattaaatttgaattttataaattgggttttgcgcgttttagttcggagttagaaaggcgaggggcgtcgggaattggcgtgtgggattttagataggagaggatgcgtttttttcgtatcgggattttcgcgatatattagattttcgtttttggttcgcgcgaacgtataggatgattattattttcgtgtttgttattattttcgatttgagcgaagttttatgtaaggtaaaggggggcggagtatttgttttttaaaaagttttttttttttgttttaagaaagaatttttaaaagtttgggttttggaaggtaatggggaaagtggtgtagcgagatgatttttttttttttcggtattttttttaagtttgaaggaatttggtttcgttttttttattttttgagttttaatagttgttggcggggattatatgtgaatttggaggttagggttttgaggggcgaagtttgtttggtagggtagttcgggggtttcggggggagggttgggattgggataagttttgggcgattttgttttacgtaacgtgttgttggattttaggtttgttggtttgatcgggtttttagtttgcgttttaggtttgtttagcggtattatttattcgtggggttgggagtgggaggtttttcggggaagtgagtttcgggataatgtttttttttattttttggggggagttggggatatgcgaggaagaaaggttaagttgtgatttaaaaagatgttgtagaataagtttgtagtggggtttgagttcgttttagtttcgttgggttttttttcgcgatagtcgatcgtgtagtaaattttggggtgaaagaggtatttaggttgattcgtttatttgtgttgtcgaggtattgcggtttatcgattgcgggcggggttggggggggaggtggcgataaaatgttggtttgaattcgagagtttcgcgagtaaggatttaatggggggttttttaaaatatgttgtttgttagttagtgttgaaaaagtaagttttaaattcggaatgttttaggattgcggtttaaatgtatatagtaaaagtttatggatgttgttaaatttttttttaattttttttttttaatttgaaagggtgaagttgttgggttattttttaattgttgaagtgttttgtttttttttaatacgtcgggttatgttgttttgtttttttagtttgttgtttttgttggtgtagttgttaacgttttagggttgtagggttggggtgtagggacgtcgaggagttgaagagtagtatttaaaaagtttgaattttttagtttttttttttttttgtatatttttaaattttatttgttagttcggttgttagcgttttttaatatttttttttttttttttcgattttttcgttttttgatttatttttttttttggtttttttttttttttacgattttttaaatgaattttattgttgggaattagttttcgattgggtttttgtaattttttcggtggggtggttgtagttatagattttcggtttttttttgttgattttaagggattaatattagaatttgtataatgatatttatatgggttgggaattaatttttaggtttttgatttgtattatttttaaattttgggtataatttgggtaggtgattagggttttattggaatagaaatttgttattggtggttttgtttttatttttattatttttaattcgttattgattaggaggtgggtaggggggttggtgtttttttttttttttttatttgtagttttgcgttaaagattaaatattggagtttttatttaagtttgtttttgtagttaaaagattaattgtaaaggtatttttttagtgaagggggcggggtgggttagggttgagtggaaatggtgagagagattattgtagaaaatatttttttcgggaatttagggtaaagagttttatttttaggaattatatttttgttttttttaattttagattaggtttttaattttttttttataagaaaaagtaaaggtagtttgaaaatttgttgttaaaggaagggaatatttttgaaggaggaagttgagagttttaggttaggttttgaaggagggggtattaattaagtagagattgattggaaggggatttaacgtagtttatgatagatttttttttgaggtttatttgtttttgtcgcgggcggtggcgggggcggggtgcggtaatttagagaggtttgggttgtgtgagatattttgagttgaagaatttatttgattagtaaaaaagttgaattttaaagtggtagttttggggatagaggatatgggggttgtattgtaggagttagtatggagtagggtgtttgttatatagtttggattttgtggttttttacgtatggggttaaaataaatttaggtgaatggtttatgggagggagagagggaagggagtttgttagagtcgaggtagagatgagttttttgagaaagagcgggcgtttgtgattgtgtagggggttgtttatagtggatattttggtggatgttttttgtttttattatttttttttttttttttttagg

SEQ ID NO: 398 - DNA, 7447 bp, Artificial Sequence
  chemically treated genomic DNA (Homo sapiens)
tttggagagagaagagaaaggatggtaaggatagaggatatttattaggatgtttattatgggtagttttttatataattataaacgttcgtttttttttaaagaatttatttttatttcggttttagtaagttttttttttttttttttttttataggttatttatttgggtttattttggttttatgcgtaagaaattataagatttaaattgtgtgataagtattttgttttatgttgatttttgtaatgtaatttttatgttttttgtttttaaagttattattttaaagtttaatttttttattagttaaatagattttttaatttaaaatattttatataatttagatttttttagattatcgtatttcgttttcgttatcgttcgcgataaaaataggtaaattttagaaaggagtttattataggttacgttaggtttttttttaattagtttttgtttaattgatatttttttttttaagatttggtttaagatttttaatttttttttttagaagtgttttttttttttggtaataggtttttagattgtttttgtttttttttgtggggaggagattgggggtttggtttgaggttgggggagatagggatgtgatttttgaaaataaaattttttgttttaagttttcggaagagatattttttataataattttttttattatttttatttagttttagtttatttcgttttttttattgagaagatgtttttgtaattagttttttggttgtaagagtaagtttggataagagttttagtgtttaatttttaacgtaaagttgtagatggaaaggaaaaggaaagtattaatttttttatttattttttagttaatagcggattgggggtggtggggatgggggtagagttattaatggtaggtttttgttttaataggattttggttatttgtttaaattgtatttaagatttggaaatggtgtaggttagggatttaggagttagtttttagtttatgtgggtgttattgtgtaaattttaatgttggttttttaggattagtagggggggatcgggaatttgtaattgtaattattttatcgagaggattataggaatttagtcgagagttggtttttaataatgaggtttatttaaaaagtcgtgaggggggaggggggttaaagaaagaaatagattaaagagcgggagagtcgagaaaagaaggaagaaatgttggggagcgttggtagtcgggttggtaagtggagtttgggaatgtgtagggagggaaggaagttgaaaaatttaaattttttaaatgttattttttagtttttcggcgtttttgtattttaattttgtagttttggggcgttggtagttgtattaataggagtagtaagttgggaaaatagagtaatatgattcgacgtgttaagagaaggtaaaatattttagtaattaaaaagtagtttagtagttttatttttttaaattgggagggggaggttggaaagaaatttaataatatttatagatttttgttatgtatatttaaatcgtagttttggaatatttcgagtttaaaatttgtttttttaatattggttgataagtaatatgttttaaggagttttttattaaatttttattcgcgggattttcgagtttaagttagtattttgtcgttatttttttttttaatttcgttcgtaatcgatgagtcgtaatgtttcggtaatataggtaagcgggttaatttgaatgttttttttattttaaagtttgttgtacgatcggttatcgcgggaagaagtttaacggagttagggcggatttaagttttattgtaaatttgttttgtaatatttttttgaattataatttggtttttttttttcgtatatttttagttttttttaaagagtggaggaaaatattgtttcgagatttattttttcgagggattttttatttttaattttacgggtgggtaatgtcgttggatagatttagggcgtagattgggaattcgattagattagtaaatttgggatttagtagtacgttacgtaaaataggatcgtttaaaatttgttttaattttagtttttttttcgaagttttcgggttgttttgttaggtaaatttcgttttttaaaattttggtttttagatttatatgtaattttcgttagtaattgttgaaatttaaagggtgggaaggacggggttaaatttttttaaatttgggagaaatgtcggaggagaaaagaattatttcgttgtattattttttttattgttttttaagatttaaatttttgggggtttttttttaaggtaaaagaaaaagattttttgaaaagtaaatgtttcgtttttttttattttgtataaaatttcgtttaagtcgaagatggtggtagatacgagggtggtggttattttgtgcgttcgcgcgagttaggggcgaggatttggtgtgtcgcgaaggtttcggtgcggggaaggcgtatttttttttgtttggagttttatacgttagttttcggcgtttttcgtttttttgatttcgggttggggcgcgtaaagtttaatttataaagtttagatttggtgggtcggggggaggaggagttttaaatttatttaaatgaggaagaggaggaaaaagaagttgattgatattggagttgaattagttatgcggttaggcggggagggggggtagggggaggagaagaaatttttaaaaggaagaagggggaggggagacgagaaaagaaggcggaaaaaaaaaattttattgtgagtcgcgtataatttttttttttttttttttaagaggaaaagttttaagtcggttgatttttttattcggcgttttaggcgtttttttttcggggtcgcgcgggcgtagagcgggaggggcgcgtttttttttttgttagttttagagcgcggttgtgacgttatttattttatttttttcggggtttttgttgttatgttgttgttttttgttgggtaggaaggcgggttcgattttttttttttgttagcgggagttgaagttcgtttttagcgttcgggtcgcggtttttattttgagttggcggtttttttgaaatttttttaagtgtttgtataatttattttttttcgattttttttcgatattcggtttttttcggtaaatcgggtaggtcgaggatattagaaatttgggacgtatagaatgtttaagtttaggattttatgttgttgttttttttttagcggggcgtagggtggggcgcgttgttggggggattagggaaattttttttttaggaggatatggtttggcgggggcgagcgcggtataatttagtgcgtcgtacgcgtcgatattcgcgttcgttttgtagtcggcgtttttcgggtgtgggcgggtggggggcgtcgtaaaaaaagattataattcgggacgattgtttgttttattaggtttaggcgtgtcgtttttttttacgtatttaatttttaaattttttagttaagaaaattttaattttttttgaatgttttttttttttagaaaaagtttatcgagtaatttattattttttacgcgcgtttcgaattttgggcggcgttataattttttttttttttttattttttttatatatattttaagattttagaataatgaaaaaaggttattttggtaagaatgaaggtaaagaggtggagggaggcggtatttttaatttattgttgtttttttttcgtttttatcggagtggaatatatggtttgttacgttgcgtcgttttggcgggaggtggagagggggatatgggagttacgaaatcgaagggttcgtaatggagtatgatttttttgaaaatgataaaatatatattgttaggtttggatgtcgtttatttaaataaaaagttaacgagttttttattcgttttttgcgttttggttcgattgttggcgtgatgatttaggcggaagtcgtagggttgcgttttttttcgatttttacgcgggtttcgtcgtttttttcggttttcgtacgtttttttttagtattcgaggtcgtcgagtttgttatgaaattcggtgttgcggagtggttaagattgagttttattgcgatgtaattaggttattttattatgagtacgtttttttggaaaggacggggcgggtcgaagagagcgtatttttattatttttaatatatatttttttttaaaattgtattttttatttattcgtaaatatttgggtaaatttagcgaaattttttaaattataattgtttgagaaatcggttgttttttaattttgtgaaatttaatttttgttgtagttacgaatttacgtgattttagcggggtcggtttttatttgttttttttgttcgaaatggatggtttttattttaattcggttgttgtttttcgtttgttttgttgttgttttttagtcgtttgttgtttttttttttcgtttttattttttagttttttttgaaatttggtaagcgttagaaagggaaataatttttatttattttaatttaaattatttaagtgtaggttttttttttagagggatgtttgttcgttttttttttaagtgggtgttggggcggtgggggagagatttcgtgtagttttttggtgatgaggtaatgagttttagattttaggatagagtagagtgcgcgttgaaattataaggttagtttgagttttgatgtgaagttatttcggttttttattttttcggtttttatttattttcgtttttttattttttattttttttaaaaaagaggtcggttggtttttaattttcgagggttcgcgaagtttagttggggggatcggaggaggggttggaaaaaagtaaaggggaaggggattgggagcgggcggggtttttttttcggtttagggtttgttttcgcggggtatcggttatgtttttgtttcgggcggcgtcgttttttttttaaggttgcgggatcggttaggagtattattaggcgttttagaatggttataaagtggatttttttaaagaaagttgatttttcgaattttttcggtttttttaattttcggaggttttttttttttttttttttcgggggcgcgggtttcgtaaggttgcgattggtttagttcgttcgttttcgagttgtttatcggtttcgtcgattaagggtttgttttagtttttagagtttgtttttataattaaatttttttttaaattgtcgggttgaaacgttatttcggggattttttaagggtgagggagtcgagaggagggagcgagttttttaatttttcgttgattcggcgttttcgtcgcggtgagggttcgagggcgggagtcgattcgttttcgtttagacgtggtcgataggtgtttaggggtggcgggagggcggttttacggtgtaggaaggtcgaggcgaggcgtgcgtggtcgtttttcgttaatttcgcggtgtatttcgttttttcgttttttattcgcgtagtttttaggttggtcgtcgttttatttgtattgtcgttttcgatcgggaggcggtgggtcggtttttttgttttaggttcgattttcgggttttttttattcgtttggagcgcgttttttcgtggggaggggcggtttaggtattttagtttggaggtggtggtggggtgggatgttcggttttgtgtaagggggaaagtgaaagttttcggagtgaaggaggcgttgcgggtgtacgtatttatcggttaatttggattttaggcgtattttaaggtagatgatagtgtgtagtattgggtcgtaggattttagaaggttaggtttagttataggcgttagtagggtatttttttttgagagttttgtagtgttgtatttttttttaggttttaggttatttgtaaaattttttaaattttttaggttgaaagagagagagatatttggagtttttttgtttaaagtttggaatgttgattttttggtttagatggggtcggggaatttgtatttttggtaaatttttattttacgatttaaatattaatgtttgagaattagtgagttagtatattgaagttaggtaattttggatttaaattttggttattttttagttatgtgattttttaagttattgattaaggttttaatttttttatttttgaaataggaattatgataattgtttatatttggtttataaagtgtttagagttatgtttcgttgtaatcgtttatatgttatgttgttgtatgtaaattaagttatttggtaatttttattatattataaaataaatttcggggttatttatttggtaaaggattatttagtgtagatttttattaaatggttaattgataatttataagtttgatttgtgttattttttagtttttatttttagttttggataagataggttttgaggtttggaaatggggagaggttttgggtttggagtttgggggagagtaaagtggtttagggtagggtgatggggatttgttgtttatttgaaaaatatttgattattgatataagtatttttgaaaataattatattattggggttttgtggtagtttgtataagttagattattttattttttaaagtttttaagttttttagaaagtttagtgtgtattattgagttgttaatatttttttgaataaggtagaggttttaggagagggtattttagggtttacggtaaatgcggtattgtagggtgtttggaatttttgggtttgggagtaggtcgttttttgttaggattattgagaatttaattttaggtttagtattgttttggggggtttgattgttcgggtttttgtaagatgttttaattgttagtgaagttattaggttagtttatagttatatttttttatttattttaatttaggttttatttagagtagtttggcgtaatttgatttttttattttagtttgggttttttttattttttatgtattttttttattttttagggtatttcgtgtgttttagttttttttagatgagaatgagttattttttttttatttcggggtttttgtatatgtaaatgtttttgtgtgaattaatttttttttagtttaagtaaattttaaattattttttagaatttaatttaagttttatttttttagggaaaatatttttgatgtttttttttgttataaaatagtgtttttttttttttttaggtttttatggaatgtttattttttttaaagtagttattttagtttgtgagtatatatttatttttgtaattttttttttttatttttaatttaatatatagtaaaattgatttttatttggtatatagttttatgaattttaatttatgaattgatttatg

SEQ ID NO: 399 - DNA, 4353 bp, Artificial Sequence
  chemically treated genomic DNA (Homo sapiens)
  unsure (2999, 3024, 3563, 4173)
taggaggttaaggtaggagaatcgtttgaatttgggaggtagaggttgtagtgagcggagatcgtattattgtattttagtttgggtaataagagtaagatttcgtttaaaaaaaaaaaaagatatttttattggttttaggttgttcgaaatttgtgtaagttttagttttgtgtttatttggttttttgttttgtggtagaggtttttagagttgtggggaaagcgtttttaataagtagttggatttattttatacgatatttttagattagttttggttggtttatagatgtaaatgtaaaacgtaaaaagattttttttttaatagggaaatttatttaagattttaggggaggtaggtgtttaaataggatatacgttttgtggaagggaaggtttggttagtcggatggtaggaaaattaggattttttaagagtcgttgtatggagggtttaggtatatgtgatatgtatcggttagtttttttgtttagagattttgtatttgtaaatatattagtttgttgaatgtgtttaaagttttagaattaatatttatcgtgttttcgtagttatttatgtatacgtttagagtgaagaagtttaggattcggttgtatggtcggttttttcgaggttgcgaggtaggatcggttttattttttttttagttttttgtggcggttagtagttttcggtgatttttggtttgagaaagtatcgttttgatttcggtttttattttcgtacggtttttttttgtatgtttgtttttagattttttttttataagggcgttttatgttggggtgaggttcgtttttgtgatcgtattttaatttgattttttttgtaaagattttgtttttaaataagttttattttgaggtgttgggggttggaatgttaatatagaattttggggggatagttttatttataagtatggttagattttagattttggtttttttaggggagtggtggggggagaggtttttattagaattaaatatgttagtatttttatttttattttttattttttagagtagtaagaaatacgttttttgtggtttaagtttttagtttgtggttttttgttacggtagtttacgttgattaagatagataggaaagggagtgggagatataggtttggagacgtggacgggtttgtatagaagaagttgtttttttggtagataagtttcgttgtggcgggtgtcgtggtttaggttgggatttaaagttgttgttttttttttttttttttaaggtagaagaattttttttagtatagaataaaatgaaaagttttttatgtttatttttatttatatagattcggtaattattcgattttttaattttttttttatttttttcgtttttttattttataaaatcgttattgttattatggtttatttttaatgagtcgttggatatattttttagacggggtcgtggtcgggtagaggggttttttattttttagtaggggcggttgggtagaagcgttttttatttttcggatggggcggttggtcgggtagaggggttttttattttttagtaggggcggtcgggtagaggagttttttatttttcggacggggcggttgtcgggcggagacgttttttattttttagacggggtggttgttggacggaggggttttttattttttagatagggcggttgttaggtagagggtttttttattttttagacggggcggtcgggtagagacgttttttattttttagatagggttgtggttaatagaggtgttttttatattttagatagggcggcggggtagaggtgttttttatattttagacgatgggcggtcgggtagagacgttttttattttttagatgggaaggcggcggggaagaggcgtttttcgttttttagatgggatggcggtcgggtagagacgttttttattttttagattgggtagttaggtataggggttttttatattttagacgatggggggttaggtagagacgttttttattttttagacggggtggcggttgggtagaggttgtaatttcggtattttgggaggttaaggtaggcggttgggaggtggaggttgtagcgagtcgagattacgttattttattttagtttgggtattattgagtattgagtgaacgagatttcgtttgtaatttcggtatttcgggaggtcgaggttggcggattattcgcggttaggagttggagattagttcggttaatatagtaaaattttatttttattaaaaaaaatacgaaaattagttaggcgtggcggcgcgtatttgtaatggtagtattcggtaggttgaggtaggagaattaggtagggaggttgtagtgagtcgagatggcggtagtatcgtttagttttggttcggtattagagggagatcgtggaaggagatcgtggagggagagggagagggagagggagagggagagcggatttaaagttttaaggtttttttagcgagaagttgttggtggttttggaggacgttttaggaagttcgtggagtgtttgttggaaggatgttttgttcgttattttaattaacgtgtgcgttagaaagtagaaagttttggtagaaatggtagatgagggtttttttttttaagatgtttttgatgttttttattgttttttaaatggagaaaggtatgtttttaaatagtttttttttagaagttagttgtagtttgtatcgtggttattgttatgagtattacgggtttagtgagttattttttttttatgggttataaggttgggtttagtttttttagggtttaggtatagggggttttggggtttggttgagggtaggttcggggtggggtttggtataggagatagggaatgtaggggtggtgatttcgggttttttagtataggtgggtattaggaaaggatttttgcggagtattttgttatagggtttttgttntcgtttttcgtttggacgttttttnatgtttttaggtagtttttattttttagggtgttgtttgttttagagcgtagtttttggagggtgaaggttttttgaagttttggttgtattttttttattttggggtttatttagggttttattttagtagtttaattagtagtttttggataaatagaattttttttggttgaggtgcgtttttttttttattattttaggggtttgtttttttttttttagattgggttttcggtttattttttatttttggaattttttgtggtttgggtgtttttattagtatagtttttaggataggtttttcggttttttttttttagagtttatagtttttagttttttttaggcgtttttttataggtttttttttgttttttttgttttttgagaacgtttgttgcgatgtttatgagttttgttttttgtaggttttcgttcggtggttcggggtgggtttttcgttcgtagatttttatttatagttaggttacggggtaaggatttagattgttttagcggcggggaggggttgantcgtggacgcggtttttaaaggatattagcgttatttgaataagattcgtggcgcgtacgaggtaggagagttgggcgttcggcgtgaggttcgggtgggggtcgcgagcggatagtttcgggtcgtaggcggtttttcgttgtagtgaggatagcggtcgggcgtcgggggttttgggtttcgggtagggttaagtttgcgcgtgcgaagattttacggacggagtcgtttaagtatcgtaaatttcgtttttcgggatttattgtgggaggtcgtagcgttgtttttttcgggggcgttttgcgcgtcgggggtttcggatagtatcgcgtttcgcgtgggagcgtttgtttggtagtcgcgggtcgggatttcgtaggttaattcgcgcgtgcggcgttcggagaagtttggttcggttgcggttaaatcgagtttacgtggattagttttttacggttggttcgcgagcggttttcgcgtatagtttcgttttttagtagtttcgtttcgttcgattataggttcgttttatagttcgtttatcgacggggtacggttgcgatttttagtaggtttcgtttcgttagtttttagattcgtttattnagtagcgttttcgtttcgtttcgcggtttcgtttgcgtagtggggtaggcgtagtcggaagtagtgtatcgggtcgtggagcggcggtttttgtattttcggcgcggatttaaaggggttcgagtcgttcgggtcgggaatggggcggcgtcgagttcggggttcgcgtttggttgggcg

SEQ ID NO: 400 - DNA, 4353 bp, Artificial Sequence
  chemically treated genomic DNA (Homo sapiens)
  unsure (181, 791, 1330, 1355)
cgtttagttaggcgcgggtttcgggttcggcgtcgttttattttcggttcgagcggttcgagtttttttaggttcgcgtcgggggtataggagtcgtcgttttacggttcggtatattgttttcgattgcgtttgttttattgcgtaggcggggtcgcggggcggggcggaggcgttgttnggtgggcggatttgggggttggcggggcggggtttgttaagggtcgtagtcgtgtttcgtcgatgagcgggttgtggggcgggtttgtgatcgggcggggcggggttgttaaggggcggggttgtgcgcggaggtcgttcgcgaattagtcgtggggaattggtttacgtgggttcggtttgatcgtagtcgggttagattttttcggacgtcgtacgcgcgagttgatttgcggggtttcggttcgcggttgttagataggcgtttttacgcgagacgcgatgttgttcgaggttttcggcgcgtaggacgttttcggagggggtagcgttgcggttttttatagtgggtttcggaaagcggggtttgcggtgtttgggcggtttcgttcgtggggttttcgtacgcgtagatttggttttgttcgaggtttaggattttcggcgttcgatcgttgtttttattgtaacgggggatcgtttgcggttcggggttgttcgttcgcgatttttattcgggttttacgtcgagcgtttagtttttttgtttcgtgcgcgttacgggttttgtttaggtggcgttggtgttttttgagagtcgcgtttacggnttaattttttttcgtcgttggagtagtttgggtttttgtttcgtggtttaattgtggataggagtttgcgaacgggggatttatttcgggttatcgagcggggatttgtagagggtaaggtttatgggtatcgtagtaggcgtttttagggggtaggaagagtagggaagggtttgtggggagacgtttgaaaggggttgggggttgtggattttggagggaaggagtcgggagatttgttttaggggttgtgttggtgagggtatttagattataggggattttaggaatggagggtgagtcggggatttagtttgaggagggaggagtaggtttttgagatggtgaggggggagacgtattttaattagggaggattttgtttgtttagaagttgttggttgagttgttggggtaggattttgggtggattttagggtaaagggaatgtagttaaagttttagggaatttttattttttaggagttgcgttttgggatagatagtattttgaagaatgagggttgtttgggggtatnggaaggcgtttaggcggaaagcggnagtagaggttttgtggtagggtgtttcgtagaaatttttttttgatgtttatttatgttgggaggttcggagttattatttttgtattttttgttttttgtgttagattttatttcgagtttgtttttagttaggttttaagattttttgtgtttgggttttgggagagttagatttagttttgtggtttatgaggaggaggtggtttattgagttcgtggtgtttatggtagtgattacggtgtaaattgtagttggtttttgaggaaaaattgtttaaggatatatttttttttatttaggagatagtggagagtattaaaaatattttaaaaaggaaaatttttatttattatttttgttagaattttttgttttttgacgtatacgttaattaaaatggcgggtaaagtatttttttagtaaatattttacggattttttagaacgttttttaaagttattagtagtttttcgttgaaggggttttaaaattttgaattcgttttttttttttttttttttttttttttttttttacggtttttttttacggtttttttttgatgtcgagttaaagttggacggtattgtcgttatttcggtttattgtaatttttttgtttgatttttttgttttagtttgtcgagtgttgttattgtaggtgcgcgtcgttacgtttgattggttttcgtgttttttttggtggagatggggttttgttgtgttggtcgggttggtttttagtttttaatcgcgagtgattcgttagtttcggtttttcgaggtgtcgggattgtagacggagtttcgtttatttagtgtttaatggtgtttaggttggagtgaagtggcgtgatttcggttcgttataatttttattttttagtcgtttgttttggttttttaaagtgtcgagattgtagtttttgtttagtcgttatttcgtttgggaagtgaggagcgtttttgtttggttttttatcgtttgggatatgaggagtttttgtgtttggttgtttagtttggaaagtgaggagcgtttttgttcggtcgttattttatttaggaagcgaggagcgtttttttttcgtcgtttttttatttaggaagtgaggagcgtttttgttcggtcgtttatcgtttgagatgtggggagtatttttgtttcgtcgttttgtttgggatgtgaggagtatttttgttggttataattttgtttgggaggtgaggagcgtttttgttcggtcgtttcgtttgagaagtgaggaaattttttgtttggtaatcgttttgtttgagaagtgaggagttttttcgtttagtagttatttcgtttgggaagtgaggagcgttttcgttcggtagtcgtttcgttcgggaggtgaggggtttttttgttcggtcgtttttattgggaagtgaggagtttttttgttcggttagtcgttttattcgggaggtgaggggcgtttttgtttagtcgtttttattgggaagtgaggagtttttttgttcggttacgatttcgtttgggaggtgtgtttagcggtttattggggatgggttatgatgataatggcggttttgtggaatagaaaggcgggaagggtggggaaaaaattgagaaatcggatggttgtcgggtttgtgtggatagaagtagatatgggagattttttattttgttttgtattaagaaaaatttttttgttttggaaaaaaaaaaaaaaaataataattttgaattttagtttggattacggtattcgttataacggagtttgtttgttagagggatagttttttttgtgtaggttcgtttacgtttttaggtttgtgttttttatttttttttttgtttgttttggttaacgtgggttgtcgtgatagaagattatagattggaggtttaaattataggaaacgtgttttttattgttttggaggatgggaagtagagatgggggtattggtatgtttggttttggtgagggtttttttttttattatttttttgaggaaattagggtttaaagtttaattatatttatgggtagaattgtttttttaaaattttatgttgatattttaatttttagtattttagaatgagatttgtttggagatagagtttttatagagaaaattaggttaaggtgcggttataagggcgggttttattttagtatgaggcgtttttatggaaaggggatttggagataggtatgtagggagaggtcgtgcgaagatgaaggtcgaggttagggcggtgtttttttaggttaaggattatcgagggttgttggtcgttatagggagttggggagaggatgggatcggttttgtttcgtagtttcggaggagtcggttatgtaatcggattttagatttttttattttgagcgtgtgtatgagtaattgcggaagtacggtgggtattgattttggggttttaaatatatttagtaagttggtgtatttgtagatgtaggatttttgagtaagggggttggtcggtgtatgttatatgtgtttagattttttatgtaacggtttttagggggttttagtttttttgttattcgattgattaagtttttttttttataaggcgtatgttttgtttaagtatttgttttttttgaggttttaaataggtttttttattgggaggggagtttttttacgttttatatttatatttgtgagttagttaagattgatttgggggtgtcgtgtgaggtgggtttagttgtttgttgggggcgttttttttatagttttgggaatttttgttataaggtagagaattaagtaagtatagggttggagtttgtataggtttcgggtagtttgaagttaatggggatgtttttttttttttttagacggagttttgtttttgttgtttaggttggagtgtagtggtgcgattttcgtttattgtaatttttgttttttaggtttaagcgatttttttgttttagttttttg

SEQ ID NO: 401 - DNA, 7843 bp, Artificial Sequence
  chemically treated genomic DNA (Homo sapiens)
tgatttttttgttttagtttttcgagtagtttggttaagtttttaaggttttattattgtttataaaaatttatttgagttttataattttattggtaatgttgaaaattttattaaattttttttgtaatagagttgtaagattttaggttattttaagtgttgttttgttgaaatttatttttaaaattgtttaaattatggtatttattaattagggtcgtggaagaagttaggtaggtgagaggtgttgaagtttaaattttatgaattttggggtaaatttgaattttggattcgatatagttaggtggtttagaagaggggagattgagatgtggaaagagtaatgagaagtttaataatttacggagaaaggggtgatttgttgtttgttattttttataataggaaaagttgtaattttaggattatttaaaataattgttataatttgtataagaaaaagtaaatttattagtcgggtatggttttcgcgcggggttttagttttttaggaggttgaggaaagattgttcgagtttaggaggttaaggttgtagtgagttatgatcgtgttattgtattttagtttgggtaatatagtaagattttatttttaaaaaaaagagttacgtgtagtggtttacgtttgtaattttagtattttgggaggttaaggtaggtggattattttaggttaggagttttagattagtttgattaatatggagaaatttcgcgtttattaaaaatataaaattagttcggtgtggtggtatatgtttgtaattttagttatttgggaggttgaggcgggagaattatttgaatttaggaggtagaggttgtggtgagtcgagatcgtatttttgtattttagtttgggtaataagagtgaaacgtcgtttttaaaaataaaataaaataaaatataaaagaaaagaaaaagaaaattttagtagttgttggtggatgttatgcgtaagtatcgataatgtatcgtgtgatagtagtatattgttttgggttgggaataaaggtgatagtttaatattttgggtagggaatagtaaagtgttttaataatgaggaagggagggttgagtttggtttggtttgtagaataggtatggatttaggtagtaacgtgaatgtttatttacgttttgtaatttagtggttattgaatttgtttgtttgggaagtggttttgggtggtttaagggtggaggatatgattttatatatataggatagattaagggtggtttttgagaattgaagtgaaaattttagatgttatttttacgtaaaggggaaattatgggattttttttttattaggttgtaatttattagatgatataaaattatattaatttttattagattttttttgaggttaggaattatgttttataaattttgaaaattagtaatgtgattattcggtacgtagtagatgtttagtaaagattttatttttttattttttgattggtatatattagatggtagaaaatagattattgtttggtgtggggtgtgggttgatgatttgatatggaatagaatgttttttttttttttttttttttttttttgtagatagggtttcgttatgttgtttaggttgtttttaaatttttggattgaaacgatttttttattttagtttttaaaagtgttggtattataggtatgagttattgtgttttattaagatgagtgttttttattgtttaattaatttatgttttgagatagagttttattttgttgtttaggttggagtgtagtggtacgattttagtttattgtaatttttgttttttagggtttaagtaatttttttgttttagtttttcgagtagttgggattgtaggtttgtattattatatttggttaagttttgtatttttagtagagaaggggttttattatgttggttaggttggtttcgaatttttgattttaggtgattcgtttgtttcggttttttaaagtgttgggattataggtgtgagttattgcgtttagtttatttatttatttatttatttatttattttatatattttttggagatagagtgtggttttgttgtttaggttggagtgtagtggtgtaatttttgtttattgtaatttttgtttttcgggtttaagcgattttcgtgttttagtttttttagtagttgggattataggtgtgtgttatgatgtttagttgatttttgtatttttagtagagaggggttttattatgttggttaggttggtttcgaatttttgggtttaagtgatttattcgtttcggttttttaaaatgttgagattatagatttgagttattgtttttagttagaagatataatttttagaggttataggatttgggtatagagtgagagtggtaaaaggtagggtaggggtttgggagagggttgtagagaatttcgagggagaagttgaataagagaaggggagattgggtttgtatcggggagggaggagggaatttttagttttagtttggtttgtttggttttagtgaagtcggttgttttttgttttcggtgatcggtttattttttttaattcgggcgtaggatttaggtagaatagtaaggaagggtaggggtgtggggaatattttttgtagtaggaagataagtaagtcgggataagaggttattataggttcggttgttttttttgggacgtaagggcgtttggtagttttttaagtattttggattttaacgttttttttgttgggttttaacgttttttttgttgggttttttaagattttgtttttcggttgggcgcggtggttaacgtttgtaattttagtattttgggaggttaaggtgggtggattattttaggttaggagttcgagattagtttggttaatatggcgaaattttgtttttattaaaaatacgaaaattagtcggggttggtgttttgtgtttgtaattttagttattcgggaggttgaggtaggagaatcgtttgaatttgggaggcggaggttgtagtgagtttagattacgttattgtattttagtttgggaaatagagggagattttgttttaaaaaaaaaaaaaaaatttgttttcgttaattattgtgggagtttaagttttttttttttgttttttggaggggttgatttttggagtagtattttttttaatttatttatttagtaatttatattgttaagttttttgaagtagaagggggttggtgggaggagtacggttgtgttggatttttttcgttaattgatgggagggtgaggggagttggtagtgagaggaagggttttttttagttatttcgagggtttttaggagttagataggaaatagtttaggaaagatagtagtcgtagtcgtagttttagttttaggggttatggttgcgggcggcggggaagtttttttaaaatacgagagtgagagtgagaagggcgatttggagatttagtcggattttttattttttcggatatatttattttttttttttttttttttttttttgagatttcgttttattttgtagtttaggttggagtgtagtggcgcgattttagtttttagtttattgtaattttcgttttttaggtttcggtttaagtaatttttttgttttagtttttcgagtagttaggattataggcgcgcgttattatgtttagttaatttttgtatttttagtagagacggggttttattatgttggttaggttggttttgaatttttgattttaaatgattcgtttgtttttgttttttaaaatgttgggattataggcgtgagttatcgcgttcgttatatttattttttttttatcgttgttttttcgatttttttttattttttagcgtagtttagtgcgcgttttttttggatattttttagggtttggttgcgcgtatagtaggtttttaatattgaatgtttatggggtgattgtgtgaacgttcgttgtaaggttatttaaattgggattgttttttgaggttttttgggcggtcgttaattttttaaagtttttattttttttttttttttttttttttaaaacgtagtttttgcgtttattagagggtggtgggcgtatttaagagcggtatttagagttcgtagtaaggttagagcgggttttgtgtgcgcggtgaatatttacgtgtacgtttgggcggtttttcgtgttgttgttgggtgtgtgttttttttgttttttggtgttagtcgggttcgggtttgtttcgggggtttttgggttttagtttcgatatgttcggttttggatagcgcgtatcgttacggcgtatatttgggcggtttcggggttttttattcgtcgttttttttttttttttaaatttttttttaatttttcgatttgttttattcggtgttttttttcgttttttttatgaattatttagtagcgtgagttttaattagcgcgttcggggtttattcgcggagttttcgcgttgggagagttgttttcgtttttcgcgcgtttttttttttcgggttcggcgtcgttcggtttagttttagcgtagtttagtttttgttcggttcggttcgttcggtttcgcgtcgtagtttttttttttttcgtttcgttttcgttcgggtttttattattttcgttcgcgaggagagtattcggttcggcggcgcgagtagagttattttagggagggggggagatcgcgagcggtcggtttagttttcgttattcggggcgggatttcgaggtttcggagggattttaattttagttacgttttgttgcgcgttcgttcggcgcggttattgttagtacgtttcgggttcgtcgttcgcgcgcgcggtatagacgcggggttatatttggcgtcgtcgttcggtgtttcgtacgttcgtatgggttcgcgttgagggtttcgacgaggagtttcgcgcggagtatcggcgtttattcgtttagggagagttagatttgggggggcgagggttttttaaatttagttcggattttattcgagtgaggcggcgttatggagtttcgggtgttgttttgttgggtttcgttggtcgtagttttggaaggtgagtttttttgcgggggggggcgtatttcgttatttttgggattttttttttaatatttgggtttcggagtggaggggtcggtttttgattatttttattcgggtattgtagttttaaatatttcggatcgatagtgttggaacgggaggggggcggggaagaggcgttcgacgggtagtggagtttttttttgtttgggaaagagatggagtttggttacgattcgggatatttttttgttcgggtttttcgaatttttattgttgattatatacgtttttggttgtttttttttttttttttattttattatttaaaattatttgtaaagtttttgttttagttttatttttcgtcgtatatgagggaaggtttttggagaagtaatagtagataaggtataatttttcgtgttaggttttaaaacgatttttagcgttaattttttagcgattatattttgattttttagttttatatttttgtaataggatggttttttttgtatttatatagtaaatttttaaatcgttttttcgtttattgtttttgtttttggtatagggtggttttttggtttttataggttgtattttatttttttaaatgcggtttagatttcggttttaggtgagtttcgggttttttttgagatttaggagcgggtagaaattgatttatatagtttttaggtagaaattgatttatatagtttttatatcgttttaattaatttagtttattttttattttttggtttttttaagtatttttttggttatggatcgttgttttttttggttttttaaagggggagttaagagttttagaaatttttttgtgtttttaatgtttttttagtgagttgttaatatttttttttttttgtttggtatgaaagtggttatggggcggtaggttatgagggatttttaaagggaaggatttagcggcgttagaaaaattttttttttttggttgggtaggattgttttgggttggggattaaaggttaggtgtggggttgggagtgaggggaggtttgtttagtttagagaacggagaagggggaataaaaattatgaacgaggggaagaggaaggttaaaggggtggaaaaattacgaggacgaggtgtggtgagaaggaaagacgtaaagaggaaatggtgattgtgatatttattatttgagtgtttttaagtattaggtttgtgttgagcgttttataaatattaattttatttatttagtaacgttaagggtggtgttattattgtttttattttttagatgaggaggttggggtttagttaaggttaagtagtttatttaaggttttgtgtcgcgaggaatagcgagaagtggaggtcgaaagcgaaggagagatagtgattgttagaaagagaaacggaggtggatagagagtggaggagagataggtgagagatatgcgaattgatagattaaagcgtggttgtagttgagttgggacgtagaaagggagtttgcgtttgttttgggttgcggatagttcgaggtagagatagtgtgtaaattggagataggaaaatattatttcggttggaataatggagggtggagacggtagtttttatttattttttttttagaattcgggtattttgtttttagtgagtagggttgttttttgttatttatggggattttgcgttttttattttaggttggttggttttttatttgatttttagttggaggatattatttggtttttaggaagaggttgttttatttattttttttttttttttttttgtagtttttatggggtgggagttaggtgttttggtttttttttttattttttttagcgtttaatgttttttatattgtcggttttcgaggggatttttgtatttttttttttttattttttattgttaggggttgtgtagttttttttaattttttttttttttttagtgtttgttttttttttcgatgattcgagttaagttaggtgtgtttattttttttatttatatcgttttttagaatttttttttttttgtttttttataattaaatttagatgtgaggtttcggcgggagtttgggaattttagtatttcgatttttagtgttttttgattagggtattcgtggggagggaggtattgggatgggggttagggttatgttttaggtacggagcgttttttttaaggagggaaggacggggtgtttggtttgaaagtagagaggggttttggatagggaatgaaattgtggggtagagaggttgattttgggatttaggggaggaaacgtggaggttgagataagaggttttttttttatattagtagtttttgttcgtgggggttaggattagggcgtagtttttattttaattttttttgagttgtcgtttttttttttcgtatattttgattttttttttttttttagggaggtttagatttggggtattttaagggagttttatgtttattagatgttgggggtggggttggtatttagtagaagaggttagaaattaggcgggtgtagagggtagggtttgttttttttttggttttttaatttttttagtttagagttaagaggatttatttgtttcggtttttagggatttggtttttttgattttttttttttattttaggtattgattttgtttttttgtttgttttaga

SEQ ID NO: 402 - DNA, 7843 bp, Artificial Sequence
  chemically treated genomic DNA (Homo sapiens)
tttgagatagatagagagatagagttagtgtttggggtgggggagggaggttaggaagattagatttttgggaatcgaggtaggtggatttttttagttttgagttagaggagttggggggttaagaggggagtaagttttgttttttgtattcgtttgatttttggttttttttgttaagtgttaattttatttttaatatttggtaggtatggggtttttttgggatattttagatttaggtttttttggaggagggagggagattaaaatgtacggggagaaggggcggtagtttagaaagggttaaaatgagagttgcgttttggttttgatttttacgagtagaggttgttggtgtgggaggggaattttttgttttagtttttacgtttttttttttaagttttagaattagtttttttattttataattttattttttgtttaagatttttttttgtttttagattaaatatttcgtttttttttttttgaagggagcgtttcgtgtttggggtatagttttggtttttattttagtatttttttttttacgagtgttttgattaggaagtattggaggtcgggatgttagggtttttaggttttcgtcgaggttttatatttggatttggttatgggaaggtagaggggaggagattttggggggcggtatgaatgggaggggtgaatatatttggtttggttcggattatcgggggaggggataggtattggaggaaggggggggattaggaaaaattgtatagtttttggtagtggagagtggaggagggagggtataggaattttttcgggggtcggtaatgtggggggtattgggcgttgggaagggtggagaggggagttagaatatttggtttttattttatgggagttgtaggagagaagagaaagagggtgggtgaggtagtttttttttggggattaaatgatgttttttagttaggggttagatgggaagttagttagtttgaggtgagaggcgtaaggtttttatgggtggtaagagatagttttgtttattggggataggatgttcgggttttgggaagggggtggatagaggttgtcgtttttattttttattgttttagtcgggatagtgtttttttgtttttaatttatatattgtttttgtttcgggttgttcgtagtttagagtaagcgtaggttttttttttgcgttttagtttagttgtagttacgttttgatttgttagttcgtatgttttttatttattttttttttattttttgtttattttcgtttttttttttgatagttattatttttttttcgttttcggtttttatttttcgttgtttttcgcggtatagggttttggataaattatttaattttaattaagttttagtttttttatttgaaaaatgggggtaataatagtattatttttagcgttgttggatgggtgaaattaatatttgtaaggcgtttagtataggtttggtgtttggaaatatttaggtaataggtgttataattattattttttttttgcgttttttttttttattatatttcgttttcgtggtttttttatttttttggtttttttttttttttcgtttatggtttttgttttttttttttcgttttttgagttgggtaagtttttttttatttttaattttatatttagtttttgatttttagtttagggtagttttgtttagttagggggagagggtttttttaacgtcgttgaatttttttttttgggagttttttatagtttatcgttttataattatttttatattagatagagaaaggggggtgttggtagtttattgaaaggatattagggatataggagagtttttagggtttttggttttttttttaggggattaggagggatagcgatttatggttaaagaaatgtttggagagattaggaggtgggagatagattgggttagttagggcgatgtgggggttgtgtaggttagtttttatttgggggttgtgtaggttagtttttattcgtttttaggttttaagggaagttcgggatttatttggggtcggggtttagatcgtatttaaagggatggggtgtagtttgtagaaattaaggagttattttatattaggggtaggagtagtgggcgggagagcggtttgggggtttgttgtgtgaatgtaaaggaggttattttgttgtaggagtgtggaattggaggattaaggtgtgatcgttaaggaattggcgttgggggtcgttttagggtttagtacgaaaagttgtgttttgtttgttgttgtttttttagaaatttttttttatgtacggcgggaggtgggattgggatagaaattttgtagatagttttgaatagtggggtagggaggaaaggaaaggtagttaggggcgtatgtaattagtagtgagagttcggggagttcgggtaggggaatgtttcgggtcgtagttagattttattttttttttaaataaaagaaaattttattattcgtcgggcgtttttttttcgtttttttttcgttttagtattatcggttcgaagtgtttgggattgtagtgttcgggtaggggtagttagaggtcggtttttttatttcgaggtttagatgttgggggggaggttttaggagtgacggggtgcgttttttttcgtaaggaaatttattttttaaagttgcggttaacgaagtttagtagagtagtattcggagttttatggcgtcgttttattcgggtaggattcgaattgagtttggggggttttcgtttttttaggtttgattttttttgggcgggtggacgtcgatatttcgcgcgggatttttcgtcggggtttttagcgcgggtttatgcgagcgtgcggggtatcgggcggcggcgttaagtgtggtttcgcgtttgtgtcgcgcgcgcgggcggcgggttcggagcgtgttggtagtggtcgcgtcgggcgggcgcgtagtaagacgtggttggagttggggttttttcggggtttcggggtttcgtttcgggtggcgggggttgagtcggtcgttcgcggtttttttttttttttggagtggttttgttcgcgtcgtcgggtcgagtgtttttttcgcgggcggggatggtgggagttcgagcggggacggagcgggagggagggagattgcggcgcggagtcgggcgggtcgggtcgggtaggggttgagttgcgttggaattgggtcgggcggcgtcgggttcgggagggaggggcgcgcggggggcgggggtagtttttttaacgcgggggtttcgcgagtgagtttcgggcgcgttgattggagtttacgttattgaataatttatgagggaagcggagaggggtatcgagtggagtaggtcgggaagttgagagaaagtttggagaagggggaggggcggcgggtgaggaatttcgggatcgtttagatgtgcgtcgtggcggtgcgcgttgtttaggatcgagtatgtcggggttggggtttagggattttcgggataggttcgaattcggttggtattagggagtagagaaaatatatatttagtagtaatacggagggtcgtttaggcgtgtacgtaaatgtttatcgcgtatataaagttcgttttgattttgttgcggattttagatgtcgtttttggatgcgtttattattttttagtgggcgtagggattgcgttttgggggaaaaggaaggaaaagggagtagaagttttggagaattgacggtcgtttagggggttttaaggagtaattttagtttggatagttttgtagcgaacgtttatatagttattttataaatatttagtgttggggatttattgtgcgcgtaattaagttttgaaaaatgtttagaggaggcgcgtattaagttgcgttagggagtagagaaaaatcgaggaaataacggtaaagaaaaggtgggtgtggcgggcgcggtggtttacgtttgtagttttagtattttgggaggtagaggtaggcggattatttgaggttaggagtttaagattagtttggttaatatgatgaaatttcgtttttattaaaaatataaaaattagttgggtatggtggcgcgcgtttgtaattttagttattcgggaggttgaggtaggagaattgtttgaatcgggatttaggaggcggaggttgtagtgagttgggagttgagatcgcgttattgtattttagtttgggttatagagtgagacgaaattttaaaaaaaaaaaaaaaaaaaaaaaaggtgggtgtgttcgagagggtgaggggttcggttagatttttaaatcgttttttttatttttattttcgtgttttgggggggttttttcgtcgttcgtagttatgatttttgaggttggggttgcggttgcggttgttgttttttttgagttgttttttgtttggtttttgggggttttcgggatggttgggaggggtttttttttttattgttaattttttttatttttttattagttagcggggagggtttagtatagtcgtgttttttttattaatttttttttattttagggaatttaatagtatgggttattggatagatggattggagggggtgttgttttaggagttagtttttttaaggggtagaaggaaaggatttagatttttatagtaattagcggggatagattttttttttttttttgagatagagtttttttttattttttaggttggagtgtagtggcgtgatttgggtttattgtaattttcgttttttaggtttaagcgatttttttgttttagtttttcgagtagttgggattataggtatagggtattaatttcggttagttttcgtatttttagtagagatagggtttcgttatgttggttaggttggtttcgaatttttgatttaaagtgatttatttattttggttttttaaagtgttgggattatagacgttagttatcgcgtttagtcggaggatagaattttgaggagtttagtaagagagacgttggagtttagtaagagagacgttggagtttaggatgtttggggggttgttaagcgtttttacgttttagaaaggatagtcgggtttgtgataattttttgtttcggtttatttatttttttgttgtaagaggtgttttttatatttttgtttttttttgttgttttgtttgggttttgcgttcgggttggggggggtgggtcggttatcgagggtaggaaatagtcggttttattggagttaggtagattaggttggagttgggaattttttttttttttttcgatgtaggtttagttttttttttttttatttagtttttttttcggggttttttgtaatttttttttaaatttttgttttgttttttgttatttttattttgtatttagattttgtagtttttaaaagttatgttttttggttggggatagtagtttaggtttgtaattttagtattttgggaggtcgaggcgggtggattatttgagtttaagagttcgagattagtttagttaatatggtgaaatttttttttattaaaaatataaaaattagttgggtattatggtatatatttgtagttttagttattagggaggttgaggtacgagaatcgtttgaattcgggaggtagaagttgtagtgagtagagattgtattattgtattttagtttgggtaatagagttatattttgtttttaaaaaatatataaagtaaataaataagtaaataaataaataggttgggcgtagtggtttatatttgtaattttagtattttgggaggtcgaggtaggcggattatttgaggttaggagttcgagattagtttggttaatatagtgaaattttttttttattgaaaatataaaatttagttaggtgtggtggtgtaggtttgtagttttagttattcgggaggttgagataggagaattgtttgaattttgggaggtagaggttgtagtgagttgaaatcgtgttattgtattttagtttgggtaatagagtgaaattttgttttaaaatataaattaattaaataatagaaaatatttattttagtggggtatagtgatttatatttgtaatgttagtatttttggaggttgagatgagaggatcgttttagtttaggagtttgagggtagtttgaataatatagcgagattttgtttataaaaaaagaaagaaagaaagagagaaaatattttattttatgttaggttattagtttatattttatattaggtagtaatttattttttattatttagtgtatgttagttaaagaatgaaaaaatgaaatttttattgagtatttattacgtgtcgagtgattatattgttagtttttaagatttgtaaaatatggtttttggttttaaagagaatttggtaaaaattaatatagttttatgttatttggtgaattataatttggtagaaaaaaaattttatgattttttttttacgtggagatggtatttgagatttttattttaatttttaggaattatttttggtttattttgtgtgtgtgaagttatgttttttatttttagattatttagaattattttttaggtaagtaaatttagtagttattaaattatagaacgtgggtgaatatttacgttattatttgaatttatgtttgttttgtagattaaattaaatttagtttttttttttttattattagagtattttgttgttttttatttaaaatattaggttgttatttttgtttttagtttagagtaatatattgttattatacggtgtattgtcggtatttgcgtatagtatttattaatagttattggagttttttttttttttttttttgtattttattttattttatttttggagacggcgttttatttttgttgtttaggttggagtgtaaaggtgcgatttcggtttattataatttttgttttttgggtttaagtgattttttcgttttagttttttaggtagttgggattataggtatatgttattatatcgggttaattttgtatttttagtagacgcggggtttttttatgttggttaggttggtttggaatttttgatttaaggtgatttatttgttttggttttttaaagtgttgggattataggcgtgagttattgtacgtggtttttttttttagagatagggttttattgtattgtttaggttggagtgtagtggtacggttatggtttattgtagttttgattttttgggttcgagtaatttttttttagttttttgaggagttgggatttcgcgcggggattatgttcggttaataagtttatttttttttgtatagattgtgatagttgttttgagtaattttggagttatagttttttttattgtaagaaataataagtagtaaattattttttttttcgtaaattgttgaattttttattattttttttatattttagtttttttttttttgggttatttaattgtgtcgggtttaaagtttaggtttattttaaagtttatgaagtttaagttttagtattttttatttgtttggttttttttacggttttggttaataagtgttataatttaaatagttttgaaggtgagttttagtaggataatatttgaaatgatttgaaattttatagttttgttataaaaggaatttgatagagtttttaatattattaatagagttgtaaagtttaaataaatttttataaataatgatgaaattttaaaaatttagttaggttattcgggaggttgaggtaggagaatta

SEQ ID NO: 403 - DNA, 5544 bp, Artificial Sequence
  chemically treated genomic DNA (Homo sapiens)
tgttttatgtttttgttaggtaaaatgatttttttttaggtatggtttaggcggttgttatttttattttgttttatttattgatgatatttttttagtttttttattgttatgtgagaatttttttttttttttataattagtttaatggagtttttaaaggtaaagagattagtgtatatgtttagtatggtattttaaattggaaatttttttatttgttttataaagaattggggatataatttaaggtatttatttgttgtttttaattattgttataatttgaggtgaattaagtttttagatgaatattttaaaggatattttagttttttattgttttgttaattatatttttaaggatttttattttttttttttattttagttatttatttttgtgattatattttaggtttcgttgtaatttgaattgaaattttaaatataatttgttgttatttggtaaaaattttttttattttttattttattattagttattattaggatttatattttgaatttattaaaatgtttagttttttagtttatgtattttttttttttatttttaattttttttagttttagttggattatatatgttaattattgtgttaatatatatttttttttgagagttttaaatataggttaaattgtgttataatgtaagattatttgggtttattttatttttattatttaaaagttatgggattttggggaagttatttagattttgtgtgtatttatgtttttatttgtaaaatgaggataataatagtacgaatgttttggggataaaaggagatagtacgtgtaagtgttgagaaaaaaacgttatgattaataagagtatttaatagatatgaattagtagtagtaatattttttaatttaaaaatgttagtgaaaaaataatatgtgttaataagttatgttagtttataggtgtttatatattttatttatattatttaaatagtttttttgttggttaattatttttaaaaagatgtagtatttttttatttaaatgataatgaagtattgatttattttttgagtttttgtgtttttagtatttaaagaaatgggttgtgtttttgttttgttttttttttaattttattttgatagttaattttttgggtttttaaggagtatttgttttaattatgataggataatgaaatattgatatttaattataatatttatgaaggtagtagatgttaattataaattaggaggtatgtggttttatatttttttttatgtaataattgtggttttagaaaagagattagatttaaaaaatagtttgagttatattattttttattgatgttatattatgttattttttttagatttataattatgtgatagttattttgagttttgaagattttaggattttttttagtttggaatttaaaaatttttttgacgatgggtattttgttgaatttttttatttaagtaagtttttggaggaagagtttttaatttaggtattatataaataattatcggattaatagatttcgattaaaaaaaaattgtaaataaattaatattttgaatatagtttttgtagagtgaaattgtgtttttttgagatatgtgtaataaagtattttgaggatgtgaatattattaatattttagttttaattattttatttttataattttaagtgttttttaatagtaaattagtgaaatgttaattataattttaaaaaaaatttattattttggaataaaattttaggaagtattataaagaagtaatgtaaggtggtaatattgggttttgttaaaattttgggtaagttatttagtttttttaggttgttttttaattattaaaatgagttttggtatggattagatgaaataatgtattaaaattattttgtagataatagtaaataataaatgtttattgaatttgaggaattaaatgggtaggatgttaggagttgttaggttttttagaagtaaatttttattttaaagagtataaaattaggtttatgtttattgtatttgtatttttattttttttgtaatttgtttttaaataatttgttatggtttttggttaataaatatattttttttttatttttttattataaaataaaaagataatatttttatgtttttagtatggttttatttttagattttagaaatatatagttggatgtgttttttgggaaaatatataaattaaaattatttttggtaggtaaatattggttattaataaatagttttagtaagtttttttttttataatttaaggatttatgttatagtttatttatttagtgggtttattagaatgtagttatattttaaagttagttttataaggtttttttttggaaagaatttagttgatgagtttttatttttttaattgttgtttttatatttttatatgataaattattattttttttggttttgtagtattttaatagatttagagttgttttttgagaaaagttttagtattaataaaggttagaattaataaaggttgaattaaggatgatatgtatgtggtatgtgttttttttagttttttttttaggtttatgaagaaattattaattagtgagaatattttttttatagaatataaatttagttttaggttatttttgaataagagttttaggaagtaaaaggaaataagtatgtaagaatattaagaatatatttgttatatttatattagaatgtaagttttttaagggtatagattgtgtttgatttatttttgtttttttaataaaaatgttgatggggtgttaattaattgtataaagtaggaataagagttagtttcgtaaatgttttttaaaagttgataaaagtatttttattttgattttaaaattaaaaaaagttaataaagatattataatattttaaaaatttaaattttatgagagtttttgtttggatgaaaattagaatatatttatattattttaaacgaatgaatatgtgtgattttataaaaataatatttttttaaattatgaatttagatggaaaaattcgatatttttatttttgtagttagttttattttttttaaaatagtttaaattagtaagaattttttagaagttatagtttgatttatttaattttttaaggaaaaaataaaaaaatttaaatagatattgttttatttttattattttttatttttattaatagtggtaatttaagtgtattttaaagtattttaatttttttatagagtttattaaatgagtattttgtggatatttatatatagttatagaattttaagtggtgtttagattagttatatgttagtgtatttttaattgttagagttaatatgtttttagtatggttttttaattatattttaataatttattatagtttttttttataatgtaaagttttggaaattatttattaaaaagtgtttgtgtattttggggttttggtaggttagggtagaatttttgagaatacggtgtgttttagagaagataattaatttgagaggatttatatagaaatagtttatttaggatttggttgttggtttttatttgagatttgaggattttataattatttggagatatttataagtgtatagtatattttggatattatttttaatgattattttattttgtaaagaggtgattttattaatagtaaaggagagggtttagttttagttattaggaatatagttttttgttagtaagtgtttaatgatttattttttttaatagaatttttataaggttggaatttagggagggatgtttggagaatgtttgaaaggaagtttataagttattgttttgttttttgttggagaaagtgtttcgtggtagttagagaagttgattaaggtaaatagtaatatgttttggtaatatttttttattattttttatgtataatttaagaaaggttgttatgaagtgttttaattaggttgggaatattataaatttcgaaaaaagaaaattattagtggaaaaattaaggatatagtagatttaataattgtgtttacgtggaattataaaatttatttaagtgaattgtattaaaatagatagaatattttaagaaattgttgtatgtgtattttttttaatttagttaattattttattaatttgttaagatgattaatttttttggaattatgtagatttagttaaaatgaaattatatataagatttatttttttttttagatgtttttttatttatttttaaatttttataattattagatgttttttttttttagaagatattttgagaggaaagtaaaaatattatttttgtaaagttatttttatttttttaaaggtttgttggtaaattatttttattgatttttttatttttttagtttgtgtatatatatttaatttatattaaattttattagatggtattttatttttttaaagtaaagtagtcgtgggtttagatagttgaatttttaaatttttgtatttattgaaagtgtatatggtgttatatggataaagaaattgtgttgaaagaaaaatatttttgtttgtaatattttataattttttagaggaaaaaaaagtgtagttatatggtatattttttataaaattttatgtggttttaatgttttttttttgttaaaaagtagatatatgtttaatgtatagatttgtaagttttattattttaaatttattttttagtggtaaataaaaatgttatgtaaaatttaatgatttgttaaagtgattttttagtgaattttagaagaaaatgtaatataaatttgaattggtaaaaaagaaaaaataaaaatttttgtatgttaacgtaagtagatgttggtgtagttataaggatgagaaggttataaaattttttttgagttatttatagtttatttgagggttaagaacgtttttaaaatttgtttttaattttatagaaattttttgaaatttggtacggtatttaaaagttcgtggaaagaaaaaaattttgttttggttttagtttttaattataaagatagatttggttttttttaacggtttttatagatttagtgatttacgttttgaagatagaattagttaatttttaaaaatatttggaaaaatgaaggttagtataagtaattttaagtatttttaaaaaattagggttggttggattgaacgtgattagagttttttattgtttagaaggtgaagatttgtatataagtatttatttttttaatgggttgggattggaaaattgttttaaatatattgtagaaatatttgtttttgtagagttggaagaattttagtaattatagtcggattagtggaaaataattaaaagttttgtggggcgagagaaaaaggatttaggtgtaaataaaattttgttatttttattatttagtaggaattgtgtgtatgtttaattttttttattttatgtaga

SEQ ID NO: 404 - DNA, 5544 bp, Artificial Sequence
  chemically treated genomic DNA (Homo sapiens)
tttatataaaataaagagaattaggtatatatatagtttttgttaaatagtagaaatggtaagattttgtttatatttaaattttttttttttcgttttataaagtttttgattgttttttattgattcggttataattgttggaatttttttagttttgtaaggataaatgtttttatagtatatttagaataattttttaattttaatttattgaggaagtaaatatttatgtataaatttttattttttaaataatagaaaattttgattacgtttaatttagttaattttaattttttaagaatatttgaggttgtttatattaatttttatttttttagatgtttttgaaagttagttaattttgtttttagagcgtgggttattggatttgtgaaaatcgttgaaaaggattaagtttgtttttgtagttggaagttgaagttaggataaggtttttttttttttacggatttttgaatatcgtgttaagttttaaaagatttttgtaaaattagaaatagattttgggggcgtttttggtttttaaatgaattgtgagtgatttaagggaagttttatagtttttttatttttgtaattatattaatatttgtttacgttgatatatagaggtttttatttttttttttttattagtttaggtttatgttgtatttttttttagaatttattgaaggattattttagtaagttattgggttttgtataatatttttatttgttattaaaagatgaatttaaaataatgaaatttgtaggtttgtatattaaatatatatttattttttaatagaggaagaatattgaagttatataagattttgtgagaaatgtgttatataattgtattttttttttttttggaagattatgaggtattgtagatagaaatgttttttttttagtataatttttttgtttatatagtattatatgtatttttagtaaatatagaagtttaaaaatttaattgtttaaatttacggttgttttattttaaagaaataaaatgttatttggtgaaatttagtatgggttaggtgtgtatgtataggttagaaagatggaaagattagtaagaataatttattagtagatttttggaagaatggaaatggttttataagagtggtatttttgttttttttttagaatattttttgagagaggagaatatttagtaattataaagatttaaaaataaataaaaaagtatttgaaaagaaaagtaaattttatgtataattttattttggttaaatttatataattttaaagaaattggttattttgatagattagtaaaatggttgattgaattaaaaaaaatatatatataatagttttttggagtgttttgtttgttttaatgtaatttatttggatagattttgtggttttacgtaaatatagttgttaaatttattgtgtttttaatttttttattaatggtttttttttttcgaagtttataatgtttttaatttgattaaaatattttatggtaattttttttggattgtatatgaaaggtaatggggaaatgttattaaaatatgttgttgtttgttttagttaatttttttggttattacgggatattttttttagtaaagagtaggatagtggtttgtgaatttttttttagatattttttagatatttttttttgaattttagttttatgaaaattttgttgaggaaaatgagttattaggtatttattggtagagaattgtatttttggtggttggggttgggtttttttttttgttgttggtggagttatttttttataaaatgaagtaattattaagagtaatatttaaggtgtgttatatatttgtaggtatttttaagtgattgtgaaatttttagattttagataaaagttagtagttaggttttgaatgaattgtttttgtgtaagtttttttagattgattgttttttttggaatatatcgtgtttttagaagttttgttttagtttgttaaagttttagagtatataggtattttttagtgggtgatttttaagattttatattgtagagagaaattataataaattattagggtgtaattaaaagattatgttgagagtatgttagttttagtaattaagaatgtattgatatgtgattggtttgagtattatttaggattttatgattgtgtgtgggtgtttataagatatttatttaataggttttatgaagaggttggagtgttttaagatatatttaagttgttattattagtaagggtgggaaatgatgagagtgaaataatgtttgtttaagtttttttgttttttttttggaaggttgggtgagttaagttgtaatttttggaaaatttttattagtttgaattgttttaagaaaaatgagattgattgtagaaataaagatgtcgagtttttttatttgaatttatggtttagggaggtattgtttttataaagttatatatgtttattcgtttgagataatgtgaatgtattttaatttttatttagataagaatttttataaaatttggatttttaaaatattgtaatatttttattagttttttttaattttggaattaaaatgaaaatatttttgttaatttttaaaaaatatttacgaaattgatttttatttttattttatataattagttaatattttattaatatttttgttgagaaaataaaaatgaattagatatagtttgtgtttttaaggaatttatattttagtataagtatggtaggtatgtttttaatgtttttatatatttgtttttttttgttttttaaagtttttgtttagaaatagtttgaagttgagtttgtgttttgtagaaagagtgtttttattggttggtgatttttttatggatttgggaagaggattggaaagggtatatattatatgtatgttatttttagtttaatttttgttagttttaatttttgttagtattgagattttttttagaaagtaattttgggtttattaaaatgttgtaaaattagaaaggatgatgatttgttatgtaaaaatgtaagggtagtaattaggagagtagaggtttattaattgagttttttttagagagggattttgtaaggttgattttggaatatgattgtattttggtaagtttattggataagtgagttataatataaatttttaggttataaggaggagagtttattagaattatttattagtagttaatgtttatttgttaaaaatgattttaatttatatgtttttttagaaaatatatttagttatgtatttttagagtttgaaggtaagattatgttgagagtataaggatgttatttttttattttatggtggggagatgaaagagagatgtgtttattaattaaaagttatgataaattatttaaggataagttataaggggaataaggatataagtgtagtaaatataagtttgattttatattttttaaagtaaaaatttgtttttagagagtttaatagtttttaatattttatttatttgattttttagatttaataaatatttattgtttattgttatttataaagtgattttaatgtattattttatttgatttatattaaaatttattttgatgattaggaaatagtttagaaaaattggataatttgtttaagattttaataggatttagtgttattattttatattgtttttttgtgatattttttaaagttttattttaaagtgataaattttttttaaaattataattgatattttattgatttgttgttgggggatatttaaggttgtgagggtaaaataattaaggttaaaatattaatgatgtttatatttttaaagtattttgttatatatattttaaaagaatataattttattttataaggattgtgtttaaaatattaatttgtttatagtttttttttaatcggggtttattaattcgatgattatttatatagtgtttgggttaaaagttttttttttagggatttgtttaaatgaaaggatttaataaaatatttatcgttaaagagatttttgagttttaagttagaaagagttttgaggtttttaaagtttaaaataattattatatagttatagatttggaagaagtggtataatatagtattagtgggaaatgatatagtttaaattattttttgaatttgattttttttttaaaattataattgttatataaggaagaatataaagttatatgttttttagtttgtaattggtatttattatttttataaatgttataattagatgttagtgttttattattttattataattagggtaagtgttttttggagatttaaagggttaattattaaaatggggttagaaaagaaatagaatagagatataatttatttttttgagtgttgaggatataaagatttagaagataaattagtgttttattgttatttaaatagggaaatattatatttttttagaagtggttaattaataagaagattgtttaaatagtataaatagaatgtgtaagtatttatagattaatataatttgttaatatatattgtttttttattagtatttttagattagagaatattattattattagtttatgtttattgaatatttttattgattatgacgttttttttttagtatttgtacgtgttatttttttttatttttagaatattcgtattattattatttttattttatagatgaggatatggatgtatataaaatttaaataatttttttaaagttttataatttttgagtggtagggatgggataaatttagatagttttatattataatataatttaatttatgtttagggtttttagaggagggtatatattggtatagtgattggtatgtgtgatttagttggaattaggaggagttgaagatggaaggaaaaaatatatgggttaaaaaattggatattttgatgagtttaaagtatgagttttagtagtaattagtaataaggtgggaaataaaagaggtttttattagatagtagtaggttgtatttaagattttagtttaagttataacgaggtttaaggtatggttatagaagtaagtagttgagatagaagaaagaagtgaaggtttttagagatatagttggtaaagtagtgagaggttaagatattttttgggatgtttatttgggaatttaatttattttaaattatggtaataattaagggtagtagataaatgttttgagttatatttttaattttttataaaatagatggagagatttttagtttaagatgttatattgaatatatatattgatttttttgtttttggaaattttattaagttgattgtaaaggaggaaaaggatttttatatgataatgaagagattgaagaagtattattaatggataaagtagaatagaaatagtagtcgtttggattatatttagaaaggaattattttgtttggtagaagtatgaaata

SEQ ID NO: 405 - DNA, 893 bp, Artificial Sequence
  chemically treated genomic DNA (Homo sapiens)
tcgacgagtttcgtaatgaagacgtgtaggtattggattgaggtcggggattcgaggcgagatcggttggtcgcgtggtagagaagggggaaggtttgcgtcgcggtgggggtggtcgaggtattgaatgagtcggattcgtagtagaaatttgaaggggaggcggggaatgtttcgcgaggggttgtggtgatacgtttcgattttttcgggtatttttttagtaattttgtttcggattttttgaggcgttcgttcggagttttgtttttttcgggcggttgtcggggaattcgtttttcgtttgggcgttttattcgggtcgtgaggtggtcgcgttttttgggcgagggagtaggagaagcgcggtgttaggtcgagacggggttggagcggttgaggggcgtaggatgtttagaagttttttgaagtgtttttggatttttttatttcggtttggaattggttcggtttgttgggtagaaagcgggggtgggatggtcgattaatttggacgagtagtgtattcgttttgtgggaatttttttttgaaattataggtgttgtatttaatcgttttatttgttttattattgttaaagtgttttttttttaaaattattttattttttaggtgttgtattgttttttttttatttttttttcggttttttttgagtgttttttttgggaaatttttcgtcggttagtgaggtcgagttatatttttttttggaagtttttatgagtttttttaatagtaaaatttaaatgaaaggttatttttatttttatttttgtgttataattttatttgttagtattttttgttttttgatttaaatttagtcgtttttttatattgtttttttttttatttttttttttgaagt

SEQ ID NO: 406 - DNA, 893 bp, Artificial Sequence
  chemically treated genomic DNA (Homo sapiens)
gttttagaaaagaaagtagaaagaagaataatgtaaagaaacggttgaatttagattaaaagataaaaggtgttaataggtgaaattatgatataggggtaagaatgaagataattttttatttagattttattgttaaggaagtttataaggatttttaaaaagaagtgtaattcggttttattagtcggcggaggattttttaggagaaatatttagaagggatcggaagagaaatgaaggaaagataatataatatttaggaagtaagataattttaaaaagagagtattttggtagtggtgaagtaggtgaaacggttgaatataatatttgtggttttaaagaaaagtttttatagagcggatatattattcgtttagattaatcggttattttattttcgttttttatttaataagtcgagttagttttaagtcgagatgaagggatttaggggtattttaaagggtttttgggtattttgcgttttttagtcgttttagtttcgtttcggtttggtatcgcgttttttttgttttttcgtttaagagacgcggttattttacggttcggatggggcgtttaggcgggaagcgggtttttcgataatcgttcgggaagggtaaggtttcgggcggacgttttagggggttcgaagtaaggttattagagaggtattcgggagggtcggggcgtgttattatagtttttcgcggagtatttttcgttttttttttaagtttttgttacgagttcgatttatttagtatttcggttatttttatcgcgacgtaggtttttttttttttttattacgcgattagtcggtttcgtttcgggttttcggttttagtttagtatttgtacgtttttattgcggagttcgtcga

(The sequence listing continues in the following parts.)

1. A nucleic acid comprising a sequence at least 18 bases in length of a segment of the chemically pretreated DNA of genes associated with the cell cycle according to one of the sequences taken from the group of Seq. ID No.1 to Seq. ID No.424 and sequences complementary thereto.

2. A nucleic acid comprising a sequence at least 18 bases in length of a segment of the chemically pretreated DNA of genes associated with the cell cycle according to one of the sequences according to the genes CCNB1 (M25753), CCNE1 (M73812) (M74093), DENR (043583), EPHAS (L36644), MCM4 (X74794), NEK3 (Z29067), PCTK3 (X66362), PRKAR1B (M65066), PRKCG (M13977) (Z15114), PRKM3 (M84490) (Z11696), PRKMK2 (L11285), ZAP70 (L05148), ACP1 (NM_{—}004300), AKT1 (M 005163), BMPR2 (NM_{—}001204), DDR1 (NM_{—}013993), CCND3 (NM_{—}001760), CCNF (NM_{—}001761), CHES1 (NM_{—}005197), CLK3 NM_{—}003992), DYRK1 (NM_{—}001396), EFNA1(NM_{—}004428), IFIT1 (NM_{—}001548), SCYB10 (NM_{—}001565), INPP5D (NM_{—}005541), ISG20 (M 002201), LY6E (NM_{—}002346), PCNA (NM_{—}002592), PIK3CA (NM_{—}006218), PPP1R3 (NM_{—}002711), PTPN7 (NM_{—}002832), PTPN9 (NM_{—}002833), RHOK (NM_{—}002929), RYK (NM_{—}002958), EPHB3 (NM_{—}004443), PPP3CA (NM_{—}000944), PRKCA (NM_{—}002737), PRKG1 (NM_{—}006258), MAPK10 (NM_{—}002753), MAPK6 (NM_{—}002748), PTPRC (NM_{—}002838), PTPRD (NM_{—}002839), PTPRG (NM_{—}002841), RBL1 (NM_{—}002895), STK3 (NM_{—}006281), TGFBI (NM_{—}000358), and sequences complementary thereto.

3. An oligomer, in particular an oligonucleotide or peptide nucleic acid (PNA)-oligomer, said oligomer comprising in each case at least one base sequence having a length of at least 9 nucleotides which hybridizes to or is identical to a chemically pretreated DNA of genes associated with the cell cycle according to one of the Seq. ID Nos 1 through 424 according to claim 1 or to a chemically pretreated DNA of genes according to claim 2, and sequences complementary thereto

4. The oligomer as recited in claim 3; wherein the base sequence includes at least one CpG dinucleotide.

5. The oligomer as recited in claim 4; characterized in that the cytosine of the CpG dinucleotide is located approximately in the middle third of the oligomer.

6. A set of oligomers, comprising at least two oligomers according to any of claims 3 to 5.

7. A set of oligomers as recited in claim 6, comprising oligomers for detecting the methylation state of all CpG dinucleotides from one of the sequences according to the Seq. ID Nos 1 through 424 according to claim 1 or to a chemically pretreated DNA of genes according to claim 2, and sequences complementary thereto.

8. A set of at least two oligonucleotides as recited in claim 3 which can be used as primer oligonucleotides for the amplification of DNA sequences of one of Seq. ID 1 through Seq. ID 424 and sequences complementary thereto and/or sequences of a chemically pretreated DNA of genes according to claim 2, and sequences complementary thereto, or segments thereof.

9. A set of oligonucleotides as recited in claim 8, characterized in that at least one oligonucleotide is bound to a solid phase.

10. Use of a set of oligomer probes comprising at least ten of the oligomers according to any of claims 6 through 9 for detecting the cytosine methylation state and/or single nucleotide polymorphisms (SNPs) in chemically pretreated genomic DNA according to claim 1 or a chemically pretreated DNA of genes according to claim 2.

11. A method for manufacturing an arrangement of different oligomers (array) fixed to a carrier material for analyzing diseases associated with the methylation state of the CpG dinucleotides of one of the Seq. ID 1 through Seq. ID 424 and sequences complementary thereto and/or a chemically pretreated DNA of genes according to claim 2, wherein at least one oligomer according to any of claims 3 through 5 is coupled to a solid phase.

12. An arrangement of different oligomers (array), obtainable according to claims 11.

13. An array of different oligonucleotide- and/or PNA-oligomer sequences as recited in claim 12, characterized in that these are arranged on a plane solid phase in the form of a rectangular or hexagonal lattice.

14. The array as recited in any of claims 12 or 13, characterized in that the solid phase surface is composed of silicon, glass, polystyrene, aluminum, steel, iron, copper, nickel, silver, or gold.

15. A DNA- and/or PNA-array for analyzing diseases associated with the methylation state of genes, comprising at least one nucleic acid according to one of the preceeding claims.

16. A method for ascertaining genetic and/or epigenetic parameters for the diagnosis and/or therapy of existing diseases or the predisposition to specific diseases by analyzing cytosine methylations, characterized in that the following steps are carried out:
a) in a genomic DNA sample, cytosine bases which are unmethylated at the 5-position are converted, by chemical treatment, to uracil or another base which is dissimilar to cytosine in terms of hybridization behavior;
b) fragments of the chemically pretreated genomic DNA are amplified using sets of primer oligonucleotides according to claim 8 or 9 and a polymerase, the amplificates carrying a detectable label;
c) Amplificates are hybridized to a set of oligonucleotides and/or PNA probes according to the claims 6 or 7, or else to an array according to one of the claims 12 through 15;
d) the hybridized amplificates are subsequently detected.

17. The method as recited in claim 16, characterized in that the chemical treatment is carried out by means of a solution of a bisulfite, hydrogen sulfite or disulfite.

18. The method as recited in one of the claims 16 or 17, characterized in that more than ten different fragments having a length of 100-2000 base pairs are amplified.

19. The method as recited in one of the claims 16 through 18, characterized in that the amplification of several DNA segments is carried out in one reaction vessel.

20. The method as recited in one of the claims 16 through 19, characterized in that the polymerase is a heat-resistant DNA polymerase.

21. The method as recited in claim 20, characterized in that the amplification is carried out by means of the polymerase chain reaction (PCR).

22. The method as recited in one of the claims 16 through 21, characterized in that the labels of the amplificates are fluorescence labels.

23. The method as recited in one of the claims 16 through 21, characterized in that the labels of the amplificates are radionuclides.

24. The method as recited in one of the claims 16 through 21, characterized in that the labels of the amplificates are detachable molecule fragments having a typical mass which are detected in a mass spectrometer.

25. The method as recited in one of the claims 16 through 21, characterized in that the amplificates or fragments of the amplificates are detected in the mass spectrometer.

26. The method as recited in one of the claims 24 and/or 25, characterized in that the produced fragments have a single positive or negative net charge for better detectability in the mass spectrometer

27. The method as recited in one of the claims 24 through 26, characterized in that detection is carried out and visualized by means of matrix assisted laser desorption/ionization mass spectrometry (MALDI) or using electron spray mass spectrometry (ESI).

28. The method as recited in one of the claims 16 through 27, characterized in that the genomic DNA is obtained from cells or cellular components which contain DNA, sources of DNA comprising, for example, cell lines, biopsies, blood, sputum, stool, urine, cerebral-spinal fluid, tissue embedded in paraffin such as tissue from eyes, intestine, kidney, brain, heart, prostate, lung, breast or liver, histologic object slides, and all possible combinations thereof.

29. A kit comprising a bisulfite (=disulfite, hydrogen sulfite) reagent as well as oligonucleotides and/or PNA-oligomers according to any of claims 3 through 5.

30. The use of a nucleic acid according to claims 1 or 2, of an oligonucleotide or PNA-oligomer according to one of the claims 3 through 5, of a kit according to claim 29, of an array according to one of the claims 12 through 15, of a set of oligonucleotides according to one of claims 6 through 9 for the diagnosis of HIV infection, neurodegenerative disorders, graft-versus-host disease, aging, glomerular disease, Lewy body disease, arthirits, arterosclerosis, solid tumors and cancers.

31. The use of a nucleic acid according to claim 1 or 2, of an oligonucleotide or PNA-oligomer according to one of claims 3 through 5, of a kit according to claim 29, of an array according to one of the claims 12 through 15, of a set of oligonucleotides according to one of claims 6 through 9 for the therapy of HIV infection, neurodegenerative disorders, graft-versus-host disease, aging, glomerular disease, Lewy body disease, arthirits, arterosclerosis, solid tumors and cancers.

32. A kit, comprising a bisulfite (=disulfite, hydrogen sulfite) reagent as well as oligonucleotides and/or PNA-oligomers according to one of claims 3 through 5.
